United States Patent Application Publication US 2006/0134663 A1 - sequence listing, part 62

SEQ ID NO: 156195 - DNA, 310 bp, Homo Sapiens
atacttaattgttgcttatctattccttgtttgtagaaagcaggccaccccaggccctcctttccctgaccagtctgggttcttgccactgccagggaagttggtctttgaccattttcaaactgctgcttcctctctgcttccagctttgaaagccaacacatcctcctgtgaggggacaagacaagcagggatatgtgggccactggatctttgccagacttcccagctgcagccaagttcttagggttccgtcagcgctgcatccccaggagcctctgcctcagtgagtgtcctctggagcccccaa

SEQ ID NO: 156196 - DNA, 299 bp, Homo Sapiens
agaagcagggtaagaccacacttccctattcacttgaggtcaactgtgactgggcggcttgttttggctttagagctagggcatcatttaccaccttctttccctctagtcctggcgtgaggccaatgacacggagcacacaccaccctccctaagctgtgcatgggcgcaggagtgccacacaccctttgactgttgtcagcatgcagattgggcacggttgttattgcaacagaacctggctatcctgagtgacacacactacctcctcagtttcacacacgctgtgtcaagccacc

SEQ ID NO: 156197 - DNA, 259 bp, Homo Sapiens
gtctcctgagtttttaaaaattgttgaccttgagttttaattcctctgcccccattccacactctcctctccgagtacagctgaatttattatacatgtgtctttgactagattttttgtattgctgttgctactctggaaatgaagaaaatagggctgagatccatgtttgggtcagtaatcggggtggaagaggaataatgtgtgggacaaaaggcgattggtgaattgactgatatatacatctgaggctaattat

SEQ ID NO: 156198 - DNA, 455 bp, Homo Sapiens
attgagctcgtaccagctcgtgctgggaggggtcacaggatgctactcgggcacctagaagccacagctgccctccacagagcggcactgcaccatgcgcaggaatgtctcgaccttgtccatgtccttcctgaagcagtagagcagcccgtagttcttgagcagtgcgtcatggttgtgcgagtttgtgtcaaacttgctgtaggtctgcttgaggatctgcccagtccggcggctgccgtcttccagcctccccatcagcgtttgtgatgccttcctctaggtcctttagtgaggtgatatgtcatcgctgtccgatgtgtcatgcaccaggttgttggcgaacatactcctgaggaaccgcacgggctccagccacgactcgatgagcagcagggagatgcggagcagctctagattggatttctgttgcgtttcctccatgcctcccagct

SEQ ID NO: 156199 - DNA, 384 bp, Homo Sapiens
  misc_feature (49)..(49): n is a, c, g, or t
  misc_feature (89)..(89): n is a, c, g, or t
  misc_feature (131)..(131): n is a, c, g, or t
  misc_feature (143)..(143): n is a, c, g, or t
  misc_feature (151)..(151): n is a, c, g, or t
ccccgggcaggcaaggtctcgtcggccgtccctcccatggaagctgctngggcctgagcaggcctgatggggtgtcaggggccgccggngactgggctgggcctccctcttgagaccgtctgtaatccccntgaagcctcccntcagaacntggggggagttgcggaaccagctgggcagccccgattttcctgaggcccctcctagacggggcctcgcaggaaaggagctcgactctcagaggggctcagaccccaaaggttgatctccaggaacccagctgagcccctgagtgtgtctctccttcctggtaccttagaattccagtcctaaccctgctttccaaacgcacccccacaccccggtcttgcccccaccctctgt

SEQ ID NO: 156200 - DNA, 389 bp, Homo Sapiens
gcacgaggcattggtgggagaagtgggggctgtaacatcctttctgcagctccatcactgccaagctcagccccccgctggcctctctggcagcatccgctcctcctgggctctgtcgtcctgtcgctcctggatgttcagtggctcccgctagggtcagtcctgcagtgcttccccctcctttgctggttttcctgaaccctgcccatgtctacttaaaaggcctggatgaaactcactttcctactccgccaagggccccttacagccagcggcccggcctctgcaggccctcttcagagggaatttcacgcggggctttttcagagagaactcggtgtttcagttggtgaaactgtggttgcctgggtcccagccccacccctgag

SEQ ID NO: 156201 - DNA, 442 bp, Homo Sapiens
ttgtgctttgggcctgagcagccagaagccgttgccatcacctatgacaagggagacagcgcctggggcagagcccagtatggggtgcattcagggtagatcaggaggtatgagtgggcagtgggcgagccaggctgggggttgtgggggaggcctgggttgcaggtttaagcgtgggacccacgtcagattggtggtgggtcatgcatgctggggtggctctcaggtcctccctgctggcttcccactcccaggggctttctcctcccagattccttagctgggtgaggggcaggacagagccctttcctagggaagcccggcaccccctgctgtccagggaaggggagtccttctagcccctgacagcttctctgcccctccctggcctccccaggcctagccagggttgagttctcacccaccactgcaagtgcggaca

SEQ ID NO: 156202 - DNA, 469 bp, Homo Sapiens
cagttttcacacatctattcataggtgaaattaactggaaggaaactagcaaagcatttgcctttggggtcagcacaggagcagaggcccaggcagggccttgctttgacacacagatgatgggtcacacagttgtcacccttgacagaagagtaacagggacagcacaccagtcactctaggagctgaggccagaggaactcaggtatttccttctagaggtagtaagtccactgaggcagatgccaagccgggtggtgcctcgctgtgtacaatgttctgctccctgtgcccctatgagtgaccctatgaggtaagagccagagccgggctcacacctgagctcctggcatgtggcggccctttagaagacagaaagtgtgtgcttagcccctgaagcagccacgctgtgcccagcggagggcaggctcagacagcactcctacccacaaccacctttaagatcctc

SEQ ID NO: 156203 - DNA, 361 bp, Homo Sapiens
ccatggagcgatgaagaaatctttacctcagtttcttcatcagcagaatgggtttctggcctctctcagggataattttgaaggcataatgaaaattatgatgaatcactcattggtaggaaaataatgatataagtttcaaatatgtatgattttacctatacttggtaatgctttgttttatagagcctgttaagctgctattgatagtcggagcttatatactgtgacttctgaagactatacatgaattccacaatcagtgctttgttgatacaaaatccttaaaagggaggcactttaaagaatatgtatttttcacttttcttaatatgtttcatcgcttcatgggtgccgagct

SEQ ID NO: 156204 - DNA, 372 bp, Homo Sapiens
agcgatgaaccctccaaaacatttcctcactgcctctttggggtggttttgagctaggcagtgacactgctgggccagctggtgagccaagcagaggctcccaacgtgggggcagctaggagcaggcaggttgccactggatgtgtgaacgcctgccctacctgtggtagttgtgtgtggagcagagccggtgtgtcatacctggaggctctgggcatctgagccttcctcagctccctcccccagctaggatcaagtccactttaacccttagcaacccttaggctgctagctcctaccctcgcgtcactcggggtgggggagcggatggatatctcaggccctttgtcaagccgcctcttcatcgctcca

SEQ ID NO: 156205 - DNA, 348 bp, Homo Sapiens
gcgatgaatgttcaagtgctttgcagggggacagctgctctgaactctgagggaggccgctgactgcagttggcctggggaattattatgcccatttcggtctctgagctgcacacaggcttccagagagtggtgatagggcacatttgttataagtgacctaagtgacaaatgtaactctagctgtcctaagcaaaaggaaattcatagacttaggtcgtaagttcagcatgtaacctccggggacatctatgtctggatgctcccaaatgatcttgagaaattgagtctgtttctcctttctgcttcccacttcgactccctctttctgcttcattcttggcaggc

SEQ ID NO: 156206 - DNA, 345 bp, Homo Sapiens
agcctgccaagaatgaagcagaaagagggagtcgaagtgggaagcagaaaggagaaacagactcaatttctcaagatcattttggagcatccagacatagatgtccccggaggttacatgctgaacttacgacctaagtctatgaatttccttttgcttaggacagctagagttacatttgtcacttaggtcacttataacaaatgtgccctatcaccactctctggaagcctgtgtgcagctcagagaccgaaatgggcataataattccccaagggttttccaattaacgacctccctcaagagttcagagcagctgtccctgtagcgaagcaagttgaacat

SEQ ID NO: 156207 - DNA, 311 bp, Homo Sapiens
agctggcccgggtttcgagtgaaggagaaagtgtgggaaacggaatagtcaaacacagcagtgaaatattatatttattaaatatgaagcttcaaaaatgcatagatggacctcttaagttgaaatggaccagctgaaaagaactggtactctgggaagcagtctgatatgctttttcaaatcccaaattacattttcattacacctgtgaattatagtaacacctgccaagaggaaatgagttttttggagaaaagaaagaaacagggaaacctatgcaattgttacagttggtaacttcactcgaaacc

SEQ ID NO: 156208 - DNA, 657 bp, Homo Sapiens
  misc_feature (227)..(269): n is a, c, g, or t
cgtgatggccgattcctagaggtatccccccatgggagcgatgaaagacttagagcaaggggcttgccaatcacggaatcgagtaggaattccctgtagtcaggcaggcatgctgctcaatagggcgtcggatgatttccgcgcgtgtatcaatttggtgcgtgccgaggtttatagcaccggggaagggcactctgcgttgatggcgccgctcagtttgatgaagnnnnnnnnnnnnnnnnnnnnnnnnnnnnnnnnnnnnnnnnnnnctacgggtcatcaggatttggagctcatgagattacctgcgggttctttaggctatgcggcctgtttaattccaccgcgacgttcatcatgcttcgatcaattttttgtgtatgccttgtcagcctgacctgctttatttcatcggcaaaggccaatttccaaccccgcgccaccttcagctcttcgctgcaaagcatcaagccggcctctatcgacgatgtcattgaccgcgcccatgagttgctgggtacgccctataagtggggcggcacatcggcagagcagggcttcgattgcagtagcttcctggtgtacttgttcaagacccaagccaatatccagctaccccgcaccactgccgccatgcaccgttcatcgcttccatgg

SEQ ID NO: 156209 - DNA, 769 bp, Homo Sapiens
ccgtaatcacagtcatagcgttcctgagttcaccctggaagcgaactgaagaaaggaagaaagttgcccttaggaaattatactggcagaagtgggagggaattagaaggaggctgttattatttatgtgattttcttttaccatttgtatattttacctggatttaaggaaaatgtcaattatgaaggccatatggcaacatctgtgacagagtgttaagatacaatatttgccaagataccactgagtactgagtatttatattactggttctcagcacttgacattttcctaaggatttatcaatggttatatgaaactctgtgtgctagctttctcacttaggaaaacataccaaatgtaagagagtgaaattgacattattataactctaatcttgggtgtgctatgctatattaaaagagataaaccttagcaaactggggtactttaaatatgattaataagtttaggtagaacatctcatgattcatcgctccatgggggtttgagagtgaagggagaagaggctggatgacttgggatggggagagagacccctcccctgggatcatgcagctccaggctgcacgtgggtggggtaagagttgggaacagatgaacattctgtaggggtcactatcttctaccacggtgctccccttcatgcgtgatccatggcacgcgtgtagcttaatgtaggacttccactgctcgggcgtcaggctgaggtagctgctggccgcgtacttgtgttgctctgtttgg

SEQ ID NO: 156210 - DNA, 538 bp, Homo Sapiens
ccatggtagcgatgaagtatccaggtcacctggagaaagctgacataagagcaggcacacagcaggaagctttgatcctcatcttctctctggctgcagccctcagctcttgtgcaccaactctgaccaatgactaggactggctgctcggagtacagctgtattgagaaagattctgaggctgggtctgcattcagcaggaaaaaaaatgaagtaattgtttggtaatgcctgacataggcctaagaatgggggaaacggtaaccctcctgccaggttttgtagaattttctctaattcattttctttagagatacggtaaggacccgcccccacccaaatgggtaaaaggcaaagcctggtttccatttttttgtaaagcctcagatcacaggggcacctgagccattagtgtcccaatggcagggcaaggcaggcatgtctataaatctccagttttttgtttgcttattttcttctttaaactgcttacaatttctcctctttcatcgctccatggggtaccgacacgacttac

SEQ ID NO: 156211 - DNA, 396 bp, Homo Sapiens
gatcgaatcgagctcggtaccgggttcgagtgaagtcagaatgatctgtacaaaatgctatttcacttgtattaaaatcccacatttatgatagcctatgaatccccatgtgatttgcacttgccctcctatctctctgacttcctctcactactgtcctcttgctcactctgctccagcccttttccaagaacacaccaggccccctcctgcctttaacattagagtatttggtttgtgttccttctacctggaacactctcccagcagataaccacctggcctcactacagcagctccttcagatctttgctccaaaatcaccttagtgggtcaaccccaaacatcgtattttaacagatgataatgcccttcactcgaaacccggggatcctc

SEQ ID NO: 156212 - DNA, 189 bp, Homo Sapiens
  misc_feature (95)..(107): n is a, c, g, or t
cctctggaagttgagtttgcagatattcattatgctcatttttaacttgtatgtttggaaaatgtcatgatgagaattgaggttgggggatgagnnnnnnnnnnnnncatcaaccccacagcccattcaattttcagcccgacccacagctccggggaagggcagcaggtccatccttcactcgaaacc

SEQ ID NO: 156213 - DNA, 575 bp, Homo Sapiens
gcagtgcaggattgacaggacgtcggcgtcgttgtcggtctcgggtgcctggaagccgcggtcgcgcgcctgaccttccagggttcgagtgaaggtatttttataacagaatgatttatattcctgtgggcatatacccagtaatgggattgctgggtcaaatggtatttcttttctaagagattttctatccagctcctggctcctctttgtctcttcagggcttgacagagagcaggtgctcagtgatgttggactggaagttttgaagacaacaaaagcaaaagtcttgcttttacacattgctgttagattagggctattaatgatgattattggaaaagaactggatttagtagctggaaaacattagcagctacatagacttaactaaattcttacactgcaaacacaaatactggaaaatcgtcttgctctatctccttcaggaaagggccactactttcttttctcatctctctcctcagtgtccagtaacactggcgacagcctgggagtatttacctgagacagagggaccaaaagagatgcttcactcgaacccggaccggctg

SEQ ID NO: 156214 - DNA, 395 bp, Homo Sapiens
atcagtcggtccgggtttcgagtgaagagtgttatttaaaacggtctgtatgaattctggagcataaaattcctatattctgacagtctttttttcttatcaatttcataagcagaagtggtgccaataaaaatggtacctggtatcagcgtgtttcgtcatgtacagtgtatggaatgaggccctgtgagctacttggtataaaaatttagagggtaggtgtacccagcagatgttgtcttaacctgtaactttgaagatctgtgttaaaaatatcataaagcaacataaactgtgtgttttccccttttactgagcagtcgactttatagacatgctcatgtattcattctgtgtctgtatatctggacttcactcgaaacccggggatcctc

SEQ ID NO: 156215 - DNA, 332 bp, Homo Sapiens
ggcgcaccctcggggtcgccgtctcgataaatatgctgtgccccgggaatcgcgactgcaggcaagcctggccacatcaattggcttacccgcacgctggcccaactgcccccggcgcgctggcgcgcctcggtgtcgggggcatccaccaattgctggaccagggtcattcccagcaatggaaatcatcatccagttgccgtgccatgaaagcctgctcggcaaaagctgcggcgtatgattcagcccagcgttcctgacgtgtgtgccacgatccatgcgccaaggcctgccaatattccgttaccgcttgaggcagccgctccagcagg

SEQ ID NO: 156216 - DNA, 280 bp, Homo Sapiens
ggctcggtaccggtttcgagtgaagccaacaggagaacactgccaggttaagtagtctgaggtacttctttgttcagtttttgaaaggagttttctgttggtttactcttcacgagataaacatgaacgaggaaatactaactgaatcaagggagaaaattggcttcctccagtatactgagcagtttttgagtgcttactggtagttaccaccatacaattactttttcttctaactcccacacctcccttcactcgaaacccggtaccgagctcgatt

SEQ ID NO: 156217 - DNA, 228 bp, Homo Sapiens; identical to SEQ ID NO: 119832

SEQ ID NO: 156218 - DNA, 493 bp, Homo Sapiens
catcatcacttgcccccatccgacgacgctgcgcctgttgaactcccaagcaacaacctattcctcgtaaacccgaccatcgaccccgaaaccctcctggccaatgccgccgtaatcctcgcatccgccaacgaaatggccgccaccttggcgttcgacctcgacgactcccaacgcgccatcgccctgggcattcagcagttaatcgagttgagttcgctactcgttgaccgagcccaggagcaggttgcgcactgtaacggccaccagtcaaagcctgacaaccaaccctgccgccttgccctaaggcggcaacctgaactcatgctgtcacccagcaaagtttcataattccctgcgctgttgaggtctacgatcccctactgagagaggaccccagcgcctccagcccatagggaactgaaaccatgatctcgaacctcgtcaaagtcgtgatgatcaccggcacgttgttgttaagcgcttgttcatc

SEQ ID NO: 156219 - DNA, 346 bp, Homo Sapiens
actcgacacgtcagtacatacagattacctctttcctttatttaataactgtatagtattcctctacatggattctgtgataataataccactgagcacttattctaagccaggcgctgttctaagtgctgagcatgtattaatttatatacttcccacaacaaccctatgaggttgttatgcactattgttatcccattttacagataaggaaattgaggcacacagaacatttaaaaacttgactagccactaagggtcagagacaagattatgctataatttatttaaatatattcctaatacatacttgtttcccatatttctctgaacatccattacatgt

SEQ ID NO: 156220 - DNA, 337 bp, Homo Sapiens
cgtctctagaggttcccccctcgtacacgtctggtgaagctgtcgtggttcgtcgccgggcaagggttgggcgccgatataggctggtgatcagctctcgcgggcgcaggcggcctggtcgttgtcgacctccagccccagcaagccgaatatcggcgactcgcccgtgccgccgcagcaaatggcgccccaccaggtgcgcctcgataccttcactggcaagcatctgctgcaacaactcgccctccatcagattttccggttcgtagattcgctgcatgggcgtacctttttattcgttctcgctgcgcattattcattttcgctgcgggtttca

SEQ ID NO: 156221 - DNA, 254 bp, Homo Sapiens
gaaagcactgtttctttattacctaacgaagaatatgcttcactaaaacaactggtaatactttattaggcaaagagaaagaattgccagatgcctgaaattctgacttttatctattccatctgaaaaatgatttcacactgaaaaaaatttcaagcattttacaacattaaactctttgacacatgcactagggttaggaactgccatggactctcatttattgctgttatttcatcgctcatgggaccagg

SEQ ID NO: 156222 - DNA, 207 bp, Homo Sapiens
tatcggcaaggtggcctgtttggggatgaccccttccccggatattctaggtttcatagacagctgctactgccgctgccgctgctgggtgttttctccctctctggaactcttcctgggaatgccttagtgcccagttcctggcctcctttctctattgggtgaagcacaagttattttggaaatccttttcattgaacaactctt

SEQ ID NO: 156223 - DNA, 366 bp, Homo Sapiens
cttcgttttctctaactattttccatgaaatacatttttgattattatttgaatcaattccaattacctgaagtctttcatctataattggcattgtatgtattggtttattggagtagatgcttgcttttctgagccatagctctgatatccaaatgaagccataggcatttgttattttggctctgtcagctgcataacgccaaaaaatatatttatctgcttgatcttcaaatgttgtattgattaaatcaattggatggcattgtgttatcatccagtattcatgtttgaatgtgatagccctccgtctaataagtcgtgtctccgatcgtggtaacgactcaccggagcgagctcgatgtt

SEQ ID NO: 156224 - DNA, 671 bp, Homo Sapiens
acggtaccccccaagaatcccagaggtgggggcactgccagtgtcagggtctgttaagtatgatagcaccgatcaaggatcaccagcctccaccccctctactacacggcccctcaactctgtggagcccgccaccatgcagccaattcccgaagcccacagcctctatgttaccctgattctctccgattccgtgatgaatatctttaaagacagaaacttggacagctgtggcatctgtgcctgcaacatgaacatcaaaggggcggatgtcgggctttacatccccgattcttccaatgaggaccagtaccgctgtacctgtgggtttagtgcgattatgaaccgcaaactgggctacaattcaggactcttccttgaagatgagttggatatttttgggaagaattctgatattggtcaggctgcagagaggcgcttaatgatgtgtcagtccaccttccttcctcaggtggaaggaaccaaaaaaccccaggagccacccataagccttctcctcctcctccagaatcaacacacacaaccttttgcttcactgaatttcctggactacatttcctctaacaatcgccaaactcttccctgtgtaagctggagttatgaccgggtgcaagcagataataatgattactggacggaatgctttaatg

SEQ ID NO: 156225 - DNA, 408 bp, Homo Sapiens
cggaaaaaaatcgggttgggtatgtctttgtagtaatatacacaatgaattttgaatacaatcataaagtaacagtcttttgcactgggggaaaggttgtgcatgaaaaatgaaataaacaatagttgttgggattttattatgctgttgacggtttggtttgtgtggttttgtttgctgttgattttttctctcttgctaccagcatggctatgccagacaaaccccccagtcccgggagctaggaagtgtttaggacgggtctggaatacacaccttggtagtacgccggctccagggctgagggctcgatggggctcctggtggtcaccgaggcgctgcctagaggcaggctggcgggcaacgtagagccgtaaggcgagtgttgcagtgcctgttcgtttatac

SEQ ID NO: 156226 - DNA, 636 bp, Homo Sapiens
ttgtaattttcttaataacattttcctttttctaccttgttttactgtatgaatacagtacataatacatatatcacacaaaattgtgtgttaactctttatggtactggtaaggcttcaagtcaacagtaggcaattggtagttaagtttggtgggtgtcaatttatacatggatttgcaactgctcgaggtgtcagtgcccctattctccatgctattcaaaagtcaattataatttggtgaccaatttttataaagtgaactttgtgtttttatatcttaagtaaatagagttaagtaaatcttgcttcttattttattatacattactattgatccatgtaaggccttttcttatttccttcttagctatacccaccattttaataggtgatcattctgttgtgtttagtgaatccttttttatgtgttcttgtaaaatgtgctctgattagtggaaagctattattaattaaataagtaatactgtgtgatatatttcattatgttcctttctttttcacaggcatctttttaatatccattcattgttgtgtttctaattcattgtttctaattgctacatggtaagttaccatgatgtggtaacagagccatccgggtatacagctcgg

SEQ ID NO: 156227 - DNA, 552 bp, Homo Sapiens
ctgaggttattaaatggtttcattaaaaatactatttgtcttgctttagtcacacaccagatcaaattaaacagtagagcaccagaacaaatgaaccctttccatctattttgacacaaagccaagtgtgcaaaggcagaaggtgatattgtgtcatcaccgtgaaaatgtcatttagctttctctacatctccaagtagcaagcaaagggacaaaagaatcaataccttcaagcaaaaagtattaccaactgttttgagaaatatggaattataaagtgcaaatcatgagcccacggtttataagtgctattagcataaatgctgacaactgttaatctactgtaactctgattaacggttgcagttgtccattaatagaaggcattttaacttactactgaaattgattactcagttaagaattctatcctaatgttcaataaaattgcactttcttggcaaatgcaatatgaaccgaggtgatgcattaaacagaacttccatttattttactctacatggacagagaacagcacagccgtcggccaga

SEQ ID NO: 156228 - DNA, 227 bp, Homo Sapiens
attactctttgtatcttgtagctagaggttacgtatacgctttctctccattagcagtatgcttcttcaatgacctagactataattcacacatctttgtacaactacctccaatgctttcctcctatccccaccataaagcccagacatcttcttgcatgtaaccggctctttaaagatattaatcatttggccaggtgcagtgactcacgcctgtaatcccagca

SEQ ID NO: 156229 - DNA, 348 bp, Homo Sapiens
tctcctcatttcttacgctaccatattatacttcacactctatgctgtaaacaacaccaggttgtttcttctaatctcagtatttctatgccctgggagagatctatacgtctaggtatattagaattacctcactaaaattttctgataataccctcccatttcctcatgagcctcaaatctcagtagacccttcccctgagaagtcattgccctactaagtgttggctactaatgagaatggagaatttgagtctaatgcacggatgaggaggagatccattaagggtagcctggtgtgaggatccagagcctgattaggcgaacgtctatactgggtttcgaggg

SEQ ID NO: 156230 - DNA, 279 bp, Homo Sapiens
ccctcgaaacccagtctctccgaaaatacaaaaattagctggacgtgatggcatgcacctatagtcctagctacttgggaggttgaggtgggaggatcacctgaacccgagaggtacaaggctgcagtgagccatgattgtgctgctgtgctccagcattgggtgacagagaccttgtcaagtcaatcaagtcgataatgtgttttaatagtttggcatggtaataatttgcttgcagtcaaatttcataaatgacttactgtccactgctggaaatca

SEQ ID NO: 156231 - DNA, 297 bp, Homo Sapiens
ccctcgaaacccagtggccatgataccagggatgaggggccacaaacccttctggtaaactctcccattgggtagggctcaactctctctggacacattaatttctctacaatccttccttggctcgcggggctcatacagctcaaacaggaggaaaagcatctctgggagcaggcagcctcatgtgtctgattcgctgctcaattccaggcaaaacatacaagaattactccatggagtcaagacacactttcgaatccaggcagccacactccaagccaagtcttcctactggtt

SEQ ID NO: 156232 - DNA, 392 bp, Homo Sapiens
tctggattggctgatctgaatcggccctaccccgaagtctgcccccaacaatttttgctcattcactctcctgtctttacctctctgggaaatcaatatgacagacccaaatttcatctaccaatcctccacttctatcccaagctctactctacgtgggacaagacacactcaatgtctggcacagggcgtggcatacattaatgtttcacacactaacaggaactaggccaactgaaaccttgctcaccccgcagtggtctcagaccttgacccctgggcctcagtgtctcccacacccttcggcatcaacaagaaccagcgccctctcatcatctttacatgctgtgtacccagccctggctgctggcaaacatcgctgcacacgccct

SEQ ID NO: 156233 - DNA, 271 bp, Homo Sapiens
ccctcgaaacccagtctgtttacccctccagtcttgttctcatgttagtcctctcctagttccctacatcccataacatcatagatttctgtgaattcttccaaagtgccactgccttcccaatgttcacacgttcctcatgtgtatggttcctcagcctacattgccattgtgccagggaggcctctcctgactctccagaccaggtgagctctcctgcatttgcagtctgttggcaccttgctcttgctctgacactgggtttcgaggg

SEQ ID NO: 156234 - DNA, 616 bp, Homo Sapiens
catacctggaccttctgccccagtcctctgctctctgtttaggccttgtacttttctcctaaatccctcatgccagcctctaccctgacctccagtctctcccctccaggttgtctcctacatggcctcagaaaggtcttcctatacccagagctgacccagaccctcctgctcacaatcctttcatggctccccagtacccctgggacaaggttccagcccctcagcctggcattccaggccccacagggtctttttcttgtccagttctctcttcctatgcgacaccacctcatcccttctatgcctcagcccccactccactcctgcttccagcccaggacttctcctcttacctctggtcttgtgtatccaattgcccactaagcagacccacttcaacgacccatcagtatctcaaactcaacacaacttaaacacaccacattgcatcttatgtgtctgtttcttctcaatccctagctaaggcaggggctgtggcctatctagcataggccatcggctgccccactgctctgagggggcctgtgctgggagctggaggcctcagctgcctgacggcccacacactgccccccagaagtccagtaagccc

SEQ ID NO: 156235 - DNA, 321 bp, Homo Sapiens
gtgttgcttctttgctggagactatgatgtttttcatgacggataccatttcttatacattttggtcactcccctcagcacagtgcctagcaatagacaagagaaaacctttggcatgattgaataacttgcccagagtcaggttctcagtcatccaggcatgctttgctgctggagtatctttggttgttttctggggcaatacgttctgcttgccacagtttttctccccttttccttcttgcatatcttgttctgattgagcctgaatttctattatagcagataagagaccactggatataaactgggtttcgagga

SEQ ID NO: 156236 - DNA, 317 bp, Homo Sapiens
cgatatcgagctgttgcgcaaacacagctccacagcctgctgttgcctcgtgctaaacccagcactagccactggggagcagcctgtcgctgtccctcaggcctgcgctagcttccagggaattcttggagctgtactaatactgcagaaaaactagtttagccttggctttcagaagatgccagtgacaatggagtacattgccctaaagcagtattttcaaaatgtgcattgtggaatccatttggtctaagatcaaaataaatttttactgaaacagaaaaaggtcagagtgcatcacacatatcatggataaa

SEQ ID NO: 156237 - DNA, 190 bp, Homo Sapiens
ctagaggatcccccgggccctggccctgggacaatcacacagctgcaggccacaaggctttcacattgagtcatctccttagcagtgtgggctgaagccgagtctcatgtctaactcagatgatgccctttcccagctaccccgtatttagtacctgaaagtttctgaagtaaatgacatctgaaccttc

SEQ ID NO: 156238 - DNA, 202 bp, Homo Sapiens
ctcgggccctgggtaggccctgggaatactgtgatgagcaagatagacaagacgtctaccctcctggggctttcctaatggggaagaaagatccttacttggctagcagtcctgtccgccactgtgtaagggtgattttgatacatgttggagcctggatgaagcagcacatgagtagatataagataagtagtctgagacg

SEQ ID NO: 156239 - DNA, 252 bp, Homo Sapiens
ccctggtgaagagaactcctagcagtggcatgagctctaccatgaaggagtcggcatttcagagtgaacccaggatttcagagagtctagtgcgtcatgccagcacctcctcgccagctgacaaagccaagtttaccatcagtgatggaaaggttgctgacgaagagaagcccaagaagagcagcctctgccgcacagtagagggctgccgggaggaattacagaccaggcccaggcccgagagtaagaccg

SEQ ID NO: 156240 - DNA, 438 bp, Homo Sapiens
gacctcgtgcctgacgttgcttctgagttcaggtccttaaatatattatacatgtctaacattaattcattaaggctccatctgtccaaatccaagtctcaaattctctatttctgttcatggtaacaccattctttcagaaccaagacttgaaacctcaaaaatcaattttaactcctccttcactgtcacatccagacagtcctgctgataactcttttcaaaaaacctgagttattgaaaaagaactgaaatagaatctgaaagaatacacttcatccctaaacacagttatgtgtatcaaatgataaaactttttaaaaccattttgtcatccacacaatggaaagagtatagttgctctgcctactttacaataaacaaatgcatgacagcacactaaaaatcctgagccattatataaatatcatctactat

SEQ ID NO: 156241 - DNA, 199 bp, Homo Sapiens
ggagggtggctgctggggctgtggctgcgatgatggtggttgtggtacaatctggatttttttgctgtggctgctgcaccatgcagcatggatagttactaccttggcaggctgcaccttgggcattcttggcttgagtcagggctgccagctggttggcctgtaacactatcttgcctggtagacaccccgatgtaaa

SEQ ID NO: 156242 - DNA, 425 bp, Homo Sapiens
aagtcatgccttatctttttggctttaaaaggagaaaattatcaaagccccatcgttctttggcagcaaagagggtaatttggtgaatactgatgttttactctcagggacactatcaagtgcccagaatttccttggtgctctttggaacatagaagaaaacctgactgaggcattcttgagttgcttttcagtctgtgaactataatattcatgagacgtttaacacttcccaaagtggcagggaggaaactctttgtttcttctgattccaccggaagagagagtggacaggacccaggacttttcggagtagagttagtgattcatctcttgtttgtgagatagacagggcccgagagttcgcatcgctttgaacactctaattttttcaaagcgattcgagtcaggcgaatgcgagtcaa

SEQ ID NO: 156243 - DNA, 221 bp, Homo Sapiens
atccaaggtccagctgggatacctggattccctggtatgaaaggacacagaggcttcgatggacgaaatggagtaaagggtgaagcaggtgctcctggattacagggtgaaaatggtcttccaggcgaaaatggagctcctggacccatgggtccaagaggggctcctggtgagcgaggacggccaggacttcctggggctgcaggtgctcggggtaatga

SEQ ID NO: 156244 - DNA, 398 bp, Homo Sapiens
agttcttttcactcttgcttgtaactttcaggccttacccacatgtgttcctatagagttgcatggagctaaaattatagtgtgctgcctaactttgtgctaataacgaaggacacacattatcattgcctcacagtggatggcacctgaccccatttttccaaggattctattttccagtgaatttttgtcaccgagttaatgtcccaagtctgatagcatgaatgcttatttgtgctgtgaaaagcagagcagcctgactcagctttccattttcataggataatatgtgccaaaaaaggtttattttcttggtaaaatcagaattgtagaattgtgctatttttaatttttaaaatttttggttagagcttatagacatacttttactgattatg

SEQ ID NO: 156245 - DNA, 145 bp, Homo Sapiens
gtgagtcgaatcggggagatggacacatgggtgttgttttattattttatgtgggaaatattcccattaaaaacataaaataaatatgaaaaaggaaaacaagacaaattaggcagtgtaagagaatggatggggttcgcgtggg

SEQ ID NO: 156246 - DNA, 144 bp, Homo Sapiens
gctcggctctggaggctcgccctgcactggtttcgcagcctcttccttttgtcctggcaccccctcttgaaggctgatggatgcttacctcaactagaatttgggtttaccaaagccatttggggttttgcttgaataacttga

SEQ ID NO: 156247 - DNA, 335 bp, Homo Sapiens
gggaggatcagctcgtaccgtatcgctcgcaaggtcatgaatacagtgccttatgaagagaataacgaagaagaatctctgctcgatagatcaggctttacatacaggcgtctccgagcagaaaaaggcacaacagtagagcaatggacatgtccaaagtccaggatgtggaaagtagggtgtggctggaaggaagggtgaggaccagagatgctgctggaaatcaggcagtgccaagtacactaagactctaattggccagtctgaatgagccgtcctttttaacaagcttttctgaggtttcaaatgggtagttcaatttttagcgagcgata

SEQ ID NO: 156248 - DNA, 283 bp, Homo Sapiens
  misc_feature (191)..(239): n is a, c, g, or t
tgcgcgcaaagtattgataattacttcaattttcaaggaagaatgatatcagctctcaaaattcagttttgtaaaatattgatgcttgtaaataaaaacaaatcaatgacttgcagctgtagttacacaggctatcttgcagtaattataatttttaaaaagagtacagattatgttgctctatttattannnnnnnnnnnnnnnnnnnnnnnnnnnnnnnnnnnnnnnnnnnnnnnnntactagttattaatattgaacagaactggaattttgcgagcgat

SEQ ID NO: 156249 - DNA, 234 bp, Homo Sapiens
aaagatcatgggcttctccattttccaagcctcttaatcaggacttttgacttgaattcagagaacatccttgggataaggaaaattttcgttttcttacctgttcatctgccataaactctgtcatttactttctaggcagaattgtcagacagtattggctccctgttccccaaacccttgtgggaatgctgctgttgcaaagagtcacccatttgcgagcagacggtaccg

SEQ ID NO: 156250 - DNA, 268 bp, Homo Sapiens
  misc_feature (42)..(94): n is a, c, g, or t
atggcgcgaaaataagggaccagcgaaaaagacagagatggnnnnnnnnnnnnnnnnnnnnnnnnnnnnnnnnnnnnnnnnnnnnnnnnnnnnngaaaagaaccacaaaatacaaaggattggtagttatttactgtgtactgagatttagctttgcaagataaaaaacactctagtgatatgtggcataacaatgtcaatataataagaccaaactgaatatttggaaatatatatatattttgagatggagtctcactctgtcttt

SEQ ID NO: 156251 - DNA, 200 bp, Homo Sapiens
tatcgctcgccaaatactggatggcagaaagccaaggagccaagtttgtcgtaattgtctgcaaaaggtatgtcctggacttggcagtcttcgaacgtgctctaccttcagctcctgctgaaaggttggtaacccagttcactgtggctacagatgattaaactgtagaatcccctcctcaagtctccgtccatagatcc

SEQ ID NO: 156252 - DNA, 143 bp, Homo Sapiens
atagaaaaagaaaaatggtactctttggctataggggaatcatcagcaaggcagtggttgggatggtatgtggcgtatctaattttagtaaatcaatacatactggttaaaactggaagtttggagcctttggcgagcgatag

SEQ ID NO: 156253 - DNA, 190 bp, Homo Sapiens
ctgtacttctctccagctccaacaccatcatttaccacctcgttcagctcccaggcatcctagaagcctttcctgactacaggggtgcatcgtggtgcacaattccttcagctgccactatggtgcaagatgagtctagaagaacagttttgctgtgcggtcacccttactcactattgtgattttacag

SEQ ID NO: 156254 - DNA, 466 bp, Homo Sapiens
taaaacccacaaatttgaaagcaagcaatatgccactgcatttagtaggatggtggctcttgccatcctccaggtgcctgtgagctgcaaccagcctgcagtgcaggcctgtgctgttctgaaacctctgccagcctggacaagacttgcccgcctcccctgtccagccccagaagatgcccaaggtaagtcaaggacaagctccagggtctcttgcttgcccctggagttggatggcacaccatggttggtggcattatcagtaatgctccctgcaggccagccagctgatgcctggagctggcaatgtggctctaaagctgttgaaagatgcaagatgttagctacctgcgaacttggtccaaagctagtggctgaacttcagtgttccaggcactggcctggccagcacaggaaatggcgagtggtggcaaatgtctgactgacttttcttccccttttagag

SEQ ID NO: 156255 - DNA, 250 bp, Homo Sapiens
aagtggaaatggaggccagcaagattaatgacttgccacagtggctacatttatagataacaacgcttaggtccaaacctccatctctctgcccgcaaagcccatcttcttatgtcctgcatgggatgccagactccaccagcactgcctccgcccctctgcctctggttatctccacaggaaaccatgagtctttgatgatctcatctttgccatctccttcaggtctgaaatggttgttaagcgagcg

SEQ ID NO: 156256 - DNA, 553 bp, Homo Sapiens
gttgtatttctccactattctgtgaattatcttttcatattgcattgcctatttgcttctttctgcgggttgccctatcattttcccaagggttttgttgaaggagacattttattaccacttcagtatctttaacttttacattctattcaagttttccatttattcttctgccattttaatattttatatccttgtatataaattaatccttttttaatgaatttcaaatgtattgttacatgtttgttcatatttttaaaaagtatttaaaaaattacttgttcgtagatctccttttcagtatgtgttttacttattctttttctgatttatcttattcagtcttatcaaaggtttgctatcttattgctcctttcaaagaactaatttttcctttgttaatcttcatattgatctttgttcactatttcattgatttgttcttatcttatatttccattttccccatttctttggatttattatcttactttttattagcttctgtaaacacttaactcattgttttcttttcaacgacctctgtcca

SEQ ID NO: 156257 - DNA, 249 bp, Homo Sapiens
tatcgcgtcgcaaaaagtattttccacttgatagtaaatatttcctagtatttcaaaagccataatctcattaataagccaaaccaattaaccatctataaagttgctttgtgaatggattttattgatatcctgatttttgcaatgaagattcattaacattttatatagcagaaatattggatggttaataagcgcaaaagaagaacacaggttttagacattcagctttcgatcctttgcgagcga

SEQ ID NO: 156258 - DNA, 279 bp, Homo Sapiens
tgtttctgtgattaacacagcacatcgggggatcaacaaaatcactggaggaaataccctcatgtcatgcgaacctcttcagaggattcatctctggattatctcccaccttcgatgcaggagcctgccacacctaccacacgcgagcacacacgcatgcacacacacgccatgctgtcgtcaagctcagtgggagggcgggaaggaaggcctgagtcagggtttttaggaggagcagtaattcaaacatttcaggatatgccgcctggaggttctttg

SEQ ID NO: 156259 - DNA, 257 bp, Homo Sapiens
actctcgggccctgctgttgcttctgaggtttgaaaaccgctgcctcaatgctcctgactcagctcttcttacccaaaggttcccccacctcgtctactctgttcctgcacagtcgccctttcctccgatgccccgggcaggtctctctctgccagctccacgcttctgagaggcccccagcctgcctgccacctgcctgcactaaataccactcaggtttcactatggccccaggccacgagagtaggtaccgacc

SEQ ID NO: 156260 - DNA, 194 bp, Homo Sapiens
gcggacctactctcgggccgtctaacactgtatttttctgaagcccaggtgcagcgacttgccaagggtcacatagcaagtctgtgacttaagaagccccagtcacaccaaggaagacatggagagggtctgtcgatgctgaggctctggggcagcaggaatgaggggaggggatgtgtgagctgagggtagca

SEQ ID NO: 156261 - DNA, 248 bp, Homo Sapiens
catatatttggtctttcggtttagtcatcttggtgctccagagctgtatacccactgcctacttgacattcttcttacatgtctcaaaggcaccttggattccacgttttccaatttagtgtgtgatcttccctcctaaactcaaggctttctagtgttccctacctcattctgtggcaccattctccatccattcagtcgatgcgagtcaggagagtcgatgaatatgatagtgaaatggatttggg

SEQ ID NO: 156262 - DNA, 278 bp, Homo Sapiens
cgaccccgatatttgtggttctggcacacaggaagtataatatgtctgtcaaatattaataacataaatagaaggaaataccaattactctgaacaaaatcactgtcttgcctacatggaaagcttaatttttcaggggcatgagtttgtgatcacattctgcataaatacatatgagctgtgatttcctagtcctcaagtcacacgatgatatcaaacttgtcaatgtgtcaaagagcacagtggcattccagaaagagctctcatgtcaaggcaac

SEQ ID NO: 156263 - DNA, 284 bp, Homo Sapiens
ttgtgtttctggcatattatgaagatatgctataaccaacatttgcttactgatttagcaaatttcagaattatgggacagaagcgttttaagaagttacttatcaaggacatgataggaaactcctgagcggtaaggccaggccgaactcatgccacggacgccccgtgcctcccggcctgggccggcagcgctgaactgttaccttatattaaacacgggctcgtggattaccatgaacactaaactgcttcgtcatttttttccccataaattgagtcatt

SEQ ID NO: 156264 - DNA, 568 bp, Homo Sapiens
gccgatatttgtggttctggcttcaggggtaagaattctgccaaaatcccttagtaaatcagttattgtcatctgaacttcctactcaggcttgtcgtatatgtacctcaaaatctgttttgcttcacatagggatatgtggctttactgatttctgctttgaatcaacttagcattgctgtttatgttagaagctcttggataagttcgtttccattttttgccgctttgcatattgccaatccactcctccagtgatgctgaacaactgtactgacttgtcacatggccacctacttaatggtaaatgtaaggttggaggagataggtgggtctgtgccacaatgccctaaatatggtttaagggcatctgaaaagaaaaaccacagcaaagtgtgaaggaactgcagagaagcagtagtgcgtgagatgataccactgtttacccaggaaatggaatccatgattagcagttgagataaggagctgtctgtgagtacagactgttcctggttattgctgaagtgcattcctagaaactatgccagaaccacaaatatcggggtga

SEQ ID NO: 156265 - DNA, 267 bp, Homo Sapiens
accgacttgtgttctggccaatagatacaagcaggatgaatagttgtttgctcagcacttaattctgaatgatgctatagtagctcttctacaaagggtattaaataaatctgaatatctgaagtttgcactgtaaggcaagcatgttgaacagagggccgtactctactgcctgtctcctggtgttggaattcaggagaaaagggctgagtagaagaaaggacaccctgagatggaggaagagagatacacctcccccacaatacg

SEQ ID NO: 156266 - DNA, 392 bp, Homo Sapiens
ccggtaccaacagctggatcatccaaagtgctggggttccaggcgtgagccaccatgcccggccggcccagtgattctttagcacacactggacacctcctgtgggttctgccccagacacttgagccttcttgggcagccaagggcaaagtggaacaaaaagaccatttttgccagttccgacgcgaatacacacataatgcaggtggaaggtctgtcctgccttctgcatcctttgggtgcacaaaaacataaaatcaggcactagagccctgagggaggttggtaagcatgcctggctcctcagccaagagggaactgtagtgcgagtttcaccaagttctatcagccagacgcatctcgacacaagccctctctaaagccagtagtgg

SEQ ID NO: 156267 - DNA, 382 bp, Homo Sapiens
cgatatttgtggttctggcgtggggcaatagcgggggaaactactgacaaaagggctggagtcctttggctcaacccttggcagcaagggacccaaagctttttgtacaagaaagggtaaaatggtctgggggtgaagttcctgaaaacagaacataaaaatctaagggttaataggattatgaaagttggcatatttgaacacacttcatatgaagtggttgcatctcttttacctgattgtatcatggggctgaacattgtgtctgattggggaatgtttcccctacctggtactgtaaaacagaaagcatgtaaatctgaccttcaagcaatattaactggatatgctaaatgggaaccagcagaatgccataacacca

SEQ ID NO: 156268 - DNA, 462 bp, Homo Sapiens
tctggtgctggtgctgcttgactacgagcttggtcaatctggctggtacgggactcgagtgtggtcagtgcagctcaacccattgctgagtgatgctctggagttcttttctgtacttggctggtggacagagagacatttgcaggtcccgagagtatgagtgtaacagtgaggattatcgcgggggcctgagtgttacagtgatgattatctggggggtcctgagtgtaacagtgaggattattccggggggccctgagcgtaaaagtgaggattatccgtgggcctgagtgtaacagtgaggattatctggggggacctgagtgtaacagcgaggatgttcctgtgtggagttgtggaggacatggattgacagagtcgatagctctttctcgattccttgggtgttgggtcatgcctttcttatttgttgattcctcgagtgtacaaaggatcctttcc

SEQ ID NO: 156269 - DNA, 573 bp, Homo Sapiens
ccagttttcattgctggcagaagccatatcacaggaacatcaagaacttaaagccagaaccacaaatatcggatatttgtggttctggcccctctgctgcactgtgattatcaaggaggtccctccaccccctgccgaggagagtgaggaagaagatgatgatggtctgcctaagaaaaagtggccaacggtagacgcctcttattatggtgggagaggcgttggaggcattaaaagaatggaggttcgttggggagaaaagggctccacagaagaaggtgctaagttggaaaaggcaaagaatgcaagagtcaagatgccggagcaggaatatgaattccctgagccgcgaaatctcaacaacaatatgcgtcggccttcttccccccggaagtggtactctccaatcaagggaaaactcgatgccttgtgggtcctactgaggaaagatatgatcgtgtgtctgtgatgcgtccacagccaggagacacggggcgctgcatcaacttcaccagggtcaagacaaccagccagccaagtacccactcaacaacgccagaaccacaaatatcg

SEQ ID NO: 156270 - DNA, 521 bp, Homo Sapiens
cgatatttgtggttctggcaacgctaaatctatgctgggctcttccgatcagcacttcagaacctgcgccaaatcactctgaatcttctgcagtcaaggcccatgggaaatggaagtctctccgagtgtctaaagcagacagaattctgtgcactcatcaggacggtgggactcagaggggaaggtaagaagccaggactcaggaccagtgaagcaacccgaaggccagccaccgcaggaagctgctagcccccaggtgtgggggccgaaggtgcaagtccaggtgcagaagccagggtcccaggcaggaaaagaaatcacaggggtccccactggtgagaagcacagccccaggaggcagctatggcttcttcctcgaatctccagctccgacctctcgtggtccgaggccagttggaaggcaccttggaatggcctgcacagggctgtcaggcaggacaggcaagggaaggggatctcaggccacacaggccagaaccacaaatatcgggggatcctct

SEQ ID NO: 156271 - DNA, 483 bp, Homo Sapiens
gtctgctcgcaccccgatatttgtggttctggcgcacttaggtagcttcagggtaggggctggtcactgaaaaaccaagggaggattagaaggttaggactttctgtcccatctcccaacctccaaggagggcagagaggctgactgatttccaatggccagtggtttaatcagttgtgcctacataatgcagcttccataaaacccttaaaaggactgggtttggcgcacttccagatagctgaacaggtggaggtttctggacagctgcacaccaggaaaggtatggaatctcctcaccccttcccccatcttgtcctatgcatctcttcatctgtatcccttgcaatatcctttataataaaccggtaatgtaataagtgtttccctgagttctgtgagccgctccagcaaattaattgaaccaaagaaaggggtggggaaccccaatttataatcggttggccagaaccacaaatatcg

SEQ ID NO: 156272 - DNA, 216 bp, Homo Sapiens
tcttgtctctgctgtaagaggagggaagggagtggagatcacaggctcataaccagcactgtgcagattcctaaccagatcatcctcctgcaagccccacggtgggtgtcccagcctctggtagatcggtgagtgttccctcagcccacggagctatgccagcatcatctctaccctctcgggtgtttagatccacagatgaatcaacggacgtac

SEQ ID NO: 156273 - DNA, 352 bp, Homo Sapiens
  misc_feature (53)..(53): n is a, c, g, or t
cggaccgaatcggggtagtctgaatgctcattcgctctctcttcctctcatantgagccattgaagcttaatctgaaagtacctatgcacccaaggaaaatacagggacaaaaatgaacgatggaaaaaatatatggcatctttagaacaaaaatcaatttaaattaaaaccatgtaatattaacacagggaagaaaggagagtgagtagaaaactctttaggtttttggcttgctgcttttaaaattcacattctaatagtgtattgtttcagttattagaatgatatataataaaaattctccattcctctgatatctgattaaattacttcacttcctccttttttttg

SEQ ID NO: 156274 - DNA, 632 bp, Homo Sapiens
gtcagctatcatactcagttttccaggtgtgacaccctgctgaccaggataaactgtaatgagaaaatagatgtcacagtccagggagacacgtaattcagtctaacttcattattcagctaaaagattaacagcttctcaaaaatataccaaatattgggcctacaaaagtaatttatttcttcgtaaaatttttactaagatttactccttttgtaaaatgtaaatggaccgatatcacgagcaggtttctacttaccaaaacagtaataatgtcaacgggcaccattttgccagacatacagtcaaagattttacacgtgtctcttactgatgtaaggtatatactttacatacttactggtattgtgtcaacattggctagaaagtatttaacacacatttataattcactcagtaaggatctaaccgggcaacagcttacttgggaaagcatagaaaattagtgtgaggtagttcaataaaaacctagtttaatttgtaagtcattatgagaatagaacattgtgcaaaattaatccacaggtaatatttctcacaagtttcagtaacgaagagaatctaaactagaaatggccagaaagtgttactgtcgatgtcgagtccgctcg

SEQ ID NO: 156275 - DNA, 495 bp, Homo Sapiens
cctctgcccaaggcatctctactaaatcgctcacctcttggctcagagtgcttgaattcatgacttcctccaaaagcaatgcttgcaattgttcagatgctaattgggttgcttcaggtgtgaaatgttctcttagtagaaatccttgtttcttcagttcttcaatgtaattttcaaagtattcacttgcatcttcagaggttttctttatagccaactgtcttctagtctccatgccatcatccaggaggaggtgtgaggatatcaggaaaggacagtccctggagtcccgcgaacactgaagctccaccaccacagcttcctggcctccctccattcccactttctccaaggtgttatattttgcaacttcaaatcttgaggaagatgaggaatttcaacattctgcataccaaactcagtgagttccgcagtgtcttcctcctctgtggcactgtccgggcatagaccttctgttttcacttcagaaccgct

SEQ ID NO: 156276 - DNA, 332 bp, Homo Sapiens
agtcggtacgtcgatactcagataagctaatcccaactgtagagatttcacgatgtccaaattctttcgctggtcgccggcgcttctcatttatgcgtacatggccaacgcgcaagctctcgaaatgaccttgtcgacgaatgcacccgatattggggatgtaagccggaaccccagaaatttccgtcaccctagttgggtgggctcaacactcgtgtcaccagctaccttctggagaatcgagctcggccatccctccctggacgggcatcgctcgacgatgttcaacgctccctcacgggccgtcgttttgtgggatctgagtatcgacg

SEQ ID NO: 156277 - DNA, 443 bp, Homo Sapiens
  misc_feature (354)..(354): n is a, c, g, or t
gcgatactcagatacagacttgagcaccgtactggctgagagtctgtcttaaatgttcttcagtatagcaagtatgtgagtgtctaacttatgtttagccctgttgtagaggttcattacatgtactatggcaacattgatcattgtttctcccattacagggatactcatatttatgatgcaaggcgattgaattccaggagaagtcagcctttgatttctttgactgaacatacaaagagcattgcttccgcctatttttcacctcttactggtaacagagtggtgaccacatgtgctgattgtaatctgagaatttttgacagccagctgtatatcttcataagattccgnctcctcaccaccatcaggtaggcttctatatgccaaataatgtagatgtggattactatgaactatttgttgcagtgcatacattagac

SEQ ID NO: 156278 - DNA, 544 bp, Homo Sapiens
actgctggaccgagcgacgcatgaccccgctcaacctctacctcgacaacgccaaccccgcccaggtgcgcgaagcattggaggattacagcctggcgatcaagcaactggcggcggcgaatatcttccccggcgacatgttgctgaagaactttggcgtcacccgccacggccgcgtggtgttctacgactacgacgaaatctgctttctcaccgaagccaacttccgccatattcccgcgccgcgcacccccgaggatgaaatggcctccgagccctggtattccatcggcccgctggatgtgttccccgaagagttcccgccgttcctgtttgccgacgccgggcagcgccggttgttcgatgagcttgcatggcgagttgtacaacgctgactactggaagggcctgcaggacgcgattcgtgccaggcaaggtgatcgacgtgttcccttataagaggaaagagcagctgctagcggcaagcttcaacagcaagtaaggcagacctgctttcacctgccccttcagcctcggcggtccg

SEQ ID NO: 156279 - DNA, 276 bp, Homo Sapiens
tgagtggtaccgtcgatactcagatcaccacgagtacgaatccaaggtgctggccaaggccttcagtgaaatcaccggcatcaagctgacccacgacctgctgcaggaaggcgacgtggtggagaagctgcaaacccagatgcagtccgacaagaacatctatgacggctgggtcaacgattccgacttgatcggtacgcactttcgctacggcaagaccgagtccatcaccgacctgatggccaacgaaggcaaggatttcacctcgcccatcta

SEQ ID NO: 156280 - DNA, 390 bp, Homo Sapiens
cgtttcttcgtcaattccggcgaggtgtcccgcaacgagttcgacggtttcgccaaaccgctgttgttgcatgcccgtgcttatgcctgggcaccacggatatttcgcacgcagcgcagcctgtttgaacaggacatttctcgccagcgtggcattcccttcagtatccgcgaactgaatacctccggtgaattggcgccagcggccgagcgcgatgaatacgtaccggtgctgtacagccagacgcagagtttgctgggctcgccgctgggctttgatttgctggccagccctgcgccgtgcagcgctggagcgtgcacaacaacagcggccagttgtcggtgtcacagcccatcgcacttgtatctgagtatcgacggtaccggctga

SEQ ID NO: 156281 - DNA, 316 bp, Homo Sapiens
tggtactgtcgatacttagatctcgggtcatacctgaaccgctaccaccaaagccagaggtcgccgcacacattccgggtctttcgataaagcgtaatggggctaagccggacaacatctggagtggctttcgccaagggccagatggcaactgcgttaccgtatcggccatcaaggcagccatgtaccgatttggtcaaagcctacggacatttttcgctcagtgagaaaagagcctggcggttatcacgtggtcatgcgcgacgatttccagctgagattgaccgactcggagttggcgcaagcagcacaaggt

SEQ ID NO: 156282 - DNA, 239 bp, Homo Sapiens
tcaagaagcagttttataagcagaaagaccaatttgaatttttgggaaaaaagttatttgactctcactcgtctttgacatacaaagaaaatgttaagtatttcacttatttactaagtgttcttatgttcacaaggccaaatgctagtcactgagctatcttaagtatgtttttattgtatatttgaatgtctttttattattaagggtatctgttgttttgtgatctgagtacgacg

SEQ ID NO: 156283 - DNA, 189 bp, Homo Sapiens
taaggtggcaagtattggagcttcagtttcagcatcagtccttccagtgaatatgcaggactgatttcctttagaagtgaatgatttgatctccttgctgtctgagggactcttaagagtcttctccaacactacagttcaaaagtgtcaattcttcagtgctcagccttctttatagttcaactctca

SEQ ID NO: 156284 - DNA, 541 bp, Homo Sapiens
  misc_feature (25)..(25): n is a, c, g, or t
gtcgaaatcactgcagatggtgacngagccatgaaattaaaagacgctgctcctttgaagaaaagctatggcaaacctagacagtgtgttaaaaagcagagacatcactttgctgacaaaggtcgatacagtcaaagctatggtttttcccagcagtcacgtatggatgtgagaaatggaccatcaagaaggctgagcatcaaagaattgatgcttttgaactctggtgttggaaaagactcttgaaagtcccttggacagcaaagagatcaaaccagtcaatcctcaaggaaatcaactctgaatatccattggaaggactgatactgaagctgaagcttcaatactttggccacctgatgcaaagagccaactcattggaaaagaccctgatgctaggaaagattgagggcaggaggggaagggagtaacagaggatgagatggttggatggcatcaccgactcaatggccatgagtttgagcaaactcagggagagagtgtaggatagggaagcctggtgtgctgcagtccatggggt

SEQ ID NO: 156285 - DNA, 147 bp, Homo Sapiens
cttccaacctgctcaagccaatgcaacaggatatcacccgaggacagcagtggcttgagcaggttggaatcgtccatcaccccaccggaagctgcaccggcgccaatgatggtatgatctcgtcgatgaacaggatgcctgtgaagt

SEQ ID NO: 156286 - DNA, 215 bp, Homo Sapiens
ccatggaattggccatcgatcgtttcgaaacccgcatcgagcctgccgtgccttggcagatgatcgtcgcctatcgtcgctacaccgagcagttggacaacatgcaaggcatgctcaccagtgcaagcaagatcccgcccttgaacaacctcaaggacagcatggccggccagccgtccacactgtctatctgagtatcgacggtaccgagtact

SEQ ID NO: 156287 - DNA, 544 bp, Homo Sapiens
tcggacggtcgatactcagatcgggaacgtaatattactctgatacaggccttcggcctcaccgagcagaccgtttttctggcgttgcccggcctcggccatgatccggttgtccacgctatagatagcggcgtgggccacgagcgggttcttggtcaggttgttgagcaacacgttgaggctgaggatgtcgttggacaccaacaactcagtcgccgaagtggcagtctgggttgtcaggctcgcgcccagggcgtcagcttgctcgtgcatggcctgcttgaactgcaaacccatcacgcaggcgtagatcaccagggccagagcgaccaggatcacgttatggctggcgatgcgcaatgcaatcggtacacggcgatggcgcagtgcccggaagatcagcaggaagaagttatcggtttttactggcgtgggccggttcacttgcgctcggctcttggtccgtgaagttgacgcgcagtatagcgacaggcccctggccggcaaagcgctggctgtgcccgatggtcactaacatatctga

SEQ ID NO: 156288 - DNA, 170 bp, Homo Sapiens
gaagagaacattttcacaccatacatttgatgaagctaatatccaaaatatataaggaacttatacaactcaatggtaagaaaacaacccaattttaaaatgtgcaaaggatatgaacagacatttctcaaaagaagacatacaaatggcccacgcattctatggtgtcg

SEQ ID NO: 156289 - DNA, 231 bp, Homo Sapiens
acaaccatagaatgcaagtaatttattttttaaagttgatatgaaataaataggtaagaattttgaccatgacccagcaaatcagtaactgagctttttatagaatggaaggtgatgatcagagacagaaaccatagaataaatttttattctttaagagcacattagtttactttcttctcctaaaaatgaatctgagctgtccattccattctatgctgtcaggtacag

SEQ ID NO: 156290 - DNA, 128 bp, Homo Sapiens
caacacatagaatgcacaaatgtagaacttaatcctgtatgtgtcacacagtagtattgacagaatgggttgagggttccaaaatctcccacccaggctcagacttacttcctacccattctatggtc

SEQ ID NO: 156291 - DNA, 340 bp, Homo Sapiens
acaaccatagaaaggaatcaattttggttccatagagatttccttcatattccccatgttccaaatactttccagctttaatatctgcttccatctcagatcgtgacacaaacttatatgcctggccatctttttcatcttcccttggtttccgtgaagtaaatggcaccgtagttccaaatctagtgggattcaatactatgaacctgtttttcaagcttcttcggcctacaccttgagctcctatcaatactaatgtttttctctggaagggaggcattttggctacctcctcatatatctggatttcatgacgatcaaattctgcattctatggttg

SEQ ID NO: 156292 - DNA, 163 bp, Homo Sapiens
  misc_feature (62)..(70): n is a, c, g, or t
atgatcagccggtacctgacagcatagaatggtgatgatgctgtgacaataagtttgaaccnnnnnnnnngaaacagcagtcccagtattctcagagcatgtgtcagagtgttgttccgttaacctttttgtaaatactgcttgaccgtactctcacatgtgg

SEQ ID NO: 156293 - DNA, 354 bp, Homo Sapiens
  misc_feature (220)..(278): n is a, c, g, or t
acaaccatagtaatgccaaggcttctgtttgtctcaagttccgtttccctcctttagttcacatttgttcatgctacgaattgtcgtcactgatgtggtcattatgtacatgaaccacagcctattcttgccataccctacttcaaaattctttttgtagtatttcatcaggcacaataacacctgtcatcccagctcttcagaggctactcagagcccnnnnnnnnnnnnnnnnnnnnnnnnnnnnnnnnnnnnnnnnnnnnnnnnnnnnnnnnnnnggaattctttttgtaatatctagtgtcttttccctgtggaatatcaaatgcagagttgttctgagcacagcatcgt

SEQ ID NO: 156294 - DNA, 199 bp, Homo Sapiens
actaaccatagaatggggcacacatattattcgctcttctgcatgtgtgttatattttaataaaaaggccacccacacacatgcacaatgttatggccaatgcatgagaaagatcataagaacagagaagcaattaaagaaactacaccatgtatgataaaaatggaatggacagtcaatggaacagatgcttatactg

SEQ ID NO: 156295 - DNA, 315 bp, Homo Sapiens
  misc_feature (45)..(76): n is a, c, g, or t
gggtgactctttgaggggtccccccccaccacaaaaagggggggnnnnnnnnnnnnnnnnnnnnnnnnnnnnnnnntgggtatccagttggcattttgagcttgttagtttttagttagtcccacatatttaaaaggtattaacctatcaaatggtcctgcccaatcatttctttatttgaatttgttctgttagaatttgttctaccatagctgaacaaataataggttggtttgctaaatgctctggatcaaagaaggatgaaaagatagcctatgatttggtttctgttcagttatttgcttagacttatat

SEQ ID NO: 156296 - DNA, 385 bp, Homo Sapiens
agacaaagcttagcatagataaaagagacctcgttgttcttcctctgtttcctcctattcaggtaacatttgcctttgttaactctcagtgctaagtgatgttacatggattatttcatgaataatccttacgactctgaaaggggttctgctattaccccatcgtacattctaagaaaccaagtctcaggcagttaataatttgcccaatggggtaaagtcaagattcaaacccagccttgtccgcccagagcccaaaataaatgttcatttattttgtattatatctgctattccgtacaaatgggacagacattccctactctgctatacagggctagaacatctggttgctctgacattcgatcagtgtcataatcattgt

SEQ ID NO: 156297 - DNA, 415 bp, Homo Sapiens
accaccatagaatgcccggcaacagcccgtgtctccgtgggcacggtgggttctagctgtattctcacgagcctttttccctccatgcacagaaacacttcataaagaataagcacgaatggaaaccacaacacgtggttgatagttccttctgttatttgcctcttctttttgctatccgtttaagatgggaaagtctacctacatttttaaccaaatactccgtagaaaaaaaacaccacagaaaaagaaaccgagttctctccagcctctcagaagggctgcagtgactcggcatagtcaattatgggaaagttccaccttgtggctcagcatgcccaagaacaaagccatggacagtttttcacaagagaaatctcagggaatagagcagattatatagcactacatcgct

SEQ ID NO: 156298 - DNA, 284 bp, Homo Sapiens
atccgccacatgaatgcagaagggttttcctatggtttcttctagaatttttatggtttttggttttagatttaagtatttaatccatcttgagttgatttttgtataaggtgggagctagggatccagtttcattcttctacgtatggctatccagttttcccagtaccatttattagataatgtgtcctttccccaattttgtttctgtatgctttgtcaaggatcagttggttgtaagtatttggccttatttctaggttctctattcttttccattctat

SEQ ID NO: 156299 - DNA, 146 bp, Homo Sapiens
cactgatcttcagaggaatgcaaatcaaaactacaatgaggtatcatctcctttcagttaaaaaggcttatatcaaaaagtcaaataacaaatgctggtgaggatgtggaggaaggggaacctgcattctatgtggtcggaccgcc

SEQ ID NO: 156300 - DNA, 623 bp, Homo Sapiens
ggagaagatatttgcaaactacccatctgacaagggattaacaaccagaatattaggaataggtgtagtaatcaaaattaaaaatgggcaaaagatttgaacagacatttctcgaaaggcaacatacagatggcaaacaggcatatcaaaaagtgttcatcaatgatcatcagagaaatgcaaatcaaaactacagtgagatattacctcactgcagttataatcgcttatatctaaaaggcagtaacaaacgctggcaaggatgtggagaaaagggaacccttgaacactgttggtgagaatgtatattagtacaaccactatggagaacagtttggcagttcctcaaaaataaaaactgagctaccacatgatccagcaatcccactgctggtatctacccaaaagaagggaaatcaggatattgaagagatatctgcaatcctgtgtttgttgcagcactgttcacaatagctaagctttggaagcaacctaagtgttcatcagcagatgaatggataaagaaaatgtggaacatatacagaatggggtaccactcagccataaaaaagaatgaaatccagtaatttggacaacatggatgactgcttctatgtgtcgta

SEQ ID NO: 156301 - DNA, 201 bp, Homo Sapiens
tgaaatcttagcattgcctcttcctcacctacacatctcatcacctcgaaatgttcgtttagtctcgaggatatgtcttcagtctttccacgtctctccatctccaccctccactgctccggtagtctattcgccaccacctcttcctgctccaggagcctcctaagcactctcctttatccattcttgttctttccaatg

SEQ ID NO: 156302 - DNA, 206 bp, Homo Sapiens
aaaaaaattccacctagtttttattggagtaatgacttcatgcccagaatggttttgagtattggggacagtaaatgacagacatataagatggtctgtgccctggagcttatagttgctaaaaggagcagacacacacgcccatgttattcaagaatcgctgtgattttgtcccagcaccccctttgctacttctctgcctctgt

SEQ ID NO: 156303 - DNA, 174 bp, Homo Sapiens
ggtactgacagcataaatgggtggaacaaatccccacatttgattcttttctctaagagccttttaaggaaattgtgactctgtgttagagccaacgggctatatcctattagttcatctcactcccttctgccctgtgccccttgccccctgccttattaacattctatggtt

SEQ ID NO: 156304 - DNA, 325 bp, Homo Sapiens
acaaccatagaatggagtgtacaaagaagacaggctcattgaaggcaggaagataaccagatcctagaagggaccctttagcaatttccctgctagaatccctcaagctagactgcagcatcagagtgtattggaactttgtgtagtgggctggaagtaaagaaaaggaattctcaccgtactcatccaggccataattctgacttcgttgaagccaccaaccatagaagaaagcaaacttgttcacgtttgctgctcctagcttggttttggtaatgtatgttgtgatgtgcttcccagatccccacttcagcattcactgctg

SEQ ID NO: 156305 - DNA, 302 bp, Homo Sapiens
gagaaccatagaatgttccgttactcaaaacttattaaatgtattgtttttgcttaaggacagaggaaataataaggctgcctctattaggacatcgagatctgtggtcaagttcccgagatagaaaaagaaagaaaaagcatgctagaacttgagatgtcccaacttccatcttcaaaatatatcagcaaacacttatatcaaaacatttaaaatcaaagatcacagtaaatttaaaggtttagtctcttgtccttaatttttgaagttagacttgcatgactcccatttagcattctatg

SEQ ID NO: 156306 - DNA, 186 bp, Homo Sapiens
gaataataatacctatgccttactgtggttatgaggattacgtgagctgatgcaaataaggcctttagcacactgcctgacacatataagtactcataagtatcaggcattagtagtcctaaaaatttttagaaagttattgttaatatatggaccctcctcattctatgctgtcggtccggctca

SEQ ID NO: 156307 - DNA, 422 bp, Homo Sapiens
caaaatgtatatagaaaatcatgagttcctgtcatacaagaagtttgtttcatttttccttatactcacccaaccaaaggtggctaggaatgaggtgaataggtgagtcatgtatacaggtgttgttgataaaattgttatctattcccaacgctgcagcaagagatgagacatgattctgttattaaggctaaaatactgcatttctagcaatttttctcctttctgatatccccttacactcaagtgtgcagtacttaaaatagagcctggattgcctataattgtggcttttttcaccctttcttggctatgaaatagttcatttcatacctcttggctttatacaacgatgtattgaatttagagaaggggcatgtgctatcttgcccacttacaaatgtagttctcggcattcactg

SEQ ID NO: 156308 - DNA, 215 bp, Homo Sapiens
accggtccacttcagagtagctaggacttcttttcccagtgcaagttaccctgatatttgattaacacagtcactactccctaggaatggctttaggtttaaattcaagtattgcattgtatccagttttgtaagaatcactcttaaatcgtgttgtcatatctatttctgtgtcatagtgtggagcagtataccatactcgtggaaaggtggga

SEQ ID NO: 156309 - DNA, 233 bp, Homo Sapiens
cacttcagagtaggttaggttatgtacgtagtctaggcatatgtgttggagattgagactagtagggctaggcccaccgctgcttcgcaggcggcaaagactagtatggcaataggcacaatattggctaagagggagtgggtgttgagggttatgagagtagctataatggacagcgatagtattattccttctaggcatagtagggaggatatgaggtgtgagcgatatag

SEQ ID NO: 156310 - DNA, 333 bp, Homo Sapiens
  misc_feature (51)..(80): n is a, c, g, or t
actgtcagagtagagatctttcacttcctgggtaggtatatttctaagtannnnnnnnnnnnnnnnnnnnnnnnnnnnnnggcagctatgtaaaatggattgagttcttgattttattctcagctgtggtagctgttgctgtatagcagtactactgatttgtgtacattaatttggcatccagaaatttggctaaattcatttatcagttctgggaatttttgggatgagtcttcgggtttcctaggtatatgatcatatcatcagcaaacagtgacaggttgacttcctctttactgattgggatgccctttatttctttctcttgtctga

SEQ ID NO: 156311 - DNA, 438 bp, Homo Sapiens
gtagtttagagtaggattgacattagttcttttgtaaatgttggctagaatttagcagtgaagccattgggtcctgggtttttctttactgggagatttttttattatgcattcaatcttcttacttgttgttggtctgttcaggttttggattgctgcatggttcaatcttggtactttgtgtgtatctaggaatttaagcatttcctcgagattttcctatttattggcatacagttgctcacagtagccactattgagccttagagtttctacagaattagttgtaatgtctcctttttcatttcgattttactcatttgggtcttctctctttttttcttgggtagtctagttaaaggtttatcaattttattttttcaaaaacttttcataccattaatttttattgttttcttcattgcaatttttaaattt

SEQ ID NO: 156312 - DNA, 300 bp, Homo Sapiens
acctacttccagagatagactcataactcatgcttctgatttgtgtctgttaaaagaaggatcagaaacagactggcaaggtcttacagttcttggtaaaactcttggaaaagactttcttttttgatttgcttgtgtattttagtggtgtcttcaggctatttagagaaaagtagtatgtctattgattcggccattggcagggacttaaatgatggtacgtgttggctgtgtagtacctctgcttcttctagttggattaaatccgaggacaggtaaattcttttggcatttggcttg

SEQ ID NO: 156313 - DNA, 135 bp, Homo Sapiens
gtatgagtcgccgtacccggccacactttctatttgaaccagcacttgcattcaacacagaatgacggaaatagtgttctaagaaacacgaatggccaagggacactattagattctaacctactctggaaagtg

SEQ ID NO: 156314 - DNA, 431 bp, Homo Sapiens
tagctcttgaaatagctgatcagtattattcctgttgtactgatgaaattataaagtatttagcctactgttgttgaaactggaagggaagtctcttcacataaaattttatctctgccttcaaattatactccaagtataactaattctcactattttatcattttagttctggctaccaccttttcttagcttgaattctgcaagagccccctagtgttcccgagtccattttgctttgtatgattgtttccccacacagtagccagagtgatccagttaaaatgccagtcacctcacatctctctcaagctcacggccctccagtgactccctgtttcttagcaaatcttataatagatcctgtgtaatctggtgtctgggtattttttcagcctcttctactatcttccccttgtttgtgctactct

SEQ ID NO: 156315 - DNA, 104 bp, Homo Sapiens
cagagatagagtatataggaacaacagatctggtaactatcacttatctccatggagttggtccgatactatacatatttgttattttaaattctacgagaaca

SEQ ID NO: 156316 - DNA, 371 bp, Homo Sapiens
  misc_feature (48)..(71): n is a, c, g, or t
gggaccccctttccgaggtaggggacagagcaaaaattctatttcccnnnnnnnnnnnnnnnnnnnnnnnnttgtagaagtgttttctatccctagttgagaactgaagaagagaaatctaaccagagaatttggtaagcacatcttatatgcattttttaaagacattaattccagttatccctggtactgggactgcaggtgattttaattatctcctttgtgttctgtgtttctccagggccactgttaattttataattagcttaaaatttgttcaaataaagtaaatattataaagagaaattgtcttcagtagttaagaaaaggatgaaattttgagtttgagggtaactaggctgggcatagtg

SEQ ID NO: 156317 - DNA, 210 bp, Homo Sapiens
  misc_feature (143)..(162): n is a, c, g, or t
atattagcaggtatggacttctcagaacatactggttattagaactctctttgtgacacagaagtgtggtatttcttaaacccataacaatatatttggagagctcaaatgtgaaagtcatgtctgtaattttatttagagcnnnnnnnnnnnnnnnnnnnncccctactctggaaggggggggaccctttaaagctacaccttgcgggc

SEQ ID NO: 156318 - DNA, 227 bp, Homo Sapiens
aactgctcatacagtttctattaaggatcaaggtacagagggtagaaaattaaggtttgcaggaaggaaattaaccagatagtcaagaaatatttaaatgcttaaaataacaagaggtgactagactacttacaggagattctctgtatcctttgttgtaaacacctcaattgaacatgttgctgagcagtagctacagagcttttatagttctactctcgtactgc

SEQ ID NO: 156319 - DNA, 621 bp, Homo Sapiens
  misc_feature (164)..(187): n is a, c, g, or t
  misc_feature (348)..(357): n is a, c, g, or t
tgtgtctgctttgcctccctttctttgtcttcctccctcatgtctctccctcccctttctgcctttggctaaagtctgggccagtgctggtaaagtgctccctggccagtccatgggagtttaaggacctttacagagaccaggttcctggcgttacttctgannnnnnnnnnnnnnnnnnnnnnnntggtaaaattcagttacttgcttggggagtttatgagtttatattgtaatggatggaaaaatgccctgtgctttgcaaccttttagactaagtaataacacttacaagaaattgtgagtgttatgggaaccaacttctgtgtgggagatgggtacgagggnnnnnnnnnngtttcataatgatgaatgagaaattttcagaaagcattgtttggtttgtcattttcagtccagaaggttacttacgtcattactctggggatggaatatagcttcactgaatgacagcatttggttccaagttatttagttatgtttcattgtgttgaaataccctacctttgccagaatcgttgtaaactatgtgtgaagctctatggtggggaaaaattgaaaggagctgccatattatatacagtgacaattcattctact

SEQ ID NO: 156320 - DNA, 112 bp, Homo Sapiens
caaggaaggaaccaagatcactgagaggttatagtatgaaaagtggagagaaaaaacctattctaaacattttattaaatgtcaatgtttaatattctaactcatgaatggc

SEQ ID NO: 156321 - DNA, 226 bp, Homo Sapiens
accacgttgcccaggcttgaagccggatcaagcaattgggttctttggatttccgaaatagaccccaatattctgcctttaccccggaggatgcagatgtaccttctctcaggccgatgacctcaggcctccacggtccctggagctctaggaaaggtgggcgcgatctcgttcccacacccagtgctctgggtataagctaatatgaaagtggtaccgactaatt

SEQ ID NO: 156322 - DNA, 317 bp, Homo Sapiens
  misc_feature (54)..(71): n is a, c, g, or t
gcctgcacaggtgtgaactgttaagaaggttcccccaccttttcagaaggagcnnnnnnnnnnnnnnnnnncctataagcaagttgtttcctaaagcctgcctcagaatgctcttttgcaaatgtgatcttccttttaaacaatgacaacatgaatcgtgtgttatttcctcagtgtgccaatatgtaagtatataactttctaaattctagataagatgaatttcaatgttttattcttcatagaatgtaaatgatcatttttgtcacatttatcttgatataaaaacatgctttcatgcttcttaaacctactac

SEQ ID NO: 156323 - DNA, 253 bp, Homo Sapiens
  misc_feature (137)..(137): n is a, c, g, or t
agcgaccacttcagagtacacttccagattatttcagattagttattttaatgaaaaattctagcagggggtggctggagctgttcccttctgcctaaaaactagaccacaaagtaagtgaaggtaccctcgtctcntacaggtggtgtgggcggtggggtaggatgattttaaagactgtaagaggaggattttattggagggaaagtccaaattctatattggggcagtagagctgcaccatgtcagacac

SEQ ID NO: 156324 - DNA, 429 bp, Homo Sapiens
gtcgagccagtctcagattagctcagagtccaaaataaatactccaaaaatggatcttttttagcttggagcgcatttagtagatttaacctgtcaagtgtcttgttaggtcagttgaaacaatggttttaattgttagcctggtggctgggccgtgggagagacacttgctaatatgttgagtggtggatggaaataagcccaggattttaacttagtcagagggatctttgaaacaggttacactggagaggtgtccactgactctatgtgtgtgctgcattccaggcttttctgaataaactgtgtggaagaaatattttcctgatggttgccagtcatttgacaatttaaagtttcggcaagactaagtctttaaagccaaaatgacctgtagcgttctaggtccttaggatggtgcctactctg

SEQ ID NO: 156325 - DNA, 183 bp, Homo Sapiens
ttagcaggatagaaagccatatctctgaatctctgccaaattcagctaaaatttcaggatacagcacaggaattccaaggcagacaaccgcacgaggttctaaggtttctcattctcaaaattcatcattctagaatgttctagggtgatatcattgacctttgcgggcaacccttttctcta

SEQ ID NO: 156326 - DNA, 229 bp, Homo Sapiens
atgagtgacggatttccttattaagagtgaaaatcccagagccccacacgcaggctagagtgtacacaacaatgactcaacactctaggactcaggagggcacagaagaggctcccatacaagccaccccaggagtagactccatttctggagatctccagcctgacactggagaaccatctgagatgatctcttccagcgtcaatgtactgggacagcaaacactctg

SEQ ID NO: 156327 - DNA, 283 bp, Homo Sapiens
tataataaacttaggaatgtgttttttttcaggcagtatagctataagcatgatgagctctgaactgctgggaggatcctacttaaagtcacatcctggggtctatgtcgagacctagtgtgactgggtcgcacgaagagtgctctgtaggaagaaaaaagttggtaaattttagtgaattttggcatttggaatagcatcttatcattctctagctcccatccctgtggtaaccaactgttgggatggcagtttctgctctggaaagtgctactctggaaag

SEQ ID NO: 156328 - DNA, 199 bp, Homo Sapiens
ccggtgcctagaggatcccgaccactactggcccacagaggctgtagtgcgggggctcatgagaaccgaggtacaccaggagctcagaggtggggccagcatgttctgggggtgtctacaaaggcttccggcagctcagagttcagcctgagcaaactcttgctcattcattcactcattcattcagccagtagtgggt

SEQ ID NO: 156329 - DNA, 349 bp, Homo Sapiens
tactggcccatatggtgaaccccgtctctactaaaaatacagaaattacattccctaaaaggtttcagctaaacagaagccaaagtgtacaacgtcagtgaattaagtgaaaaggaaagtgagcaaaatcacaggaagatgtaaagatcatctacttggtgagactaaagaataaaagatcatagatcatgtaagaggggatataaaaagttaaagtgagataagatacatgatagtctgtcaatgaatcaaatgttaaaggtaaaatattgcatattataccaccatggtcacagtaatgtaaggacaggtcatgcgaagacctgcagatcaggactggctcatatcc

SEQ ID NO: 156330 - DNA, 330 bp, Homo Sapiens
gaaatttgggtttgaggtcctgctccatttactcttgtaaattagttcactggtttgcaggtgtgttttctcatcttcaatcagagtcaatgctgaccttcctcacaaggctgttgtgatgctccggtaaatgtgtacatatgaaaacaatttcaaaatcgtaagaagccatgcaaatgtcaggatgctgatgatgatggcggaagaagagcagcaaaaggaaaatggggaaaaagaagaggaggaagggaaagggtcagatagcagaccactggtctgtgtgcaatgcctttcattttattatgttagcagtgcgtactagcttcctgg

SEQ ID NO: 156331 - DNA, 261 bp, Homo Sapiens
ttcatgatgattttgactctctgtacgactgttatttttattttgccaaagaattaaaagtgttatctggaaaccacatacctttcttcctttacgacaacctgtcattcatcacagataaaacatccacccattaaatgatatttttacaagattaaagaatggcttttcacaaaagaaagaaatctccttagttaaataatgaaccaaatcaaggtacctaatcactgatcagcatcgaagttttgttccacacatgca

SEQ ID NO: 156332 - DNA, 257 bp, Homo Sapiens
ggttgttctagaggatcccgaccactactgggccccttccaaacatgctcacggctggtcagctcaggtcaagttctggcttgtctagtgttccagtctctatcctggtgtggctacaccttaagattcctgtctgcaacccaggttctcaccaaagcttcctggccagaagccagatttctcccagctgtccctgggagcctgcctgccagttgtcaaggggcacagggcctccctgaaggccaaacacagcctgg

SEQ ID NO: 156333 - DNA, 567 bp, Homo Sapiens
gagctcggtacccctactggccctgctctctcctctgccgaggtgcctgttaagctgcattctctcctccacagctccccgcttcctgcaggcttcctgtctcactttctttctgtgctccagagtctaggcaatctcttttgttagaacttccaattcaccaatactttcttatgttgtgtctaataagctacatcatctgctcactgggttttttatttcagtgattatagttttcatttccagatattccatatgccttaaaaacatctgcatgatactccatggttttaactcctcctgatgaatactgtgcatttaaccatcccagcacgtgaggtccctggggctgacccctgctgaccctctcagaacagctttcttcctcaacgtcttgtaattccaaccaggctcttcgtctgtctacactctgggagccggaaggccgggatgaggaaggtgtgtctctccagggagggttagcttttgctgtggtgggggccccatggagtgtggggcacttccagcagcataaaacagcacacatccatatgccattccaaccag

SEQ ID NO: 156334 - DNA, 223 bp, Homo Sapiens
gtccgaccactagtggctactggctggtgatcagagactccaaagtcaggccatgtggtatagtggaaatgtaagatctctcgagtttcttgggttgtaaggttttccagttctatctgtcgcactgtataatatgacttgatatcttcagagatcaatgttaatttcaaatttgtgtcttcaaagatcatctctttttcttctttttgtggccagtagtggg

SEQ ID NO: 156335 - DNA, 242 bp, Homo Sapiens
tcttaaacaggccaagtctgggtgtacctgtggacaggagagtccaggctaggtgattagagtacacgtaggttcagggctgtctggggcagaagaggatgtgtctgttggtggaggtgcccagctgtctatgcctaagcatgaatgcacgggtcaggtgatgtatccctgtagagagcatgtacctatggactaggctgcctgggtccaggtgagagtgtacctgtggacagtatgtctgg

SEQ ID NO: 156336 - DNA, 459 bp, Homo Sapiens
ggccacttctagtccctatatagaagagcttgcttggcatgattgaaccttcgaagtgtgctgctgtcgagaccaagagggcagtaaaacatgctgtagatttttaaaaatacaaactcttaaaacatgtgaaaccacaaacttctagttcccactgaggttaagctccgcccatattaacctagagaccgggttccccttaagactcaaaaatccaaatcgcctccagaccaactaaactgtttggaccatgtattattaagcactcactcttctcctaagtttcaggggctcagaccctaaaagccatcattcctgagtgaatcctgcaccagagccctcagatcaggcgctactaggttcgacttattcctataagccagtctctgatctcaagcttctcttctggggaagggatattacatgttaagtaaatgtgcccttgccatactcttgata

SEQ ID NO: 156337 - DNA, 145 bp, Homo Sapiens
taaattgcctccacccatggtggacaggagacatacactcaacatataaataatgatgagtgcaccagccagccattatgtgggtcatcttgtctatcccgactccaccatttctagggaagacttttatttaatggtgggggta

SEQ ID NO: 156338 - DNA, 399 bp, Homo Sapiens
gctcggtacccggccactctagtcacctcttactctttgttctagtcatgatgacagggttgggttttttcaaacttgccccattgtagcctcagggtctataaatatgccaacccaaaattccagccctgagcctcctggcctcattaagactcagtttgagaatcacttcctcttagcagcctgtagctaaccccaccccagatctgccccagattatcgtgctcccatcactggaggagtctctcgtgtggtcgtcactgtccatttctttgtgtgatgtcctcactagactgtgagctccttgcaagcagggtctgtgactaaaccctctctgtatcgctgctgggggctctagctagctggtgaacccataagaacgtggcctagagtggtcgt

SEQ ID NO: 156339 - DNA, 461 bp, Homo Sapiens
cctacggaccatcggtgtcatcaccaagcttgacctgatggacgagggcaccgacgccagggacgtcttggagaacaagttgctcccgttgagaagaggctacattggcgtggtgaaccgcagccagaaggatattgagggcaagaaggacatccgtgcagcactggcagctgagaggaagttcttcctctcccacccggcctaccggcacatggccgaccgcatgggcacgccacatctgcagaagacgctgaatcagcaactgaccaaccacatccgggagtcgctgccggccctacgtagcaaactacagagccagctgctgtccctggagaaggaggtggaggagtacaagaactttcggcccgacgaccccacccgcaaaacccaagcctcgctgcagatggtccagcagtttggggtggattttgagaagaggatcgagggctcaggagatcagg

SEQ ID NO: 156340 - DNA, 237 bp, Homo Sapiens
tttgttctatgttaggttcgtttatacagcaggcgagcaggagatggtgtcttggaattgccttgacacaagagtcatctgggttctgcttcatctaaggagtgcttcagtgacatggactccaaagcacagtgactgatctttctggataacacccggcagagctagacttaggtacatgctcagtccagagccctcttcagatgtgactagagtggccggggatcgtctagagca

SEQ ID NO: 156341 - DNA, 194 bp, Homo Sapiens
ctatccccggtcactctgttgactgagatgtaatctaatgaaatgagatttgtctgtcttccccacactcagcctgctttggtacaagtcacaggaggcctttgactgctcataggagaatctctgctgatacacagtctttcattgacaaatatcaatcactgtatttgcaccatatccaatgactagagtgg

SEQ ID NO: 156342 - DNA, 428 bp, Homo Sapiens
cactctagtccacagtcaaagaaggaaggcggcactgcattgagctaaatggggcagagtcaaaatcctgggttctggaactggcttggcctccaagcaacccagcctccgagccttagtcccacttctgcaaagtaatgctggttagtgagataatctccaaagctttgaagtaagctccacttgagcttccactttcacaacttcaaggtcaactctgtacttaggaaagacgatccacggcttctgagagggcaacaggcttgcaagatgaggaggtccggtttctgtccagggaaagcatgcgggccccaaagacgtctttttgtgtagatagagtgagtgagtctactacaactttttattgtttctttgctcgttttgatgtccacagagcccaggttttcgctggactagagtgaccgggg

SEQ ID NO: 156343 - DNA, 459 bp, Homo Sapiens
aatgatttctactcatcagtgaattttctggaagcctaaaaattgatttttaaaatccagccaatgttagtttgttttattcccaacaaggttttacttgctgggatactgaaaccactgagctgctcctagtccagtggtacaatgttaaaatgtaaaacactttgcaaaacatgtttatgtatatttttatttaagtattctaataactttatgagataatatgacaggtaggatttttattgtaactcaaattaagtgatggtagttggacttgaacttaccatttccgatgcctagtttagttctttttataatagtttcatagtgtttttccaacacacaatttaatatctaggtatacttcatttatgcagcagatttattgctgaaaaagtcatgtgcaaataagtgtttagaacaagtgttattttaaatgtgactagagtggcgggtacc

SEQ ID NO: 156344 - DNA, 340 bp, Homo Sapiens
ttctcgtacatggtccagaaacatttttggagtgcctactgtttttttgagacactgtgctgagtatcgtttcaagacagaggtggagccacacttggctcagctgcttttgccctcagagagcttatttcttgtctcttagtgactctcgcatgactcagaactgaggcgatgggatactggggtatgacagaggtatgggactggaagtagtacgtagtgctgcagcctgtgccttaatattttctgtgcttccataagttctttctgttaatgggaaaaatcagctgacttcattcagaatttgcagagtatttgctgtatcactagagcaaccatg

SEQ ID NO: 156345 - DNA, 313 bp, Homo Sapiens
agatctttgttgctgaacagatttcccttaatttccattttcttatcttttgaaatggctgccattagcaagcggtgtactacaatatctgaatatcttcttattggagaagtaaagtggttatatttatctaatgcaaagcccgtaaatgatggaactccttcctccgcacaggatccggtggagaagtacagagcattcgacatggcctgtgtggccatggagcgcagtagccatgttcacaatgggatcgtgggggtcgttcgcattatccagagaatcagccagtgttttattagaccatgtacgagaa

SEQ ID NO: 156346 - DNA, 134 bp, Homo Sapiens
tctctcacacacgtactacctgggagggatcctgacattcacctaggggagtcaggggctacagcccttgacaagcatgctaacaatttccagtgtgggtaacagacctgggaattgttagcgcgtgctgtccc

SEQ ID NO: 156347 - DNA, 290 bp, Homo Sapiens
acacagacacacacacactttgctgagctgcctcacatcctctgtctcaccagctgccatggagggtggtttctggtgtttatatcgtgctttgtatttgtttttatgggaaagttcagggcaaggaagggctctgaggtgctacaggagagcacagaaatggtatcgcagcttcccagtgccccaagtggtatattttgggacttttcctgtcatagaccttggccctgaactccgcgtgccagggattgaggggagaccccacccgtgccccagatgtcactcaccca

SEQ ID NO: 156348 - DNA, 538 bp, Homo Sapiens
tctagacgatcttttggaggcaggacactggccaacacctgcctcttccaaagtccccagcagtggcaggtgtacactgaggcctggttgctggccccggccggtcacattgactgatggtcaccgcctgacgaatcgagttgcctgtgtgtctacctctctgaagcctgagcaccatgattcccacagccagctcttggctccaagatgagcacccacaggaagccgacccaggcctgaggggccaggaacttgctgggtcagatctgtgtggccagccctgtccacaccatgcctctcctgcactggagagcagtgctggcccagcccctgcggcttaggcttcatctgcttgcacattgcctgtcccagagcccctgtgggtccacaagcccctgtcctcttccttcatatgagattcttgtctgccctcatatcacgctgccccacaggaatgctgctgggaaaagcagggcctgccagcaggtatgagatctagcctgctttcagaatcacttgccacagtgtcctgcctcct

SEQ ID NO: 156349 - DNA, 383 bp, Homo Sapiens
aacggcatcttacatttaaggttatagtttacactttacaaagaacttaataaactacatcctctcatcggccatcgctacggccccttggctgagttgaagagaactccttttccctttcctgaatcctgctcaggggggacacagcttgagcggcctcttctgcccacgtacattgccacacaaacactgaaccacactttttcaggagcaaattaactgaactcttcctgcctcatggaatgtcctgtttctagaatgtgactgctcaaggagagagcgttttaatcatcatttgttagaggagcctcatttcggggagaattttcttaatggtccttgcatttggcatttcttaacgtctgccgttgttcttcgacgaa

SEQ ID NO: 156350 - DNA, 204 bp, Homo Sapiens
ggcatatccacagatgcaggttcagtgttaccctactctgtgacagttgttaccccattcagatgtctattcttgaagaaatgtggagaagcaaaatctctaagagccaagtactagcaagaaaggagaaccttaatacttgcatgttagcacaatttagaagttaatatttaagggacagccatctagctgctctcttaactg

SEQ ID NO: 156351 - DNA, 281 bp, Homo Sapiens
agggaagtgggtcagagagggttgctttgtgttaagacagaggactctccgtaatgacactggagagagaggtgacagatgaaggagcaaatgctttcagaggtgagggagaatgggatctggagcagacgttggggtccccatgaacagggactgttctgccactgtcgcaggtggggaggcgatgaagacacaagcacaggtgcagaaggctgggggatttggaggtgggaacacaaggtgtcctgcaggatgaagtctatcttttcagtgaagtgcaa

SEQ ID NO: 156352 - DNA, 136 bp, Homo Sapiens
actccagaggatcccgctgtgccagccaacaggatacatttctacagctagcaggataacagatgagttaaggggcctctctgaattcgcttcatcagatgcgtgacataacctgctatcctgttggctggcgaca

SEQ ID NO: 156353 - DNA, 328 bp, Homo Sapiens
agaggaccatccggactcccaggtaaccccgaatactcttttttcaggctacagcaggagctgatgaccctcatggtgagtgattaagtgcccagaaccccagccttccatccaattttcagtagcctccttttttccgtcagcttttttgctagacataggggtaatgtaatttgctccctcctgggaaagaagttcatacaccccacctacatccatttcttccagcagtccctcctcccaattccatccccccacacgaagttatctcgaacacttcactgaagtcaaacaagaccctccctatccggatgtcctctgtgtcctc

SEQ ID NO: 156354 - DNA, 394 bp, Homo Sapiens
atggtaaacgagccaaactggataactgctggggccattctcagcatggagatgattccctcgtggctgaatcccaggacccgcggcgactccagcgtctcctggaagagttcccgctcctggccgggagaggatgacggcccgttggtcactgaaccggtagtgggagcagggctcgatgaggaggtcggctttgagctgctctccagcgccccccagcagctggtagaagatgtggaagctgcactcgttcttgtcctggcggatggcccgcgacttctccagcaggtaggctctcaatgttgtcgcccacgatgtacccggcaacatcaaagttgatgcggatgaatttgccgaatcgggaggagttgtcattcttcactgtcttggcatt

SEQ ID NO: 156355 - DNA, 468 bp, Homo Sapiens
ggtacccagagttaggatcgtggcgagtgaagagcagcctcggcatcaggcataggatgggcctcatttcagagaacaaggagctgtggaagaacccagaggctgctcaagtgactcgaggcaggatgcaagtgagaacggggctgactaacacagaactgggaagggcaaactgctctatggagaatgtgactcaaaccagcagggcagaagcattgggatcccagctctgccactatcgacaaggcacagaagctctctgggctgagagtccttttataagacaagtggatattctctagaagtcctttcagttatttttgtttaaggaacgttaaatctttgtgtatctatagagaaggctgcaactgcagttgcagctcaggcaccagcacccaagttgaggagcagacgctcgctgtgtgtggttgttctgggcaaagcaatcagcatgcttcagcacgctcc

SEQ ID NO: 156356 - DNA, 418 bp, Homo Sapiens
aatcgagctcggtaccggctgagcagctggcagtcctgtggtgtccccgctgtgcgtcccgtagtatctggctggcactgctcacactgagggccctccgtgtgatgctggcagccctggcaggcacctgtttctggctcgcaggcctctgagtggccatggcagctgcagcgttcacaggtacccaggtagaggccactgggcgtgcgtgtgtaagcctgtgtcaccgtcctggcaggaccgtgcccacggtacccgggtgggcaggagcactgttccacttccagcgcggggtcctggccggtttcctcgggcacagccacgtccatgctgatgccagagaccctgctctcagcgggctgctgggcgtaggatgctcggatcaggagggtgtcgatgcctgccagtgccatcagca

SEQ ID NO: 156357 - DNA, 348 bp, Homo Sapiens
tgaacccactccttgttcaaggaagctcccctgggcttttaatcacttaaataaaacctcttccctgccccagggacttgagagtacaaggtcatagctggcttttcctggcttgtcaggggcgtgatcccggaagatgagattattgcctaagagctggtgggctggaagagctccaggttttgtcctgggggagggacacgccctccagggaccaggaagcaggtgtaatagtatcagtcgcacaagagctggaatcgggtgagggcttggattcagctacccttccctccaagaagccccaggatcgtttcccctctgctgtgtctgtcctaccttggagaggga

SEQ ID NO: 156358 - DNA, 168 bp, Homo Sapiens
tgtagctggagcctggaagaactctgatagcttcgtcgccttctgtacatctgcattccccagcgtcacctttccacccctttggtccgctgggctccaggggaggcgggaagcccagtgaagcctgctcttccttttgctcctttcagcccaaacaggaagccatca

SEQ ID NO: 156359 - DNA, 518 bp, Homo Sapiens
agcagagctcggtacccgttcgctactgtgtgcaggaaattgtgcttagtgattgatgtccatgatctcgcttcatcttcacaacgatccatgcagtcagcagcgttccccacgaggggcagcagcagtgctgagctcagggccctcatgacctgcaggaaggtgggcaaagtggggaagatctggaatccagtggggaagagtcgtccaccagtgacagcacttccacctaaagtcccctgatcgtgaaagagatgaaactgcaaacgaggacgtgaacttggggcctgtggatcagctggccttctcaggttgcagagagccagctgtgcattgtcttattcccttgtcccagcagagactgaacgctaagtctttcccaccatcaaggcatgaggtttctctctttgccgcatttgtgttgggcatctcagccctcagtctgtatttttgtgaggtcgcgactcatcttatgtgcattattgtgcacacactagcggtcgttttcctcaagagtc

SEQ ID NO: 156360 - DNA, 237 bp, Homo Sapiens
gctcggtacccgttcgctactgtgtgtgtggtttagagagccttgttttgtaaattccattaaatttccttttttagggcaggagctctgtactcagcagttaaaagattcatctggagtcgcaaaatgaaaagccgtgttctaacctgaggaatcagttaggggacaggagttccgtgggccaggaatgggctcagggagtggggctgcgtgtcacacacagtagcggtcgtttct

SEQ ID NO: 156361 - DNA, 257 bp, Homo Sapiens
gagctcggtacccgttcgctactgtgtggggacactagccaatgcaacgccttggcaataagcagccagctacaggggtgggtatgattgtttctgaatgttctcacgggaccaacaaagagcgctctccggctgccgtgtagcactggacatgattagggaagggaggagagggtgtcttccagccaggaagctggcccacaggtgtcactttgccatctcagaaccacacagggggatcctcatagagtcgggct

SEQ ID NO: 156362 - DNA, 278 bp, Homo Sapiens
tcggtacccgttcgctactgtgtgcacacagccaaggacagtcgggggacctctgctggtcctgcacccgctgccctgggtgctctgtcatccccatcccccatttctctttaatctgttcttcttttgtggtttcatgttctctttgttctgggttattcagaacctcgtctgcctccccactgtcccttgtacttgttcctgcctcctcctgctttgtgccaaggatttacttgccttcgccttctggctccacacagtagccagcgtttttcctc

SEQ ID NO: 156363 - DNA, 399 bp, Homo Sapiens
gagctcggtacccgttcgctactgtgtgtgttctgtgcaccatgtatgtgttctcctgcggcgaggcctacctggctttcaccagaatttcagtgatctgtaactcacaaaaggttaagaaactctgcctgagtgataaataaaaccgggagggttacatttgccctaaagagtaacgtgatgtgatgagccgccttgctggagggagggttctttggccgcaatagtaaaatggatttgaacagtattccgagacctacctcaggcgtgctagttcctagtgacttggggatgactgacatctacaaactcctctggtgagccaaagcctcggcagatgtcacctgagcccgtcttccatcggcatgtgcagcgggaaatgctatcgtattcagtgcg

SEQ ID NO: 156364 - DNA, 393 bp, Homo Sapiens
cctagcagagctcggtacccgttcgctactgtgtgccaggcattttggtatatttagttctagcctctttcctgtgaagaaactgagggagagtgactcgttcattgttgcacagcttgtaagaggtaaggaggagagccagggtctttttcctagcagttagactgcagagcatgtgcttataactactgcactacagtttttcatcattctcagcatggcatgttcctgcatttaaaattttatatttgaaactggacaaacaaaacctgtgttcatggcttttttggggaaaagaactttggtttttgttttattcacttacaagtccccacaatacaatccagtcatactcccttggtcataggtaagcctttgtctgtcctggaaacc

SEQ ID NO: 156365 - DNA, 368 bp, Homo Sapiens
acatatctttctattcttatttggtgcatgaactcaaaggtgagagaacttgttactctgccggtttggagtgagctgcagcctatgcttgtttctagaactcctgccctatccaacccggacttttttgcttcattccccattcctactatcagttgatttaggcgaggaaaaaataagcagagtgaggaaggaccctgtttgggagagctcttcccacttaactagattaacaatttatataatgattatttagtaatcctcctgggttccttagagtatgaatgacgggtgtctagtgggtggagaggccagggatgcttttaaaagccctgcagtgcacagaacgggctccacacagtagcgaa

SEQ ID NO: 156366 - DNA, 377 bp, Homo Sapiens
gctcggtgctactgtgtggagcagcacaggaccagaagacctgcctcactcagtttgcagtcacccctagatgcttcatggcttgtgtggtctacctctctagtcacacgtctcccaatcctcaatgctcagggactccactgccacactgatggaccaccatggtccaagcacgtccactacaaggcttggggaaatctttcattcgttcactcgactcacatttattacacgtggagctacacggatgagacttggctcctccctcagagaagcgaaaacaaacacacaaacagacacgaataacacaggttgtagaaacctacacacagagtgattcccaggacattctggagatggagcacacagtagcgatc

SEQ ID NO: 156367 - DNA, 266 bp, Homo Sapiens
gcgggctttgggaaaaggctgcgtttgaggttcgtaaaggtggtgatgcccaggagtctgcagacctgacttgttccgtgagcagtaacacagttcgggagatgaagttgatgcgaggttgatgtaagctggcgagtaccagtccctgccaccaccattattttatcatgaacaattgtactcacacagaagagttgaaagaattcacagtgaacacccattcacctgctgtctaacgtttctagtgatgatttttatgcgctgga

SEQ ID NO: 156368 - DNA, 301 bp, Homo Sapiens
cgtacccgttcgctactgtgtgcctgatgctcctgagtattattcgcacagtgatgtgtctgtggctgcctccatatgcccccacttagatggatgcttgtacagacgtttccaaggatatcatctgctggctcttttgttgtttctaatcaaagaaccgacaccctttgatcacaacagatcacggtattgtactacaaagactttgttagaaagacttaaattttacacgcttgtagctgtcacagaggttctgacagtatttacttttaccccacacagtagcgaacgggtaccgagc

SEQ ID NO: 156369 - DNA, 347 bp, Homo Sapiens
gtccccgcccgacctgcctggatgtcctagtgggaagctggcgtcacggatgctggtgtgatgggcctccacggactaggccgggaggaacgtgcatcagaggggaaagaaaggctggctgatggctcaggaacccaaaaccgttcccggcagatggctttgcaatcaattcaagttcaggtggactcaagcagcttccaattcgtgttgtaaaactttttcttatacatgggagaccgctttccgcttcagtaatccaacgtggcccttgcaggcctcaagcggccccatcttaaacatgagtcctaactgtaaagtctcgtgcagcactcagtagcggcgttttc

SEQ ID NO: 156370 - DNA, 301 bp, Homo Sapiens
ttcgctactgtgtggccactggttatctttgaggatagctgttcatgccaaagcgttattttaacttttctctattactttatgatctatgaggccattggggtctctctaagaacacagctcccatttataacactatttcaatagagaataagctctgaaaaaacactgttttgaataaagctcacatttcccagaaaatagccctagtgtgattcaaataggcatggcattgtgtagcgagaagccatgaaacctgtgggagcacgagctgagcacacagtagcgaacgggtaccgag

SEQ ID NO: 156371 - DNA, 327 bp, Homo Sapiens
atcgctactgtgtgcctagaacttgatcaagtgcaggcctctgataaccaaaagtaactgttctagcattgtacctttggttatctctgtagcactcattgtattaatatgttggatttaggcatccaccagtctttggatggtcaggagatggagcttccacctcccaaccttaactttgcaaacatcacttgtggatagtctgtttattgagaccagctgtgtcttgcttttactgacatgcaagaggagctgaagaccaagcagcttccagctgcctttagcagccagattagccttaaacacacagtagcgaacgggtaccga

SEQ ID NO: 156372 - DNA, 415 bp, Homo Sapiens
gcaagctcggtacccgttcgctactgtgtgtggtggaaacgtctcttactctcagatattgaaagtcattatgcaaaacgcagggccagtcaccctgctgtcccctccttctcagcaacataaaaattgcttggattgtgataaccctccagtggagtttttaaaccttttgaattagctgtggggcccttttttccccagaataaaactttatatagtaagtcagggtattactagtttgtgtgtattcttcagtcaagtagatggcatctgtttattctgagaccagcattgtgcactggcatgggaggtatagccagaagggacagtgcccgggagggtcctgttcaccaggggcagcacccaggccagctgccacaagtccaaggtccacacagtagcgaacgggtaccga

SEQ ID NO: 156373 - DNA, 307 bp, Homo Sapiens
tgtaggaaaaacgaccgctactgtgtgccaagtgccgggactgggtgctacatgacacagagtctgtcctagagcatcaagctcactgtctgggctggagaagcctcacacaaacacaataccatgtgtgctcggagccctcacctctgcccaccgaccttccatactgctaccacatttatcctcatggaattcaaatctgttcatacgcattctcttattgtgtcctgtttgtctagaattttttttgttcacaatcttaaagatcaccgcctcagtagcggtcgtttttcctcaagagtcaagt

SEQ ID NO: 156374 - DNA, 425 bp, Homo Sapiens
gtacccgttcgctactgtgtggtgctgcctctcaggtttccttaaggaggctgcacctgtttacatattctctccagactaagcccagaactccatcccaggcctccagcagactccccagctcctgcaggtgatcaaacagcttcagatctactgagaaacatgcagatcctaggagacagaggatcccaggattctgatggaactggctgtccatgctagaattttccccctagtgagtgtaattccttccaggtcccggagcacattttagagccgggcactttgtaattctggttaatgtcagtcatctcagctactctgtaacctcccttctctccaggcatgaaattgttttggttcacccgtgaatcttcagcacctgatatggtgtgtggcacacagtagcgaacggggtcatatag

SEQ ID NO: 156375 - DNA, 431 bp, Homo Sapiens
gtttgtttggattggctttgaagtaggcagctggggagctggggtttgccttgtgctgcagaatggattttcttccacaactgtctatcagtgcccccagcactctaagttaaatttttagagctagggattcgatggtgggagtcaatcatgtttaatgtgctggtggtccctgcactgtctgcagagagctgcctcccatttttgggtgagggtctcccgtgttctaatctactgctgccaaggttggaaataaaaatagcagtttggcatcttctttaaaagttagacagaaatttaccatatgacccagcaattccattcctaggtatctcgtcaagagaaatgaaaagacaggtccacgcagacttacatgccatcggatcttcatagcagcattattcgcgatcctatctctgggtccggagctg

SEQ ID NO: 156376 - DNA, 653 bp, Homo Sapiens
  misc_feature (63)..(189): n is a, c, g, or t
aagtaaaaccacgcccagacaatccgtacacgtgggtatctcttgctcctgggataaaaccannnnnnnnnnnnnnnnnnnnnnnnnnnnnnnnnnnnnnnnnnnnnnnnnnnnnnnnnnnnnnnnnnnnnnnnnnnnnnnnnnnnnnnnnnnnnnnnnnnnnnnnnnnnnnnnnnnnnnnnnnnnnnnctctattagttccagagagagctggctgcaatggagagtcagggacctcgtcctcttagtttcaagcatgaccccacatcagagtcacccctctttttaagacacatgagataacatcatatacctgacaaaatccatttactaacaacatttccaattttaaactgtccattacagagtttaccttttcacgtcctttttatttggggaaggttttagtaattgtcatggatctgtaaaaaaagcaccttaagaaagttcaaaatgttcaaactgttttggatcataatctcatcccaggattgaagatttgttcatacacagacagcactctggcttttctgttgttgtctttttgcgggaaggggaaggtgattctaaaatgcctaattctatttagaagcagcagtcgtttcatgctgtcaggtttcggctagtcaatccggactgatgggcatatggtg

SEQ ID NO: 156377 - DNA, 450 bp, Homo Sapiens
aggcctctgaccttcggtctgggtgatggagcaagacctcgtctcagaaaattggaaactattgactaagagaagtttctaggtttgcactgaattgtcttttgtacatacagtgaattgttttgctgttctccccactccatattaatgcaggagccaggttggtctgttaggatgaacaaaggttgaggggagggcaggattcgtgcatctgggggccaaacacatgttccgtcttgattgccttaagagttactagcgaggtcagtgttaggcttgcaatagggattttaaaatacactaactagttccttagctaccttcacatacattctataggccttcttaaattagcactaacctccacttccttctctgcgtcattgcctcccacatgtgatatgtagctatgtttgtagccgcgatccgtatctctggcgtaccgagcgt

SEQ ID NO: 156378 - DNA, 416 bp, Homo Sapiens
ttcggtgagcagtgtctaaagttctgtcgcgtgttgcccacgcgtcggtggctcgctccttgcaactgctgagcattgtatggctaggctgtagtttgttttcacttcaccagttgggaaacagagaaagggcactttttaaaaagtttaaatctgtagaattttggtttttaccagttctcttctaaatcctgagggattacaggaaaagttgttgtatttcagaatattcttagcttgatgtgacctctgtccccgttaaggccctttgccgcaatgggaaggacgtcgctcggtcagaccctgaaggtcagaggggcagtttgggagtgtgtcaacattttaactgtatggactagagccaagagtctcaaggtttataattgccgcgatcctatctctggcgtccgaccggc

SEQ ID NO: 156379 - DNA, 525 bp, Homo Sapiens
agagttaggatcgtgcctgagattagctggtcttcccgtatgaccctggagaatcactgatcgtcgtcgtcacccaagtgaatccttgttgctctgcccctaggtccccctcatcttgggctctccccacccagcatctgccatttccaccctcaggaaatccctcctgctcctcagtgggaagacagaagcaccagagtggcttcaaaggtgagtcctcaactgacagagcttagggccggtgtggcagatggcatgccgtgaactggctaccatgcttcccagaatggccgctatctgtggagttctgtggaggacaggcctagtttgagcccctcaagaccaagttttgagtcacctcattttactggtttctcttttctgaacattatccaacttggtgtttacattaagttttagggctaagaacggggtttcattgatctatggcatatctaggaggtggttttccctcgggattcagtaatgcccaggattaggaattcgtgggcggtgttttaacct

SEQ ID NO: 156380 - DNA, 414 bp, Homo Sapiens
cccagtttaggatcgtgggagcaaggttaggaaagatgaccagcaatgccggtgctagatgcagaggctggtggagaaacgtgacagagaggaagccaaagttcactcagtgaactggatgcatggggctccaggacagcagtgttcaggcttgatgcgagaaatgatgacgactcggctggggagccagctggccgcgtgggaggagctgcccgtttgttgactatctcctgtggtaagtttgttttgagtagtctgatcccactgttgtggctgcaacgaacgtttctgtacctggatatcatgaatacctcgttagctggagcccatggagcacagggtgctggagacaatacggcaacaagcaggcaggtgaagggtcttattcctcttgctctggagccctcatcaacg

SEQ ID NO: 156381 - DNA, 368 bp, Homo Sapiens
caggataaattctttaacagcaaactccaaaggaatgttgaagctgttttagcaatgaggatttttttgtttgagtgttgaagtgggccatagtcctttagaaatgatgttcatttatgataggatttaacttctaaggcatagtttattttttcctctttcctttttgtttgtcttaatgtattctttagcatgtttttgactataacttttatcctccagatcttaagctttcttttgctctcttcagcaatttaagagactattaagctgtcatcttcctaaaatctattttggtatccactctttttaaaaaaattctccaactttgtgattttttaatgattaaagtaatcatcttcgtttag

SEQ ID NO: 156382 - DNA, 609 bp, Homo Sapiens
ctaaacgaagatgattacccaaggcataaggttgggaaaacacctcatttgaccttgccagctgaccttcaaaccctgcatttgaaccgaccaacattaagtccagagagtaaacttgaatggaataacgacattccagaagtcaatcatttgaattctgaacactggagaaaaaccgaaaaatggacggggcatgaagagaccaatcatctgggaaccgatttcagtggcgatggcatgacagagctagagctcgggcccagccccaggctgcagcccattcgcaggcacccgaaagaacttccccagtatggtggtcctggaaaggacatttttgaagatcaactatatcttcctgtgcattccgatggaatttcagttcatcagatgttcaccatggccaccgcagaacaccgaagtaattccagcatagcggggaagatgttgaccaaggtggagaagaatcacgaaaaggagaagtcacagcacctagaaggcagcgcctcctcttcactctcctctgattagatgcatactgttaccttaccctagacacagtatttctttttaacttttttattgtaaactgataaaggtaatcatcttcgt

SEQ ID NO: 156383 - DNA, 471 bp, Homo Sapiens
gaagaggatacgcagctctcgtcgagtaccaggtagtatcaaagctatgattttggggcaagcatggtggagagtgcaagccatcacaatcaaatgacttcatcaagtgcctctgtgttgggtactctacaaatttaagactgacttgggctttctgtgatagtcatgtattaacagacacataaatactaaatccatttaaggtaccttatttatattaaatacagataaaggggaaaagcaggtcatgtgtgcggtcatgagtgagagaagccgtgagagctgaatgttggagagaattgcctctcgtgactctaagccgtcctttctgctccacgtttccatgtgactatagcgacctaaggctattataggtaatgaaagcctgcgtagcgtacctgttcacactaaatgagaggatttctgtctctgagtaatgtgatctgggttgtggggtatcatcttcgtcag

SEQ ID NO: 156384 - DNA, 619 bp, Homo Sapiens
  misc_feature (19)..(19): n is a, c, g, or t
  misc_feature (52)..(52): n is a, c, g, or t
gtcgtgctatactataacnctatgtacgtcgtgcattaattgctagtcccantgcatataagcatgtacatattattattaatattacatagtacatattattattgatcgtacatagcacatatcatgtcaaataactccagtcaacatgcatatcaccaccactagatcacgagcttaactaccatgccgcgtgaactcagcaacccgcttggcaggtatccctcttctcgctccgggcccataaatcgtgggggtttctattgatgaactttaacaggcatctggttcttacttcaggaccatctcacctaaaatcgcccactctttccccttaaataagacatctcgatggactaatgactaatcagcccatgctcacacataactgaggtttcatacatttggtattttttaatttttggggatgcttggactcagccatggccgtcaaaggccctaacacagtcataatcaattgtagctggacttcatggaactcatgatccggcacgactatcctatcaaggtgctattcagtcaatggttacgggacatatacgtgcgtatcacgtgcgtagcatcgtgcgtacacgtgctatacagcggggcgagctcg

SEQ ID NO: 156385 - DNA, 392 bp, Homo Sapiens
cttaaccttagaagttgtgggtttgttttttctaccggcattccttgcaaaggcccataagttccgtatctccttgatctggggtgccttgcacttgaggaaattattaactgcttttccatgggagtcagacagatgggttctaatcctgactctgcttccacttggcttcacgtcttgagcaatctgcatatgcctcctccctaggcctcctcctaatgagagttgatgattgtcctagtgtgggatcagcaggcgagtgacttcatgccagagaggagtgatctagtggtgatctgtggactgtttgtgacttacctgtgatgagtccagaggttgaaagatgtatttagaaactatagtctgacattgccacaacttctaaggttaag

SEQ ID NO: 156386 - DNA, 558 bp, Homo Sapiens
tagaggatcccccttaaccttagaagttgtggattccttcctgggaactgccatcactcgaaatgaagtcggaagcacagggccccaccagcctttctcctgtcacttgactctaacctggagtccaagtcaccagggccccaggacccaaaggtacacaaagcccacctggaccctcagccggtacttgccccaggccaccctcaggatccacggtccacagcaccactgctgttggctcaggctctgcctcccctgggcccacggcgggtccgtgggagccccccacgagctctgctgtcctcatttgagagtcctgtcctggctgccatggagggagggcccctggagcccctcctgctagtgctaaggagctcagaagccctgcccagcagggtccagatgggaagcagaggctcagagaggactgtaacctgctcagggacacacatgtcaggccagggtgagagctgggtgccttctactcatcctgatgaattgagcagaatcagccccccatttctccacacttctaagcaaaggggccgagctcgatta

SEQ ID NO: 156387 - DNA, 432 bp, Homo Sapiens
atcattttcttcttccgggagttaagtactttgtacttactcagagctttgaaggctcttggtctgtgttaacctaaattcctagtttagggacgagagggctggtgttataggtaggattagtgtcgataatacaattattgtgggaagtagttttatttgttttgtgtgttcgaattgtcattattatcaagcctagttggcttgaagttgagaaggctacgatttttttgatatcatttgtgtgtgattgcacactagtgctgtaaataaggtggtgatagctcctaggcatagtgttatagtttgccctagtttgttagtttctattaaggggtagaagcggatgacgtagaaatacccctgctactactattgtactggagtgtagtaatgctgactacgggagttgggccttactcctgaggcaat

SEQ ID NO: 156388 - DNA, 354 bp, Homo Sapiens
gcgccactgatgctgtcacctccttggcctgctcctctggctcactgactgggcttaagtccacagctggtggcgagggggctccgttgagcagttcctcaggttgggcagttggagcaatgggcacaggggattcggaggggcaagctgggggaggagcaagctctgggcttgactccacctctggttccagatcttcagatgggaccatgccattaggctcatgaatttccactgtgtgagatgccaaaggggtgggagcctggagaggactggaagaaaactcagattctggaaccggtttgctaagtgtcacttctacttccagtatgggttcggcgagaggagtggtgc

SEQ ID NO: 156389 - DNA, 210 bp, Homo Sapiens
cgctggtatcacaggtgttagccactgtgcctggcaaagctaggaattttcttacattaagtggaagtagtatctgcaggaagagaaagagcttacctgctttcagaatctacatcttagaatattagatgtgctcaaatgttgaacctgattcagtctgatggacaggttttaattccccttatgttaccattcagttgcaaattcaag

SEQ ID NO: 156390 - DNA, 326 bp, Homo Sapiens
gctctatgaggatcccccttgggttggaactgaatgggaaacaaaatcaattttttttctcatcaatgttataatgaaacaaagctgaaggaaacaacgttatgtgaggacttaccgtacacctttacatggttctgccaaaagagtctgacagagggatttagagactaaggctctatcaatacctagaactcctctaaatttctatcaatgacaccccagactccagtccttttaagttttccttcactttctggactctaccacaaatccatcagcaccaccatctcccaggttgatggcctccattcagttgcaaattcaag

SEQ ID NO: 156391 - DNA, 356 bp, Homo Sapiens
cgagctcggtaccccttgaatttgcaactgaatggtattgatcagatctaggtacaggtgtagattggatgcgtccttgtttagtctcttctatgtaacattttcttggacaggttgagcacttggtagtggatctgcaaggagggggtgccccctttagtctggaatcccctcttgattcctaggtttgctggcatttatccagataggggcagagtcttcctaaacggcttccctcctttggagtctgctgctccttgcatgccataacccagtcttgagaacctggctcaccttccattgctcccctctcccattcagttgcaaattcgagggggatcctcatagagcgcgca

SEQ ID NO: 156392 - DNA, 394 bp, Homo Sapiens
agaggatccccgatatgtattttttatttcccactgcttagtaatgaccttgactcattgctgtctcttggaaataaagattcattctgtctactgccaaagttgattaaagccaaaaatctggtacattacatacaatattttaaattatgtcaaaattattcatcaccacccaggcttacattcggatgggatcctaggagtagttggaattttccagagaagtggcatgtgtctgtggacgttcccatgtgttgaggacatgtttttgcattttggccttgatgttgcagagctgactggggccttggaagagtgggcactgcaggaaatggggacttctccagggtcaccaagcttgggtctataaagattggaaataaaaaatacatat

SEQ ID NO: 156393 - DNA, 343 bp, Homo Sapiens
cgatatgtattttttatttccacatcacatggtgaaagttctggatccaactggctgggtggcatcagctttggggccctctttctaagaatataagttaaggcttggcccagtggaattgggggaggattcagtttttagggtcgctagaagatgaggtcagacggagggagggagggccacccaaaagcacagtgtacatgctaaattttaagttggcaattctgttgggcaagggctggcataatttgtattgtatatatagtccagcacactattaatacaaaacagatattggataattgtgtgccccagttaactataggaaatttcttagggacat

SEQ ID NO: 156394 - DNA, 223 bp, Homo Sapiens
atcccccttgaatttgcaactgaatgggatgtattcaaaacatctacagagaaattagcaaattgtcacttggatcttgttagaaaattacaagaattaataaaggaagttcagaagtatggagaagaacaagtaaagtctcataaaaagactaaagaagaagttgcaggaactctggaagctgtccaaaccattcagttgcaaattcaagggggatcctcta

SEQ ID NO: 156395 - DNA, 257 bp, Homo Sapiens
aatggatactacgagtgtcggccccagataacgccgaacctggtgagtattcacaattccctacttaggctgcggcacgttcaagcaggcagacaatgacaccatcgactattccaacttcctcacagcagctgtctcaggtggcatcatcaagaggaggacagacctccgtattcacgtcagctgcagaatgcttcagaacacctgggtcgacaccatgtacattgctaatgacaccattcagttgcaaattcaag

SEQ ID NO: 156396 - DNA, 386 bp, Homo Sapiens
ttcgcagctcggtaccctgatttggattctgaagatggtagctcatgaggcggtggctgtactggtccgggaggctgaaggcacccacaatggtctcacaccagggtgcccgctcccagatgggcacggagcggatccaggatggatccccttccttcaggattaagcagatgatctcgatcatccaggtcgtgcctgacttggggtaggtgatgataaagatgtcgtcgtcccgcacatcttgggtgttctccgccaagctgatgctctcgagcgagtacaggccgacagggaaggggacgcccttgtaccggaagtattcacctggcaacttctggctgatttccgagatgtcatcttcagaatccaaatcaggggatcctcta

SEQ ID NO: 156397 - DNA, 431 bp, Homo Sapiens
ggatccccgatatgtattttttatttcctctttctgatggctaatagaaacctcagagcaaactatggatccctctttctagcacagtacaggatatggtgacttccccttgggacactaaccttactcctggtttgatctttttctagcctatcctctttttctcctccttctcagtcccttttattttatcttgaaaaattgtttatatctttatcatcacctaccccaagtcaggcacgacctggatgatcgagatcatctgcttaatcctgaaggaaggggatccatcctggatccgctccgtgcccatctgggagcgggcaccctggtgtgagaccattgtgggtgccttcagcctcccggaccagtacagccaccgcctcatgagctcccatcttcagaatccaaatcagggtccgagccgaatg

SEQ ID NO: 156398 - DNA, 271 bp, Homo Sapiens
atcccccttgaatttgcaactgaatggaatgcagccccagctagttagggggccccgggctgagacctctggcactggcagtagacttatacaggcaaagaagccaaaacaatgagctcatgggcaagaatgcagcctgtggggaagtctgggcagctagagcaaactggttttttgaatcaggatgggaatagcaatagttgagtctcccacgggaacaggatcagggagagtggaagccaccattcagttgcaaattcaaggggtcgga

SEQ ID NO: 156399 - DNA, 357 bp, Homo Sapiens
ccccatccttatgggtcgcccactctagttcgcctcattacatcctggcccactctgcgccatctatcacttccagaaggtggctggcaaatctctctatccttaactttgttttgaatggtccatccatctcctgactttatttgaaacctgattattccctgaggacattgattgtcttataagccttttaaatagaggctgcttttccaccctcacccttcattcttctaaccagccctgacattctcatgagtaaccttctgccttcacttccctgttgtgtagcatcaattccgtagtccaccaggaaacactcagactcccgccattcagttcccacccaaggtggatcct

SEQ ID NO: 156400 - DNA, 250 bp, Homo Sapiens
ggcctatctataggcactgttagccatatctttcttcttgatggtctctccttcctaggtttcacttgattctcctgcatctgccttccctgactcttcttccatcccttactgacagtgtttaccaaggatttcccttggcctgcttctttctttgacgctcatttaaacctttcccttcatgttgcagacctcgtgtgcttctcccagctattccattcagttcaaattcaaggggtaccgagcttcg

SEQ ID NO: 156401 - DNA, 440 bp, Homo Sapiens
tcctgttttgaaaaaggaacggagaagaagcaaaacagggtggtgttttgattatttaccaaaatatataatggatgcatatattgtaaaggatgaggcaatgccacgtcgacttctatcggctctactccaataagcaggcaacgctccctcagcagttgctagctttgctgcgggctttccctgttcccctgcaccagtgcgaaaagcagagtgtgccaatcggctggcgtctgtaccctgtgggaaaagttaactgtaattcttcggcttttaaaatcaattaacccgagtgttaattaacgtcaagtcgacgggaggaggagcagaagaatcggatggaggccgcaaagaaaaaaagctgcaagggcggatggcagaagagtctggcacggtgccatccattcagttgccaatccgagggggatcctcatagagca

SEQ ID NO: 156402 - DNA, 309 bp, Homo Sapiens
tgtaattattatgtttattcctatgagaataattgtgatgttggatcatgaaaatgatgctgtaatgataaataattctccgattagattgatggatggggtggaagctgtccctgtgagtatggagtgtctgaaggcttcacatcgtcaaggatgtggaattccagccaagccttggagtatgacgatggtttgggaagccagagagggtcctcatgtgaatatctgtgcctcgttccactcctttcagatggattcggtctcctctgggtgtcttctctctctgtttatccattcagttgcaaatta

SEQ ID NO: 156403 - DNA, 440 bp, Homo Sapiens
gacccctttaatttgcaactgaatggtatcaggagagggccaggctctgtgtggccggggaaggaggatggagtcccagtggttgcccagtacactgtggaggtcccaggagtactggtggtgggcacagagttctgatgggtgaaaccattgacatagagactgtccctgtccaggctgtaggggcccagctcagtgatgttgtgggtcagctggcttagctcccagtacagctgctctctgtccagcccaggtcttttgggattagggtggtagaggcagacagcatccgaagcagttgccggccgcatccgaagcagttgccgaccgcatccgaagcagttgccgaccgcatccgaagcagttgccgaccgcatccgaagcagttgccgaccgcatccgaagcagttgccgaccgcatccgaagcagttgccgaccg

SEQ ID NO: 156404 - DNA, 196 bp, Homo Sapiens
gcagctcgtaccctgttttggattctgaagatgaagatgcagaggactcttctgctaacatcatcacatgacttggtctaccagggtgccagcctccaggcccagacagaccggactggtgagatggccctgcaccttgcagcccgctactcacgggctgatgctgccaagcgtctcctggatgcaggtgcagatg

SEQ ID NO: 156405 - DNA, 381 bp, Homo Sapiens
attataaaggtttggattgaatcgcacgctatgggcaccagttgtctctagattctcaagagggggtgaactgggataatcttgaggaaaatacgcatcaagctcaaagcagccatttgcataaggggtgtccgctggaccagttattagaaccttcatgatatcaagtcgctcctcatcgcagcgtacaaacacactagaggatgaagacagaggcagtgaggttgaaagtgtcacagcttcctgggcaaggcggcgagctctggcagcactgttcgcatcattagcatttttcacctgagacatgtagtggtaatttactttaaatcccaattttccatcttcatcttcagaatccaaatcagggtacgagctgcgagt

SEQ ID NO: 156406 - DNA, 346 bp, Homo Sapiens
cgtaccctgttttggattctgaagatttatctgagagaatatgtgtttttatgtatttagaatttgagagttataaattgcttccttttctagtaatcctgaaatttcttcttcagagattgaactcaatattctgagattgaatctcagaatattagaattgagttggctgtcatttaaagcagaggaagctgtggaactcacataaaggaagtgatttgcccagggtcaaggagcgataaactagtatcacagatcttctaactcccagttcagtgcttttttcactgcactagtggctttccaattttttcatcttcagaatccaaatcaggggatcctctag

SEQ ID NO: 156407 - DNA, 435 bp, Homo Sapiens
gctcggtacccgatatgtattttttatttccctatattatagtttaacatgattttgaaggtttgcctggaaatctaaccatcaaaactttatttctacagacaaaacaagtgtgtttctgcatttctgggatgaggctgcaaaggttcctggtagcatgaggcatgagtcagatactcctatcctgggaactgcctaggatattttaagagaaatatacagaattggaccttgtcaaaacctcttccttgtcagtcatcagtacagtaatatacactgggagacttcagagaaaacctagatttattaacagttatcctcgatggctgtttgaattatatttaaataacaatctagtagagccaaagaaagtgccttaattcaatgatcttttgtaaaggaaataaaaaatacatatcgggtacgagcttgcta

SEQ ID NO: 156408 - DNA, 342 bp, Homo Sapiens
agctcgtaccctgatttggattctgaagatgtgcggtaacgagaaacatctgatacaaatagtcatacacctcttgaagctcaaggatgtgcctttctgattcttcttcgggctcactcagcaactctgcggcttcctggtcctccttaggctcactcagcggctctgcggcttcccgccagaagagctggaagatgtggctgtctctgagcaagtctatcttcccagccatttcttggacctgggagctcaggtggtaatgcgttgccctctgcgagttcgaggaggtggacagtctcactgtcatggtgtcatttaatcttttactgctgaggtcttgga

SEQ ID NO: 156409 - DNA, 263 bp, Homo Sapiens
agttcatatatcacaatggaagaaaatgccaaatttcagtcagaactcagcgtctattttgttcccatccaagcttacggactgccagagcatagacgtggaaggaggatgacaggatgccatcagtgaacagcggtcataggacttgctcgtcccaacgctgattctattaccgggtgtaagacctcagacagaaggaaagaggaccacaaaacaaaaacaacttcgatcacatgctaagtatccgttaggggactgtacca

SEQ ID NO: 156410 - DNA, 363 bp, Homo Sapiens
cattttatctgaaggctgccctctcagaaaacgagcaactgaagaaagaaaatggaacactgaagcggcagctggatgaagttgtgtcagagaaccagaggcttaaagtccttagtccatagcgaagagttgtctgtgtgatgatagtattggcatttataatactgaactatggatctctatgagcatgttggtacaggattccaggagaatgaaccctagtgtgagccctgcatatatcataaggaggcaccttctaggattttgtgtataagaggcatcaggacacatgcatgatggtattatcctgttgtatcagctactagagatgatcattctgtttctattacttgtctttgatgg

SEQ ID NO: 156411 - DNA, 192 bp, Homo Sapiens
cttatactagagctgactggagacgagcctcggctaccagggaaattcgagctgggcacattctggtccaggccagcttccccacgcaatgccagcagcaggcggcgcgggtgtgcgaaaggctgacaggtggaagacgcgctctggtacatcactgctcgcgtccgcgcccacgcccaagtaatgaaccaa

SEQ ID NO: 156412 - DNA, 869 bp, Homo Sapiens
  misc_feature (664)..(796): n is a, c, g, or t
tcaaaactctgtggaatgaggcaacaactgtccactgttaccctttgctgggcaccccacatgcctgctaggctctcgctgcccacacgaaaccttacatcttcctcggatggcatcagtagcctcccttacagacactgcacgccccagcaattgaggaaccagcgtggccacagcgggctgagggcatggtggggctagagcaagactgcctcacaccctcgactgtgcagccaccctccacctcccctcttccattcttaaaagtaggcaagcgtgatcataagtgaaccagacacacaatgcgagcctctagaaaaagagtaacacaacaaaatccaaggcatgccggaggaaaagattaatgaaacaaaagtagaaataaattataaaatgaaagcagaactgcttactttatctaaagctgctttttttcaaaaggccaataaaataaatttcttgaaagtcttattaaaaacgaaaaactaggaataaaaagtgaaaaactatgcataaggaggatatcaaaatataaaatgctactctacactaatacatataaaaaaggtaattaagataatataactttgaaaaactgacttataatgaaatagaaatatttaatagcccagtaaccctggaagaacctgaaaaagttttcaannnnnnnnnnnnnnnnnnnnnnnnnnnnnnnnnnnnnnnnnnnnnnnnnnnnnnnnnnnnnnnnnnnnnnnnnnnnnnnnnnnnnnnnnnnnnnnnnnnnnnnnnnnnnnnnnnnnnnnnnnnnnnnnnnnnncaaataaaagttttcagaaccactgaagctcctaaaagaaggccagccccagctggtgttacaagaccctccg

SEQ ID NO: 156413 - DNA, 194 bp, Homo Sapiens
caaagatgatgtttgttgaatggatgtctggagagagacagcagccagaggtcagcagctttgctcctgcctctccagggtccacccttactgggcagtaccatccaaccatccatgcccagctcatagagggcactcaccaaatatcagctgctatttcctgagtgccctctatgagctgggcatggatggtt

SEQ ID NO: 156414 - DNA, 297 bp, Homo Sapiens
tcatcttcagcgggaccctctttatcttctggaaggagctctccctctactactgacggccatccttcagccttccttgtaggaaatgaccttcactctgggtttaactggagtggcatcacctcccagggagacagttacttcctgtaggaagtggtgttccctccacccataggtgccctgcccccatcctcatggtggcagcaaatcagcatgtgctccgcgagaccctggggtagcagccgctgtcctcacacctggaggaagctgtgtgtgcgattcattagcgtttgccgg

SEQ ID NO: 156415 - DNA, 247 bp, Homo Sapiens
ctagaggatcccccagcggcagacgatgcgatcgtctcacctttggcccagaacacaccttcccctgggtcactggaaccaattttattgaggacagtggagtgtatcactcatgaaatggccctgtgtatgatctagacccactgagcaagggcagggaccaaacccgcaacctcatggttcctagtcggatttgttaaccactgcgccacgacgggaactcccatcgtctgccgctggggtccag

SEQ ID NO: 156416 - DNA, 637 bp, Homo Sapiens
atccccggatcattttcttcttccggatggtcctactggaccgactcccagcgcacaggccacagatcagtttccaccccgccgcccactctccctctcttccgagtatatttagggccagcaacaggtccagcttaaagacatttccaagctgctggaagccaggcatgatgacatgatcaatatccgggcctgagatgtaagcaccagtgttgtgttgaactccaggaaacctctaagagaaagctgccctgctggggactgagcttctccggcggtcctgcggttccctctcctccacgctgtgactcatccatgacagccatcgacggtcaggtcacggaggtcacacccaagcacacacgagtgaaccacagaaggctgtcctggatgccaagcagtcactaattctgccctagtctgctgaccttctatgtggaaaagaagtgcacttctgtatagttcaggcctcctggtctctttcatattcttgatacggtgaggagtacgtcctaccgctgtttacctccagattctggtgcagccttgtgtatttatcgcagcactagtcacaacagcaaagtcatggaatcaacctaagtgcccatcacggatgaccggagtagcaaatgatccc

SEQ ID NO: 156417 - DNA, 305 bp, Homo Sapiens
atcattttcttcttccggtgggaaaggcctctcctggctgtggtgagaggggctggtctggaagtttctgtccaggtgggaaaggcctctcctggctgtggtgtgtgaggggcttgtccggaagtttccaggcgggaaaggcctctcctgtctgtagtgagagggctggtctggaagtttctctccaggctggaaaggcttcatcttggctgtggtgtgaggggctggtctggaagtttctggatgctctcagcatctatcagaggagagcatggtgcccccatacatctctccgcacgagcagg

SEQ ID NO: 156418 - DNA, 363 bp, Homo Sapiens
ctatagctcgtccggaatcattttcttcttccggtgggaaaggcctctcctggctgtggtgagaggggatggtctggaaatttctctccaggtgagaaaggcccctcttggctgtggtatgaggggctggtctggaagtttctctccaggtgggaaaggcccctcctggctgtggtgtgtgaagggctggtctggaagcttctctccagatgggaaaggcctcttctgggtgtggtgagagggctggtctggaagtttctggatgctctcagcatctatcagggagagcaggtgcccccatgacatctctctgcacgggcagggtgtctactgtccggaagaagaaaatattccggaccgcta

SEQ ID NO: 156419 - DNA, 377 bp, Homo Sapiens
cacacacaaaaaccattattcaagaatacatctactttgattactttagatgctttacttaaggggatgtattcctccctgtgctgtgtgtactttgggtgggagaaagctgaagcttcagaaactttaaatgtcagggaatagccctaagtctggcagagcagcgtgcaaataagatggagaatcctctagaatcataggaacctatcacagaagtgtgatctcctattgctaatctgaccagcaaattacacaggcatatgggaaatctatcttctaggaagccaagctaaaagagcatggaaaaccatgagaatgaagcagagataccaagagcagcatgccccatgggagcaatactgcagtttgatccgcat

SEQ ID NO: 156420 - DNA, 177 bp, Homo Sapiens
gcttacatgggcatccttcagctttttataaactgccagcatctatttgtaaatgttttgttgcaatttttacatatatctgtttgagatactggtttatagttttcttgttgatatctgcttttggtatcatggtaatgtgacctcataagttgataaatgttatatgccggagaa

SEQ ID NO: 156421 - DNA, 304 bp, Homo Sapiens
atcattttcttcttccggaaacaggtcagagaggctcagaaaggtcctcttccaaatgggcacaattcagatctgactccacggctggaatagttcacaagggtcagctaagccagcaaggggcaactagtcacgaacacttattaggtgcaaagagcagtgctggggatgagacttgcagggtatctccagcaagggactatttcacataattgggaccaaagctcctacaatggagggaatggaggagggtgtgcaggggacttatctagtgggggaggaaggcttcccggaagaagcaaac

SEQ ID NO: 156422 - DNA, 302 bp, Homo Sapiens
atcattttcttcttccggaaacaggtcagagaggctcagaaaggtcctcttccaaatgggcacaattcagatctgactccacggctggaatagttcacaagggtcagctaagccagcaaggggcaactagtcacgaacacttattaggtgcaaagagcagtgctggggatgagacttgcagggtatctccagcaagggactgtttcacataaattgggaccaaagctcctacaatggaggaggtgtgcagggactctctagtgggggaggaaggctcccggaagaagaaatgatccgaccgc

SEQ ID NO: 156423 - DNA, 645 bp, Homo Sapiens
tggcgtcttggagcctaagtggaaagggtaagccatagagtcatatagggctttcacctataatataacttcgacaaagttatgtaatattttactaatacttcgattatcgagaaagacatagtggttatgacgttggcttgaaaccagtgggagagggttcgattccttcctttcttatgcttattttaggttgatatatgttggttcttcaaatgtgtgatagggaggaggacatccgtgtagtcattctaggtttgtgcttgtcagttctactgcagatacttctcgttttgatgcaaatgcttctcagataatgaagattattaatatcactgctgttagtgagatgaatgagcctattgaggaaatagtatttcatgctgtgtatgcgtcaggataatcggagtatcgtcgaggtattccggatagtcctagaaagtgttgtggaaagaatgttgtatttactcctacgaatataattacaaagtgaatttttgctcatgcttggttgagtgtgtacccggagtatagggggaatcagtgaacgaagccccctatcacatggcttacctgctcctatagactaagacatagtggaagtccgcgactacactaatatgtatcatgtaatactatcttatg

SEQ ID NO: 156424 - DNA, 604 bp, Homo Sapiens
cttagaggatcccggagtatatccgaacaggatatccagcaccgcttgaggcaggatcaaaccgtaagccactaccaccagcaagtcgggcttcaacgccgccagttccgcctgggcatcggcgttgcgcagggttggcggttgcagcacagggatgttgtgttcaagcgccaactgcttgaccgggcttggcatcagtttttgcccgcgaccggccgggcgatccggctgggtgtacaccgccacgatgtcataagggctgaaaagcagggagaggaggcagacacaggggcaccaaggcagcagagaggcacgggttcctctgaggttccagtttctcagtccaggatgggccgtgccaggtacagctcggccaggtgggtgtgtactaggcggccacccctgggcagcgctgtctggctcaagctggcctctcccaccaggcccagagtttgtggccagtagaggaacagcttcagagggcgaaggcgcccgagcagatgcgagtgtagactgcctcatttaagggcaggtagtggccctgcttcaggtccaggaagatagagccggtctgaggtctggcgtgggtcaagccctcttcctc

SEQ ID NO: 156425 - DNA, 161 bp, Homo Sapiens
cactcttccaactctttatcggatgagaaggcgtagaatcatatcattcctgctaatcggatgatgacacggacagaacagacgccaacacagctgcactacaagcaatcctatacaagcgcatcggagacattggatttgtcccctgttcggtttatact

SEQ ID NO: 156426 - DNA, 733 bp, Homo Sapiens
cctaggtatatgtcgtgccagtgaagaacagaacctcggaaataataaataaaattataccgtatcgtaagcctttttggacaactgatgtgtggtggccttggaaagtgctctctcgaataatgtctcgtcaccattggtatattgtcaaagtattggttaatagtcctagagatagtaagagtatagagttaaagtggaatcatatagttaggcctgatgttattaaaggggctgatagggctccggtaagtggtcatgggcttgcatttactatgtggtatgcatgtgtttggtgggtcattatgtattgtcgtgtaggtataagcttactagcagtgtaaacacataagcttggatcagagctactgcaaattcaagaatagttaatagactgaggatagtaaatgtgatagaagctgttatagtgttgatgttgagtagtgctaatgtggcccctccaattagatgaattaataggtgccctcctgtaatgttggctgtcagtcgtacggctagggctactggttgaataaataggctaatagtttcaataattacgagcataggaattaatagggcgggtgttccttgtggtagaaagtgggctagtgatgttttggttttatgttcgcgcatcctgtgaatacggttgctgatacatagggggaattgctataacccagttttacttgatatattgtgtgctgccgtgaatgcagtatgtagttga

SEQ ID NO: 156427 - DNA, 199 bp, Homo Sapiens
agctcgaccccttacctttgacgcgggggacttcctatgtgatcctctccagcagcctgtccttcatccgtgtgtagtaagagatggcgtcttccgactcacagcccagcacttcacagcagcaaaactggccacagggcttggggttgatgagggtccgctggcctgtcttcacctgcaggtttgtgtaataggtcag

SEQ ID NO: 156428 - DNA, 625 bp, Homo Sapiens
ctcgcaccccctagtatatgtcgtgcttcatggccttattcaatcaagcactctattcttgatttactgctaaatcctcctttggtttttagtttcataaaaactttcgtatggtgggtattcttatgtagaaaatgtagcccatttctttccaacccataagctacaccttgacctaacgtttttatgtgttatgattgtgcttactattgttcctttttagggtttgctgaagatggcggtatataggctgaattggcaagggttggtaaggtctatcggggtttatcgattatagaacaggctcctctaggtggatgtgaagcaccgccaagtcctttgagttttaggcagttgcgagtagtactctggcgaatagttttgttatgtaactatttgggtttagggctaggcatagtggggtatctaatcccagtttgggtcctagctatcgtgtgtcaggattattagagtcactttcgtgggttattttattttaactagggctttttacagcttagttataatttaactctattgtggttttttttcttaaacactctctacgccgtggatctattaatttgggttaatcgtatgaccgcggtggctggcacgacatata

SEQ ID NO: 156429 - DNA, 483 bp, Homo Sapiens
aacaaccatagccatatgtcgtgccatcctgcttcgtcccacctgggataggaatcatcccttggtccagtgtatccacgcccctatgctacccacccactagtgtcgtggttatcagatctaaaaatcatagtatatgtagggttcagtactatccatggtttcacgcatccactgggaggctgggaatgtaaccccacagattaagcaggacactatattgccaaatccaaaggatactttttggttctcctcttcttgacttctcggtgatatcaaccaactgactgcttcatgagcgagactcttccagccgtctctgacccatgctgccctactgctgcttcttagcctgcctattatgcaatcttttctattcagcctctcactgttgattttttcccagaccttgaccctggacgtcttctctctctgtgttctctgactggactctgccttccccatctgcagcacgacatatac

SEQ ID NO: 156430 - DNA, 382 bp, Homo Sapiens
aaatcttttttagggatggtaagagtttctagcagagcttgagtcctgtaattcttactgcctggtactatgggaagctgaaaggcagagacatctttcttgccaaggctgccagctgaagcttcaaggtcagtgtgccagcccatccctgtgtcccacaagtgcccacacgcacctgccacgtgcagccagaggtaccggagcagtactgaaagcaatcatggtttaagctttcaaatccaagtaagtgcttctgcattatggcaactgtcactcatgatcctgactgcaaaggcagagtcggagtgttttcggactcattcttggttgtgaagtcacagttaatgtgggagccaccaaagtggcacgacatatcctaggg

SEQ ID NO: 156431 - DNA, 481 bp, Homo Sapiens
tggtggtggatctttctaacactgaattcctttgtctgcaggatgcagtgaaaggggattgccagtcaaccctcctggccttgtgcagggctgaagacatgtgagacttccctgccccaccccacatgacatccgaggatctgagatttccgtgtttggctgaacctgggagaccagctgggcctccaagtaggataacccctcactgagcaccacattctctagcttcttgttgaggctggaactgtttctttaaaatcccttaattttcccatctcaaaattatatctgtacctgggtcatccagctccttcttgggtgtggggaaatgagttttctttgatagtttctgcctcactcatccctcctgtaccctggccagaacatctcactgctactcgaattcttttggcaaacttcgctgttgtttgtgttccctgattgaaggttgggtggagcacgacatatggctaggggggtt

SEQ ID NO: 156432 - DNA, 392 bp, Homo Sapiens
tctaggtatatgtcgtgccattgcactccagcctgggtgacagggcaagactctatctctaaaaaagaaaatcagaagaataaattctaatgacttacacatattcttttgacagcaagaagaacttttagtaaatacattccttacaaacaaacagaaggcaaataaacactgttgtacaggaacttcaacacacactgtacaatattcccactttgctgatgtcagttatggaaattcttcatggtttacttgactatcgctatcagtattttgcatctctcatcatttttgtcaacttcctcatctgctaacttctctccaaggtatgtcatattgtgacatactgctgctgcacgacatatgcctaggtggatcatctagagtcgctc

SEQ ID NO: 156433 - DNA, 467 bp, Homo Sapiens
  misc_feature (386)..(386): n is a, c, g, or t
gtggggtcctctaagccctccacttacggcaactcttgatgtcatgtgggcttgctgactagtggagagcggctctattgaaaccaggtgattccaccaggttgctgctatgatgaggccataaactattatccgtctagtagggaattttctttaaaaatttgaaattgtttaaggaaggtcttaaaattcatccgtagtttattattatatttttaactttggtgtggcaacgttacccgtagaatctgcgagcctaataagaagatccgtagaatctgcgagcctaatgagaagatccttctaagtcatgaagtcttgggggtaatctgttgcacagcaatagtgacgggaacagatgagctctctctggttggctgtctcgngaacacctgagcttcaacaagtccagcgtggggcccagaactatctcttctagtccagcctgatggctttgcacgacatat

SEQ ID NO: 156434 - DNA, 487 bp, Homo Sapiens
gccgactctagttgatcccccctaggtatatgtcgtgccagggaatcagagcaggccctttgttcctcggtttagagcataacataaaagcaattgatctcttcaatcttctgattttttacagaaaacaaaattagttaatccttgtaactattttagttagtttagttttaaatcctttgattggctcagaactttagtcatctgtgaagtaagatatgtgctttcagcaggaggcagtccgggtacagagggtggcatgcagtctcatatgtgcaaaaggaacttcatggttagaagccccttgctgattggcttttcagtggctagagttattttctgagttaggttagagatgaaaagatctacgtaaaatcattcagttgctgtaaagcgttcaatcgctctagaatgaaggttggaaggagagattaccatattaagttgactcagcccgtcatatcgctagcggggatcaactagagtc

SEQ ID NO: 156435 - DNA, 545 bp, Homo Sapiens
agacgtaccccctaggatatgtcgtgctgagtccatgatatgccactgcctcctcctacatccagagacttcagaagctcgcaggaatgcaaaggtcggcatgataaagagaaggttccacagagagcgacaagtcatcaacccaccatgcctgcctgagaggagcagcaggaccgctgtaaggtttcttgtttctgtctgcagcatggggggggctccactgcctgaccctaccagctactagatgccattcaggtgaggcttaaggaggctcctgggctgagccaggctgtacaccaccctccctgtcccatgggacatctgctcagcaccacacaacagcgaccaagcaagggagatccaaacacaggtccttccaagcaaccttccacctcttccttccatcctctcttcggttcccagcagctccctccacagatccagggaaagaaggaggaagaagtgtgcgttaggacctgggatttggggtctcacgtgtatccctccacagctcacgacatatgctagggtggatcaactagagt

SEQ ID NO: 156436 - DNA, 386 bp, Homo Sapiens
cgggccagtcggatgtgctgggtattgaagctgggttgtgctacttgtacggggcatgaggttgtgctggtctgtgtagtgtcggttatgctgcttgtcaccaaaggtggttgtcctggattcctgccaagaggaggtgctctgagttgggctggtggctctcccactaggggtgctaggagctgtcacaggtgtgtaggtcacggggcaggctttgggggtctcgcagcatagcacacgcacctcgtagttgaggcacatcttgacgggtccctgctggtcctggttccggcccaccaggccctcttcgtggctgcactgcaccacctggcgcatgtgttcgatgctcgtctccgggtggctctcggctcggcactcgagcctgg

SEQ ID NO: 156437 - DNA, 254 bp, Homo Sapiens
aggatcccccctaggtatatgtcgtgcaagtgtgtacgtaggtgcctgtgtgctgtgtatatcagtgagggtgaaatgggtattttcttcctgttccccagggagtggggggccccgaggaaattcgggtcatgccggagatgaagaagctacactgtcacggacgtccgggtgggtcgcgtgtctgagaccccacacaggaaggagctggaagccttgggtgaggaggctacagctccaggagctcctgcctg

SEQ ID NO: 156438 - DNA, 377 bp, Homo Sapiens
acctggacctgagtgtgtgtgtggaccggaggggttctgtgggccagagacaaggggatgtcaccactaacaccagctaggccaggtgtggcctgagataggggaacgccaccagtatccccactagtccaggggtgcctgagccagagaaaagggacgccacctctaactccggcctgggcgtgaggatgactgacagttagaaccaaaggcagatctcttctcccttatgctacccgaggcatcaatcttataatgaagaatcgtgccgaagctcatgccgcagccgcgtgcctatcgctcagacagttctcagtgtgtgcatctcacaccgcctcccccgttcggtaccgagctcgattcgatcatgtcagcgc

SEQ ID NO: 156439 - DNA, 380 bp, Homo Sapiens
gccctaggatatgtcgtgcaaaagaaatagcaaattaccgtagaaacaaaatagtaagagcacagctagatggataaagatacagatgtgaaaatatagatgccctttgcatgaaaattcagttttcctcagcactagagacccagatactcctgaattagcattataataaagtcgtcactagctagccatctgcctttcctccaatccacggacgtggtcctcaaaataacattttatcttgtgagaagccttcattaattacacctaacaacaccatgacgcaggttcatgaggatactactgaaggcaaaaggaaatccctatttctctgaccctttccctaatttccacttagcacgggggatcaactagagtcg

SEQ ID NO: 156440 - DNA, 379 bp, Homo Sapiens
gactctagttgatccactaggtctatgtcgtgcggaggaatgcttgctgttataatagggagtgagatgtgtcatatacatagagctagtgttaggggcaggaagctttttcatagtaaatgtattagttggtcgtatcggaatcgtgggtatgatgctcggattcataggaaggtgattgttaatgcgagtgtttttagtacgaagttgattgtatatagctctggcgtgtgtggctcgagggatgctcctaggaagagaattgctgtgaatgcatttattatgatgatgttggcatattctgctatgaagaatatggcgaaaggtccggctgcatattctacgttaaagcctgatacaagttctgactctccttctg

SEQ ID NO: 156441 - DNA, 439 bp, Homo Sapiens
acaatccctttgctcattaaaagctgatttgttctggtggaaagtgtgctgagctgaaagtgaggagacttgggttctctagctccatcactgatcctccacatgatcttgagaactcgaagagaggtttctccgttggtaccatgagttgaactagattgattgattgattcatgtaacatttgttgaatgcctgttatggaccaggtattgtgctcagtctttaacctgcagaagtaagatagagtctttgcactaaactaggtcccatttcattgggggatcagtgaagtaacaggtaatgaaaatagagatgcgcgcagagttttatggggccagagaacagattcccccccgtctgaagaaggaggttgatggtgaggggtgcttcccagaggagatgattaatgctttatttgaggaggcaagttatgttata

SEQ ID NO: 156442 - DNA, 424 bp, Homo Sapiens
tataacataacttggttcctcaccaaaaaacaaacaactaagcgaacaaactgtaacatgcatggcattaaatcatgaaaagttcacattagtcaaacaggttgttctttatgatccttgcccaggaatgaccaatacccatcccatctcaagtaaaacctctttcttgatcctgacagaatccagtcaaaagcttaaattgtgactgcgtgaggggtgatgccctttgaagttcctattcccagtagacctcattgagacagtccctgcaagagctctcacaatcagtttcttgcttaccctatttcccctcttctaagaactctcttcccagaaaccaaaagattccaggtttcctcttttcaggcgcattctctacctctcactggaaccaagttatgttatacgtgtatcctctagagtc

SEQ ID NO: 156443 - DNA, 360 bp, Homo Sapiens
agtgttattttgaatctcctctccctgagagaatggcagagaaaatttctgttgtgaatattcaaagaccaggattaaagatgcttcaggagttcctgttgtaagtgtaatgtcttaagctgcaactagcacacaatggtccaggttttgatggttttggttaaggagttacttgggtcacgggactttgaggctgtttgttttgcaagggctgcaagttcccagagaaggagctaggtccaggccacagtgaagaagcctgcctctgcctctactggctgttggacaacaacagtgtctgtagggtttgctcttggcagtcatggaaccaagttatgttataccggggataatctagag

SEQ ID NO: 156444 - DNA, 676 bp, Homo Sapiens
gtttttcagggttctcaatggttacaagatagatcataagttgctgctgacaggaaccccattgcagaataatctggaggagctcttccatctcctgaacttcctcaccccagagagatttaacaacttggagggcttcctggaggagtttgctgacgtatccaaagagggccagatcaagaagctgcatgatttgctggggccacacatgctgcggagactcaaggcagatgtctttaagaacatgccagccaagacagagctcatcgttcgggtggagctaagccccatgcagaagaaatactacaaatacatcctgactcgaaattttgaggccttgaattcacgaggtggtgggaaccaggtgtcgctgcttaatatcatgatggatcttaagaagtgctgcaaccatccatacctttttcccgtggctgctatggagtcccccaaactccccagtggggcttatgagggtggggcacttattaagtcgtctgggaagctcatgctgctccagaagatgctgcgaaagctgaaggagcaaggacaccgagtgctcatcttctcgcagatgaccaaaatgttagacttgcttgaggacttcttagactatgaaggctacaagtatgagcgcatcgatggtgggaagtcttgctgtggaaggaccgagctgata

SEQ ID NO: 156445 - DNA, 404 bp, Homo Sapiens
tataacataacttggttcctacccctaaagaccctgtgagctggagagcaaggtgcttacttgtggaagcatagctggtagcaggacaggtgcaggtgagtggttcagatgccaggtgccagtgaatcagagaccacttagagctcagtctcattggtctggggatgttgccaagcaggaaacaagatttgaacataaacctccagaaaactgaatagccttcccaggactaaagaggggagcatggtaggcatagtcaggtgtgggggctgccttgttcaggacagtgggcggtgaggacacaggtgtggctagagttgacagttaccttaatttgaacaagcaaactttctactagaaataaatggaaccaagttatgttatccggggtccctggagcggct

SEQ ID NO: 156446 - DNA, 392 bp, Homo Sapiens
cgatatttgtggttctggctgcctgacagatgcccacaagactctaagaaaattattaactgcttcaagccttagatttgtcatctgtaacatgaaatgctgatatctatctcccaccattactgagaggattgggtgggtggatatatgtcaatgatctggaacttcacatacccagagctctaaaagggctcattcttcacgtaatttcataatggcagaattttcataccagcggcatttcctgaaagtgaaagatcattttgaagtgtgagacactctgagacttgttaaattatgtgacactagtacagcctttctccgaatatgtaatttgtcactagcattcatttttagcttgccagaaccacagatatcggggtaccgagctg

SEQ ID NO: 156447 - DNA, 358 bp, Homo Sapiens
ccaccatgagtactcccacgctgagcttttagcttagtcctttgcacaagctgctcttctgcctgaaggctgctgtctctgcctgttgttagaaagatagacttccttcacatctagacttcgatcctttactgtttccttgaggattctggaaaggggaaggggtgaggtaggttctcccacagtcctgttcagtgattatcaggacaacccctcggtagtagcagaattgagggtagcagttagggtcctgaacaccctgaaaatataaatccctccagaaaatttcctccctttatacttgacagcttaggaagggcgtgcatatgaggagagtgtgtcgtctttggatcattaa

SEQ ID NO: 156448 - DNA, 516 bp, Homo Sapiens
cgcgccagtacggatgtggaagctgagcgcgtggtggagttttcctgtggtgagaagctgtgcccaggttggggcaggctagaggtcaggttctggcccccgttttctgtgggtaatacctcatactgcgaccaggcacaggggcggaggagaccccggggtgggagcctcacccttcgtgcgctcgcccaggctctcctgctttgctgcctgctgcgtgctgcccagtgtgactggtgatggtggcgtgggtgagcgctgtcagtcgctgttcctgtgctggatgatggggcaggtaaatgccctctctgcagtgtcttgcagcacacctgcatctccagttttcggcccctcactggctcttaacaggtcacgtgatcactccagacaacatattgcaacctgtcatcagcatcagggtcaccaaccacccgctagagtacacgttccagaaaagagaccttcatcagatggtcagtcccagacagctcgctgcacctcaccagaccacaaata

SEQ ID NO: 156449 - DNA, 348 bp, Homo Sapiens
caccccgatatttgtggttctggcctaagcataacagttccttttcctacagggtaaatatttaccgcttagttacaaaggggactgtggaggaggagatcatagaacgggccacaaagaagatggtattagatcatctggtgattcagcgcatggacacccctggccgggcgatcctggaaatcaactcaggaaggtccaagtaagtgccaggaagattgggaggtaggcagaatcaaattgattctacatcactgttggatataataggattttctaccacagacattagtctgctcattacctggaagatgccaggccagaaccacatatatcggaggatcctct

SEQ ID NO: 156450 - DNA, 731 bp, Homo Sapiens
cgctgagcagctggcagcgtgggcggtgctctgaagaattctggtctgccgcgacggcctttgctattggctcctgcccgggttttgctgctgttactggtccctttgctgtcagaggctgtggctgtctcattgacaggtgtattactgttgggacgcatgcgtttgcctctaccccggccattgcgcatttccaggtcactggtcggggagtcacaggaccttgggggtgcccaatcatgtcgtgtgcagtcaaggagtgtacctacatatgtcttgttcctccacgttacatttaccaccaacatcccatcttctgtttcctgccacacgatgccttcaaggttgacgctagttccaggttcacaggggcccaagcactcaggctctgtggccagagccacatcacatgtgttgaccccaactgatcgggtacgaaccatgatctgctcacaaggagatgagatgtcattgttgaccactggcaccaaaaggtgtattggcagcactgctggtgtggaaacaggggactccatcttttcaacttgactttctttagcaggcgacactcattctccccttcctctggctccggtttagttcccaaaggattgagcgctgccccaggctcaatagctatactcccaagtggctccacaactcctgtatccacccctgcacttccatcatactgaccaccccgtcctcccaagggaactggcaggagccag

SEQ ID NO: 156451 - DNA, 448 bp, Homo Sapiens
tagctgtggggtcagttaccccaagtatttaggatattggggggtggacctggtcaaagggtccaacctggaagttggggttctggccataggttttcttgatttgggctctgtgttgcttctgccctttccccagcagcgctgtcactgccctgtacttcctcagaatttttaagacaaagtccatccaagcttcacagttgaatgaacctttcaagacagtcatagacccagctcctcatagtgccaaaaagaaattgaggcccgaggagggaatataacaactggccaaactcaagaaaaccaacagggaacccagaaaaccaagcttatgacatgggtggggtccatgtttactgaacccaaggtggtaggtgctggatttctcagaagattctcaggttctttcccttctaggagagccagatcacatcaattaccacggggg

SEQ ID NO: 156452 - DNA, 639 bp, Homo Sapiens
tttctggagcttctcatctgataatacatgtgttgtccagcacactgtatcgtttaaacatttattttcacttccactggcttggtaacttgaaccattacaaaatggctcatcaatggttttgatgatttcagagaaactgattttggaaacattggctggacctctccagtcatcagattaaacaacagcctttgggtttcaaatcatcactctgtaggatgcatctacctttcccaaaactcccttccaccctcccttccttctttcattcatttttagcttattcttatcccaaagcacaatattccatctggtcttttttctacagttataaaagttggtagtgtcgacaactctaattaaaagaagcttttaatgaactgaggcaggagagtgataaaagaagccacaaaggagatggagatcaatagtaaccttattacagatcatctctggcttggtccaaaccagcagactccattaattatgaagtgtgatttatctcttcactgaattagagaagttacaagaaaaagtatatgacacctatagcgcaacaacgtaaccagataggtccaggtatgccggagtacctggaccttctggtatgccagaaggtctaggtatgctatagtc

SEQ ID NO: 156453 - DNA, 410 bp, Homo Sapiens
catacctggaccttctgaaagaaggtcactgggattttagtatttgtttagtaagaaatgaacctactgtatctaggtgcattgcgtgtcagaatacttaatctgctaactaaagtggatcttcatttgttcatcaagcttcattttaatttggccagggagatcttcctaaacctatttacagtgatttcagatctgttttttctacaaaggaaggacagtgggattgctgtgcatgtttggtacttaatgaggggagctctacataatgtgctgcttgtcagaatccgagattacagagtctacctgtctacttctattccaacacctgcctcttttaagtttggtacttcagagacaagtaaaactctaaaaagtgatattgaagacatgttcgctaagaagtccta

SEQ ID NO: 156454 - DNA, 380 bp, Homo Sapiens
ttgcccataaaacctcactgacactgatcttgttagtaccaccaattaactctacatagctgatcatttcctttctatcttcctggaagctaccctttcctggtttttcttctacttcattggtcctttcttctctctcatcccacccctactaatgaccagtgatctaaggacaccagattccctctcacctcctccctgcccatctcagggcccgctgagtccttttgccctcccagctccctgctaccccttcctgtgtgctgttctctgatccatttctagggtgtcctctgccttcatcccctgtccccgccacagaaggtccaggtatgccagaaggtccaggatgccagaagtccaggtatgccagaagtcca

SEQ ID NO: 156455 - DNA, 386 bp, Homo Sapiens
cataggattgtggtgtgagttaaatgacataatggaatttttggactttataagggctcaataatgatttgctaaaatctcgtgtattccttaactctgcccaccttgcaggctagaaatgtaaagcccagagggattaaaccactttcgtaaaaggacaaaggtaaatggtggggggcactgcaggagcaaaggcagagaggtgtgaaacaggattgtttcatcaaagagggtatgccaaaccgaggcgggctctgtgtgctccccagggggagaggtggaagttggatttgagggactgggaacagtgccctaggtgggtgacctgagagggtcacctccgcatgatggagggaaattgagttctgaggatagggaggggtgca

SEQ ID NO: 156456 - DNA, 250 bp, Homo Sapiens
catacctggaccttctatctcttttcacagaaagagatagaagtcctctcaagaccactgtatagttctctcattgtaaacgaaatgtgttgagaacagtttagtcctgtagcaaagtattccttgtgaacacaaaaaatatggattcctgttttaaaaattagccagtctcaaattgttatagattgagtcagcgaagcttagggactgaatacaaggggagaaatagttaccagaaggtccaggtatg

SEQ ID NO: 156457 - DNA, 405 bp, Homo Sapiens
tcggcccggatactggacttcttctggttgagtattcccatgccgcttcaactttccccatagaaactttaaccgtcaagttcctgtatgctcattgttctctctgtgtatgcaagccaccaccaaggccctttccgttttcctggtggcttcttagtttccttttctgattcccaggtcactctttggttgtggaatcagaagagtatacgtagtcaggtttagataccccaggtttacacccttaaccatccacatggggaaagaaaatcatctttcttaaggtagtggcaacctgttcaaggagtggggtgatcattcccaaagtgccagatctccagctgcagagtagacatggtcttggggctttgtccccgtaaagggcccctgacgcatctgatgggg

SEQ ID NO: 156458 - DNA, 209 bp, Homo Sapiens
catacctggaccttcttctaaatattgctgtgtttagaagaaggtcattggctagcagaccagagagatggaatgagcataatgaacagtatgagagacaggttcagaggcgcttgttggatgttttttaagcagtcactgtggaccagatcttttgtgcattagctcactgaatgccccctggacctgagaaggtccagtatccgggg

SEQ ID NO: 156459 - DNA, 231 bp, Homo Sapiens
gcttggtgactctgaggatcccggcatacctgaccttcttgttgtctcggtctcctgaagagtcatcccgaacctggaagctgtgcaggtttacaaagtccttgaggtcataggagtctcccctgcgcttacagattagtagagctttgtcgagcaggaaggcatacctgtccatcttggagcgccgttccaccgagagtgatcttgagttccccagaaggtccaggtatg

SEQ ID NO: 156460 - DNA, 169 bp, Homo Sapiens
catacctggacattctggagaactacagccatctagttcccagctgtccctcagtggctgcactgcaccctttacctgcacctccttgttgcttgagcctccagaaggtccaggtatgccagaaggtccaggtatgccagaaggtcagtatgccgggtctctagagcac

SEQ ID NO: 156461 - DNA, 318 bp, Homo Sapiens
catacctggaccttcttggaatcaggtatttcaatttgtgatttcaaccactggggtggtatctttttttcatgactgctggggaggtagtaatcgcgcaaagtcatctcctgcccagaatacatgactcagtgtctacaaggtctgattgcaaatctgaggccatcctaatgatgaacaaattaaataactgtcacacacattcaagtcaagcaaaactgccagggtccacggcagagcccttctctagctgtctttatcaaacacaggaagtgttgagggccaagacagctagagaagtccagtaagccgtgccgg

SEQ ID NO: 156462 - DNA, 593 bp, Homo Sapiens
cataccttgaccttctgatagttcttcctcggaagagtatcagaaggtctggaacctctttaaccgcacgctttttctctcattaatctatcttttgttagtttaattcacaggcccccagatactgaacctaagaggacagaggaaaagttgtttctccctgaaagactataccctaaataatacaagggtcacaaggcatattgctctcctttataacaatggctgtgtggtccagctgccacacaatatcctagactggttccacaatgacaactgcatctttcaggaacagcttccataacttgttctctgcctattagaagtctcctctgactagaacaacatcgaaagatgtttctcttctatatctcatgacatctggagaatttggggcaagaatgaacggcaccttgtaggatgctcttggaaactttgtcttcttggaaacaatatacatattccccatgatcttttggccttggagtcagccagcttgcaacaaattcaagctctacctaccactcaacagcaatgctactgagcttttctctgtctacagttatagaatgggtagaagtccagtaacccgt

SEQ ID NO: 156463 - DNA, 416 bp, Homo Sapiens
tacctggacttctgctgggcactggcagcctccagtgccaggccatgcacacggtaggctattggggtgaacgtcgtgaaccgatgcatgaagcctaccctgtatgaaatcactatcattagatctacttctcttaggccacataaaaaaaggggcagaagactgttccctttaaaatgtggctgttcttggaaaggcaggggagggctctggagaactcaaaccttctaattagctcactggcccagattagtgagactgttaccgtggacggtacagcaagtggatcctgcgaggctggtgggacgggggtggatggggcatggtgaggcctgggcagcagcaggggcatgttccagagcaaaccccagtgacggcagaaagtgagctaatttagaagtccagtaaccgggcca

SEQ ID NO: 156464 - DNA, 461 bp, Homo Sapiens
ctataccttgaccttctggtctcaccatcctatctggaatcaaccttccagatggagccagagctgcccactcagtttgaaggagagtaggatgctgagctcccagtgcagaaatcaacaaacttggttcattcatcaactaatatttattatctgcaagccctgagcctgctagagatataaaaatggaacatggcagatgctgcccctgctctcttgggctctcagtctaattggacactgaggcaaataagggggcatttggtaatgggggcactgtgaaagcagagcataggggcatctaatccaggcaggagggttccaggaaggcttctaggaggaagagatgttcacatgtgagacctgaaggatgggtcagagttagccaggagaggttagggaagggggaagagtcctctgaatagtcaaacagacacatagaagagaagtccataacccgt

SEQ ID NO: 156465 - DNA, 240 bp, Homo Sapiens
catacctggaccttctttggttagcatagccaaacttggctagctttcattaccactggaaaacctgagagatggaattaggaattctctggcagggctgaaaagtctggacccatcggcttaaagaaactgatccacctcatgacctgagcctggaagccttctcgcccttcacacctatctcaactccagactagtcaagaacaaaggagtgtagtggggcgagaagtccagtatccc

SEQ ID NO: 156466 - DNA, 224 bp, Homo Sapiens
catacctggaccttctggggcaggactttcccaagacaggaccaaggttctggtgaggaaggcaggggttgtgtcatacacagcctcctaggcgatcttcaaggattgcaagtgcagccttggagtgtcgtgattgtaagggcatttgtcaaagggtttggtctaggtctaggtcccattgagggaagctgcaagtccggaagctgacaggaccctcagaaggt

SEQ ID NO: 156467 - DNA, 350 bp, Homo Sapiens
tgctggctcatttaactaacaagtcataggacaaggacactttcaggtacagctaggtccaggtgtcaaatgatgtcatggggaccccatctctctccctttccttttcgcagtcctgcttccttctatggtgtcagaagtctgagacacgtggtctctacatggtggcacctggattatagcttcacagcaaggaagatttagcaaggaaaaatctctctttctatcactcccactaaagtcccagaactgaatcttatggaaccttctggggtcacatgcccacccctggaccaatcatggaggctggaggaattaagaaagctgattggcccagtctgagtcatgtg

SEQ ID NO: 156468 - DNA, 366 bp, Homo Sapiens
cgtgactagagagagagagcagagacacaaatgaacagcgagcaactacactgtgtcatttgggtgatgctccagggaggtttgtacagactgtcaatgtcatgttttgaagagagcaaggaattctggggatactgctgtgccagagaaaacaggttcgagagagagaaaacagaggcgggatcccttacagagcaagaggtaaccaggagttgtttaggtagcatccagccaggggaattgctcagggttctgcagagggcagcctctggggctccggctggggtggggagatagcttggccctgggctgttggcctgggaactggggttcagccacagttgagttccaagcctcctagtgtac

SEQ ID NO: 156469 - DNA, 320 bp, Homo Sapiens
atgacgctctgggaccaccaggggtgggacagagtcctaaacatgtggcacctacagcctgaggggtcgtgggacctgaggaaacagcagtgttgctgaggtccagtgtgtccgagttcctatcgggcaccgtgcagtaggctaggggcttcctcatagagggagtcttcatttaattacacgacagccccccgtggatatctgagtaaacaggatccgagaggaaagtggctcctaggccacagagggacgtcgcgccggagacccacctctgaatgaacttcttcaccacttccatccccgcgtcgagcgcgccgacg

SEQ ID NO: 156470 - DNA, 393 bp, Homo Sapiens
tgggcaagatttcccaggtactatgaagaaggacctacgacatcgcagggctcaggacatataagatgaatgagctggttctgccccagatggaggtgtttcaggtatactacgggcttcctgcacacccctggatgccattggacccctttctacggctcaatccttggagacattgtggagctcacgaagtctgaggctgtacagaactgttgggaggtcagtaatacatctactaatgaaattgtctggtttccttgtaacaggttgatagccctatgtccatggccctcctcaggacctgtctgttcatctctggtactcaggccccatggagtcggtcaggggcagagagcatcctcgccaaccgctcggatcgggactttcttgttg

SEQ ID NO: 156471 - DNA, 443 bp, Homo Sapiens
tctggccaccactgatcgccacagcctgcttcactgttgaaggtaaagcagacccagctggtaccccgacaaccttggagggctgaacctttgctgactgggctatcccttctccaggagttatgacctgtttttgaggggacacagctatcatgtgaccccctttcacagtcacatactgcgggagtggtgactggctggcagctcctgttgcgggcacgtgaggggcttcaccaggttcctgtttgatgatcacttttgtgaaagctccaagtcctcctgttataggtttggggctttgaaccttagggtgactccctattgggcaaagaggtggcatagatgcaaacaaagtatcctcctgcttgacagtagatgttacaaaactacttccatgaattttaggaaacagggaacctgttcttgggagactgacaagccag

SEQ ID NO: 156472 - DNA, 358 bp, Homo Sapiens
  misc_feature (308)..(308): n is a, c, g, or t
ggatgcaatacacaccatctcatcagcctagaatacactcctccccttccatccccacctgcctgccagacagactccaattcaggtctcaaagctttttttaatgagaagctgccactgaactctggacagggtggtgtccctgggagccacagccacttgccctccgctctgtgcctgcgtgtcaggctccctattataccatgaattcatctaaaggccctggatcacatgcattctactattgctcacagcctcagcacccagtaaggtgctaaattggggccaggctacagtggctcacgccntgtaatcctatacactttgggagggcctaaggagttcatagagcggcatt

SEQ ID NO: 156473 - DNA, 312 bp, Homo Sapiens
cgatctagaggatcctgactgttcccaaacacagggcttaatagctgtgcttaacagctgccagttccttctgggacttgcctttggacctagctttggacctagttcatgtgccactgaggatcctcagtcatggcagatttaaatcttcctcattgttgatcccagatagcacactcccattctctgcctgcatggttctcccccattcacctccgaatgacctggagctattgccagaaggcagacctgccctcaaaggatggagatttgcccatattgacaatatgccaggagacctgagcaaccagg

SEQ ID NO: 156474 - DNA, 212 bp, Homo Sapiens
ggtagtcaggtctggaggagcttttcttgttttgatttgttttttaactaataaaaaagctcctccagactgttgtaagcctttaatttctagagttctgacaaagttgattttgatggttttgccagcattctcactgcttaaggagcagattttggaactcctttgcagtctcagaagtgcttcttcccattagacctgagcatgccatg

SEQ ID NO: 156475 - DNA, 501 bp, Homo Sapiens
tcaattgagactgagctgagcaagtgctggtcacgttcaagaggactgagctgagcaagtgctggtcacattttggaggactgagctgagtaagtgctggtcacattttggaggcagagctgagtaagtgctggtcacattttggagacagagctgagcaagtgctggtcacattttggagacagagctgagcaagtgctgatcacgttttggagacagagctgagcaagtgctggtcacgttttggagacagagctgagcaagtgctggtcacgttttggagactgagctgagcaagtgctggtcacattttggagactgagctgagcaagtgctggtcacgtttcggaggactgagctgagcaagtgctggtcacattttggagacagagctgagcaagtgctggtcacattttggaggactgagctgagcaagcggccagactttatcctccagtgaggtcgggagtatgtccaggtttggggacagagactggccag

SEQ ID NO: 156476 - DNA, 554 bp, Homo Sapiens
  misc_feature (61)..(114): n is a, c, g, or t
agcatcactccgtgtctccctcacatgccttctgggcctctagccctcaaagagctaaagnnnnnnnnnnnnnnnnnnnnnnnnnnnnnnnnnnnnnnnnnnnnnnnnnnnnnnggctgctgtgttttattacctctgtttcaggtgcaagtcatccccgggaggagtggtggggatgccgcctgaccctgggccacctggctgcagcatctgtgttgatgaccaccctcctgcctcaggctttgctcctgaatgttcttgctctctaggtctgtctgctcctggccctgctcttcttgactccgttcaagtccctgggtcacacgtccatgctcatcacttcaatgacgcggatcgctggcgatccccaaatctcctcatccaagtgcagatcttcctccaacacaccagaccccacagtgcagaagggcctctgtgggtgcctcccaccacctcaccgcccccttccagtcccactccctggcttggcatttagtgtttgtgtgtggcaccactcacctgggtgtctcaccatcctccttcctcagaagtcc

SEQ ID NO: 156477 - DNA, 377 bp, Homo Sapiens
gcaatctgcttcccttcagttgtctgtactgagtaatagccatcttggtaatctccaaaatccagggtgaagcttttgggagacgcagcccagcgtttgatgttggtgaggttccactcctggatcacttccttggtcttctcatccactcgcatcacacactccttggtgatgcccagaagcctgggcactagcttgttcttccctttcattttttccttcaccaggaagaaggagacaccgtaagtcttgagagaacgggctagcttcacgtagcggaccttggcctcaatctcactcatctgcccactattcttgtgtgcctgtgcataatatgcgggaagaatttagcaaagagtttcatatcacacctcacg

SEQ ID NO: 156478 - DNA, 453 bp, Homo Sapiens
  misc_feature (370)..(394): n is a, c, g, or t
cattgcggagcaagttctctcaacaggagacattggaagatgtctggagcattttttctggaggtcactactggcacctagtggttagaggacaggatcccacaacacacaggatggtccccccacaagagagaatgttctggtcccaagtatcaacagtgggttgagaaactctggtccaatccaaaaaagtgcctggagatctgcccatgaaaattagtcactttgaatgtttctcagaaataacaatgttatgatccattcctgaaaattattgatttatctattcttgtgctctgcctgttcacacaaaggaactgagataagattcacaggaaaatgacataagtgacataatcaaagactgggnnnnnnnnnnnnnnnnnnnnnnnnncgagagccttagactgagggctgtgatcccccgtttcccacgccgcagcagcatgcgcc

SEQ ID NO: 156479 - DNA, 617 bp, Homo Sapiens
cacaggcgcacttctgggtgtgtataaaagtgaacacactcacgtcgtctcgcaggcggcgggcagagtcccaccggcaggactgacggctccagggcagggtgagtgctgttaggtagatgcagggaggccatgaggagcctgtcatgagctctgcctgaagcaccgtggggtgaggtgacattctgaaagggggctggcagtgggagctggccagcaggactcagctggctaactgtaagtcaggtgcaaaagcgcagggcagggttttgtttgacagtttggacaagaagggttacccaaggtctgatgtgctttttagactcctgaggctgatagtggattccaggctgcctgatggcctgaaaggcggctggtggagtgcagagaacagcaggtgagcatgaccagccaccaggttggctgagaagtggccaaggctagagctaagagattggcattagtagcataggctagaagtgaggtcacttggatatttaggagatggactcaagaagtgcgcctgggtgcgcacccaggcgcacttctgtgtggagaagctacgccccaggcttgtgccagtcaacgacccttgtgaagacgcacgtgccacttga

SEQ ID NO: 156480 - DNA, 303 bp, Homo Sapiens
ctccataatgtgtgcccaggcctaggcctgggctgactcaaatcttctcaggaataagaggtaagaaggaattttaaacagcagtagttacctggggtacatggttaatttgatttagcagattctttggctaaaccctagtaaattaaaatgtctgagccaggtcatgggaatatacatgtttttaatacattccttaggtgattttgatgtagccatctgggccacatttggggacaactgagtaggacctaatacaggttgaatagccttatcccaatctcttggaccagagtgcgcaaa

SEQ ID NO: 156481 - DNA, 447 bp, Homo Sapiens
cggtagcacagcagcatccacgttgaggctggctgctgcaccactctcttcttgcctcttgtagagggggctgttatgtcccgtgaccttctcccaagagccatggaagtcgtaggccataaggttgacaaaatccaggttctgggcgattttgtccacctcgtatccagcatccacataggtctgcccagctggaaccactgcactcagaagaaggcgttccttccctgaggtctgggcttcctgctggaaggcattggccaagtcctgtaccagggttgtgaagcgctccttgtctacggcagggctcccctggcttcctgggtactcccagtcaaggtcaaggccgtcaaagctgtatttgcgcagaaacctgatggccgagttgacaaaggtctgacggttgttggccgtggctaccatatctgtgaacttctgagtgccgaa

SEQ ID NO: 156482 - DNA, 617 bp, Homo Sapiens
gggggaggcccagcagagcaacaaggagctccagaacatgaagcgcctcttggaccagggtgaagatttacgacatgggctggagacccaggtgatggagctgcagaacaagctgaaacatgtccagggtcctgagcctgctaaggaggtgttactgaaggacctgttagagacccgggaacttctggaagaggtcttggaggggaaacagcgagtagaggagcagctgaggctgcgggagcgggagttgacagccctgaagggggccctgtaaagaggaggtagcctcccgtgaccaggaggtggaacatgtccggcagcagtacctagcgagacacagagcagctccgcaggagcatgcaagatgcaacccaggaccatgcagtgctggaggccgagaggcagaagatgtcagcccttgtgcgagggctgcagagggagctggaggagacttcagaggagacagggcattggcagagtatgttccagaagaacaaggaggatcttagagccaccaagcaggaactcctgcagctgcgaatggagaagtgcgcctgggtgcgcaccagcgcacttctgcacccaggcgcacttctgcacccaggcgcacttctgca

SEQ ID NO: 156483 - DNA, 224 bp, Homo Sapiens
accgtacttctctactctgcatctgctgtagatgacaggagtccatctcttcatttcattggtcgttgggaacaaagctcccgagtgttggatccttgtcttccagctggcctaaggacatgcaaagattagaagcagcacttctatgttcattgagccagattgtgtctgcttctgtggaaatggcctaggggactcactggccattctgtcctgggtccagt

SEQ ID NO: 156484 - DNA, 409 bp, Homo Sapiens
gagatgggcccagccgagagagactgacaaagccagaatcacccgcctcctcatgcagcagcacctggagcagagaagaaggtgagaagggtatgagctctctggcagcagctgataatatgctccataaatcaggtaccctccactgctggggccaaactcagcagcagcaacactgtcgccaaacttctgggctagcagagcagagagaagcccaacctatgagcaaaaaccccaataaggatggcagttttcagggaccttctggggcagtaaaatgtttgggctccaaccagaaacagctagagtcacagattaaaacccgggagtccaaacatcaggataatcaagattgttccgaatcatctactggcagcagtgaagataacagtctgaggggcacaccaaa

SEQ ID NO: 156485 - DNA, 892 bp, Homo Sapiens
tccaggcgcacttctgcacccaggcgcacttctgccaccccctaggccaaggtaataatcatcctgaatcctgggtttatctctcactgctttcttttcatataattttgcaaaagaatctgatctaaatgtgtttttcagagtatatatttatattttagctgttcttagagaaaatttattattttgcatgtaatcttatggaacattctcatttaataccatggtaagattcagcccttgcccaggggatagttcatttagtttgtttactggatagagctcatcatgtgactatacctcagttagtttatcagttctcccatccatggtgactaggttgcctctcagcctctcaacaacactgtttctcagtgtccttgtagaagtgtcacctgggcctgtttgcctgagaaggggagataagggctgaactgggactagccagggggaccaacacaaatggtgggggatcatgacctgaaggattctttccttcccatgagctgcagggctggttgccgtccttgcaactgtgtcttatttgcctgtgccgttatatcttggtgacccctccacgtgtacactactgacaaacgggtggagtgctggggagaagtcactgtgccgcccacctagtaaaccttctgtctgtgctcatggcatctccaagatggggcactgctgtgtgcaagaatccagggctcctcatttctgcttgccaactcctttccctggatgccccagaaacaatccaggcctcctttcctatcttacccctttgctttgctttttaccccagcacctctataaccgccaggcctcctttcctatcttacccctttgctttgctttttaccccaggcataaggtgggcccacggcataagtgg

SEQ ID NO: 156486 - DNA, 499 bp, Homo Sapiens
tatttggttatttggaacttagaggtagttttcaatagaaaaattaaagctacaaatgttgggtgtgttcccagaatagcccacagaagccaacttaacccatcatacgtccagtcctcatgctgctatccaactaaaccaacatgaatagcagtgcctataaaggtagcgtgctttgccagatccaagctgggagtcccagagctcattcttctatagcagccctgtcagtagaagtgagaactttcctgtcttcattcctccaacctcaaaagaagcgaagtgagaacaccgcccagccatacaccatcaacatgtgactgtagattgtttgggccaggggttggggttagaattactcaggcatcacggggacctaatttaatagagtcttaagctatcaacgactagaggcatgcagagagaatgaagagtcaaaattgtcaataagtgtcaggatgctagtcgaggtcctagaatgagcgagtattgacgttaa

SEQ ID NO: 156487 - DNA, 517 bp, Homo Sapiens
atgttggggccctcctagattcgcgttgaggggctagcatttacccaccactgcttttgtgccatcagcacagcaaaaagaaaggcaggaaccacggtatctctgaaaatagttttgactttatcaaatcctctggaatgggtcagggcacccccaggaccatactttttaagaccactgattcagagtgaatctgccttctccaccctggcagacgtggctcctgcggtgtggcactaagcctcctgtactgtgacacgaagccttagttctaaccaagccagcctattctctgtgccccaatctggctgtgcctggcttactgctgtgccgccgcacctggcacaccttctgccccgaatactggcctccctctctacctgataagcagctgcctgctcacagccaacggaacacccctcctactcacagctccgcactgcccatttggctcccctgccactagagccctgggaggcctgcttatcaggtagtgaggttccatcgcatccccgag

SEQ ID NO: 156488 - DNA, 151 bp, Homo Sapiens
agttcgacggagactctcgagggagggattggatatgtctcttccactgggagcaccaactacaatccctccctcaagagtcgagtcaccatatctctagacatgtccaagaagcaattctccctgaagttgaggtctgtgacctctgcgg

SEQ ID NO: 156489 - DNA, 581 bp, Homo Sapiens
ggtcggtaccgtgatggaactcactagctccagtctgtgcgggtgcagctaggaggtagtaggttttctgattgttctgacagatttgcctcccactctgcttgtgtgatgagatgatccccaagaatttaccctgtagcctcaatggcccatctgtgaaagacatgatcgtatggatagtctgtcaaattgattgcggccagtgcagaacttttcctgataaaaacagctagccggaattgagcactagctctgggtcatgagctgcctcaaatacttcctccctcacttctcccattctacgagtggcagagaagacctgggccattttagcaagggctgagatcaggactcacactcaggccagctgcctatgccccaggctggtgatgttgggagctcagggtcaacgagaggagagtggggattcttgaccaaaacaaagagggagccatttgagcagctcccatcttccttcagagttctgctgagatttctcccctctaggctggcggtatcctgccacatggctgctgaaaccaacatacctgcgtgaaagtgcccaggccacgccagggttc

SEQ ID NO: 156490 - DNA, 398 bp, Homo Sapiens
cgatggaacctcactacacacattacatgtacacaccaggctgcatgtcctcgggaagactggacactacggggagcaccaggtgagtgccttgtggcatcccagccccctgggactccagtgcccaggtggtcttaataaccagagtggaattctagatggagggaggggttggcccagtagatgaggttgggctggaagcacggccggggcagtggtcttggacagtaaaagccctgctgtaccaactctgtcttcaccatctctgtgttgagctctctggctagaatcccacagtttcaccccgactgcctctgtctgctgttaagaaaaaatatccaaaactttgaaataatacagaaagaggactgtgtgtccttttaaagtcatgttacagc

SEQ ID NO: 156491 - DNA, 473 bp, Homo Sapiens
ggacactagggtgcccactctggcattttctctccttcccttcaattcacagactctggtggagcaacgttcaggtggttcaggaaagggcagcaataaggtgagatctggacagaggactcgaggcagggggagcttgccaaagagccttctgatgactatgtctttggctgtcccaggggccactaggtgtgacagaggaactgcacatcatcagcttcacggtcaaatatacctaccagggtctgaagcaggagctgaaagtgagtgaaaatggagggcaaggagagagaaagcagctttggaagaaggcataagaaggggataaacagaagcctcttggggtgggttagcactcctttcctctaacaaatacctgcagctagaaacatcacatccctctctgtgactcctgtcttctccccagacggacaccctccctgtggtgattatttccaacatgaaccagctct

SEQ ID NO: 156492 - DNA, 587 bp, Homo Sapiens
  misc_feature (78)..(144): n is a, c, g, or t
  misc_feature (403)..(512): n is a, c, g, or t
gcgatggactcactacgcccaggactggtaagtgaccagggcgtagttgaatgaatcgacattgtcctcaggccttannnnnnnnnnnnnnnnnnnnnnnnnnnnnnnnnnnnnnnnnnnnnnnnnnnnnnnnnnnnnnnnnnnttgtcacagtggcctcatcagtttgtggaccacatgaaatgttcagtgcaggagtagagggcccaggccacgcctgcggcagccccttcctcatcccacgttggcgtgggtttggtgatgaacatttgctgggggcataaagttgattgaacaaggctcagtgctggccaatggtgaactgcagccagcttggactggctcataccagctcttgagagctgatagttacattttcagggccagcgtagtggctcacacnnnnnnnnnnnnnnnnnnnnnnnnnnnnnnnnnnnnnnnnnnnnnnnnnnnnnnnnnnnnnnnnnnnnnnnnnnnnnnnnnnnnnnnnnnnnnnnnnnnnnnnnnnnnnnttagctgtgcctggtgttgcacacctgtagtcccagcaacttgggagctgaggtagtgagttcaatcgcggtacc

SEQ ID NO: 156493 - DNA, 160 bp, Homo Sapiens
ccggaccgcgatggactcactacgtgggtgactgccccttctctcttgaaggatttgtacacatgttcatcatggataattcttcctttcactttgattgtggagagtctgatgactgtatgtcttgcacatagttgtcttgtgtagtgaggttccatcg

SEQ ID NO: 156494 - DNA, 482 bp, Homo Sapiens
ggaacatctatggtgttcaggagtggctcccaccccaatggtgtcagccctgcaaggatgaccatgctggttttgtcttggtatcatctgcagggtcccagcctggagctggggatgctctgaaggctctgttaataatcttcattggatgggtcagtctcgggggtgaaacagttgcctgctgccaggtcgggttgcagtgtgtccctccctatctttaggcagagctctcgtatcccaaactggggagcttctagatgtgctgcccttcatctagtacaaatttgaactagctgctttagggagcatttcctgaccagcttgccatcagcacctcctccttctctttgccctccagcacctacttgactgcgcttagtgaagggagtcatgttctgagttccctgagtcaggcacaggtcccactctgagttggtgtttgtctccacggcctcattctcggtgtcttacatgcagcagtg

SEQ ID NO: 156495 - DNA, 610 bp, Homo Sapiens
tcgacggatagttcacaacgtctctgtctcacaaaatgtaacaaacaatcaagataaaccaaccatgtaactggcagagtgttgtgagagttagaaaagacattttgaagctttgccttggtcttggcaggggatttgggggtgatagcatatatatgtacaccaagttgttcccccatctaagtaccaattactactggcactcccctttctcccctcactggctcattgctagaatagtagaagctagggatgagctggcaaagttaacttccacacaggcctctgtgaagaagaggaagagccagagaagatttggaagattatggtgacatggcagaggaggcgaggacagtggatctgggggcctggggcagctctgtggacccaatcttagcaactgttgagacaaaggatgtacaaatgggatcagaatgaaccatcagaggattagggctcaggacctgaggttcatgttgtgtgcagcatctgaacgtgccgctgctgcgtgggtcagctagttagagccacatttctgtgtgatgctctgttctcctgcagccagtccttccccccacctcccacattcctgagagtctccgtcgaacta

SEQ ID NO: 156496 - DNA, 616 bp, Homo Sapiens
actgcaatctggccagagataggctcgtctcaaaacgcttgtcttaaggggtggcttcccccagacctacaaagtagcccagaattggaggtcttagtgtcagcaacagtgctgattttgataatgcaagtctgtacattcaaaccagtctcccagaactaggtggaagataggaacatttctgcataggagacttggaatgttctggcagcattaaaaccctgaggcccggctatgttctgggagagccctttggcaggcatcatttacagacgggtccttttcctgtatgctgtggcttcaactaggctgtgtctgagaactcggatggagcacttgaaagtgcccgtggctcccgcctgcctttgcggtaagggacagtgcagaacatctccggctgtgccagctgttgtagattctggtgggtgctgccatgggaggaggagcacgttgttgccccccctcaggatctccctgacctctgtcttcaccatcgttgaacttaacgcctgcttttgaccaggtagcgtggagtgtttcagtggcatttgtcatcgaagatatgttagaatctattgtatgcttttggatctctccggagagtctccgtcgaact

SEQ ID NO: 156497 - DNA, 145 bp, Homo Sapiens
agttcgacggagactctcgtggtgggcagtcaggtaagccaccacgagaggtgacacaagcagaagcttacacgatgagaaggaccagccagttgagggtcgcaggctaggggcgtgctttgtgagtggacagagcgtatcaagg

SEQ ID NO: 156498 - DNA, 441 bp, Homo Sapiens
atgcacctagaagcagcagaccagaactacagctaattttaacacttctctttcttcacaaaagaaatacgaatagccacaaacattagaaaaatacatccaatgtcactagtaacttaaatctttaaatctttgactggactgagattttttgatttattaaaaccctaaaatggcataaacatgaagaaagcatgtttcatgcagagaatatagtctgtcatgtcacatcatgttcataaaggttaagaacagtgggtaaaacctttggctatatgaaatactcatgctcttaaaaaaagttagagaccatcctgtgcaacatagggagaccccattttgtctctacgaaaaccctatattttgtctctacagaacttcagaaattagccagtcatggtgttgcatgcctgtagtcccagctactcagtcaactgaggt

SEQ ID NO: 156499 - DNA, 579 bp, Homo Sapiens
  misc_feature (58)..(151): n is a, c, g, or t
gcggtaccagtcgacggagactctccagccacatgcaccaactactcagcgaagcgtnnnnnnnnnnnnnnnnnnnnnnnnnnnnnnnnnnnnnnnnnnnnnnnnnnnnnnnnnnnnnnnnnnnnnnnnnnnnnnnnnnnnnnnnnnnnnncctggcaaaaaacaagttaaaaatgtaatgcattaaagggagcggtcaagagtgataggtgccataaagatgtcaaataagctctgaaagatgctgtttgagttggcaattgattattgatcatattattgaacactttataattgatcagtgaacttggcaattgatcattcactggtgactggtgagaatgaagttagtggaaagataggaaatcaatggaaagattgactacagtggattgaaggaggagtggtagattgaatatagaattttctcaagaagcttaagtaaagtgatagcaagagaaaggactgtagctgtaaaactgagattttatgaagttgaaatatggttttttttcttaaaaatgataagaacctttagcatgctgtggcaaagagccaagagagagtctccgtcgaact

SEQ ID NO: 156500 - DNA, 355 bp, Homo Sapiens
atgaggtgccagctcttgctttattgttgcccacttataacttatgttggaaaaaatagccctcttaggaaaagacataaaaagtgaacttacgttgctagagagaagcttgcacaccatcataagataaaaaacaggcctctggctccaccgtcttattgaagtgatgctgtttatcctccccactaatctgcactcctcacattgatcacagcccagacaacatgcagacagagaggcagatgcagagctcactgactcagtgagcacagctgggggagatcattaaacagaccactcctgccaaacagcctgcggcgttggatgcagtcaggtgggcggcgttggatgcagt

SEQ ID NO: 156501 - DNA, 228 bp, Homo Sapiens
tatcgggtttgcaggcatgagccaccacacctggctgtactgctcttagctcagcctcatctctgctccttcaggtcaggacagagcagctctcttggggttcctaggagcagagcatgtcctttcctctccaccgcactcctgtcttcattccccgtccacggcttcctgctgcagtcaggcttccgggccctgaaactgcttctgccagcaacctgtcgacagtct

SEQ ID NO: 156502 - DNA, 538 bp, Homo Sapiens
ggaagaacgaaatgaaatcttgactcaggagcagaatttttcacaagatgtgacactcaactctctggtgtccgaagcatttgtcaggttttttgtggagttggtaggacattattctttgaacatgactgtcactgagcgtggggagcgtgttttccaaagggaaccattccgtaagtcccacacctcccgaagtgtacgccacttcctggacctcttcatggaaactcagatgtttgcaggattcatccaggaccgagagcttcggaaaagtggagttaaaggtttgtttgagatccgggccatccagtatttggaaacaattcctgagtcggagcccagtgggatgaatagaattttgcggagtcttggttagttgctgtgttttcctgttagataaatgtggctgaagaccaggcgcggtggctcatgcctgtaattccagcactttgcgaggtcaagtaaggaggtttgcttgaggccaggagtttgagacgcgtgggcaacatatcgagaccccatccctcacgctggaatg

SEQ ID NO: 156503 - DNA, 396 bp, Homo Sapiens
gaagatttgttgttgtgttaaccccatgttttctcctaactctttttatttttattttggaggactctatctagacttaattttagcataacaagtgacagggttagttagcctgttgtccttacaccattttctggctaatacagctattaactattgatctgtctattcacgtgccagttcctaatggttttacatagtgtaatctgcacttcaaaatagcgaagggaagccctacctcattattctacttttccagaattctcctgagctattccaggctgcatgtttaccttaatccattccctgtgatgtcttcatgccgttgtcttcttatgcgagaataaggtacgtctttccatccactcacgtctatttcatttgactttgcattac

SEQ ID NO: 156504 - DNA, 472 bp, Homo Sapiens
ggctcggtacctttcattcagcgtcaagaatgctcatagagttgttttgtgaagtggtttctttgtacagtcctggtaatgaagacgctgtgtatattacatgcttatgggcggctcccccggccagcaggagagtgcgtactactgtagccttctgatttcctgttgtttactttgcagaggctggagcttgggtagtgaacacgctgagcatactcggcgcactggcttgtgggtgacttctctccctgctgtatttcccggacaggtgaggcggaccctgttcatcacaggactccccagagatgccaggaaggagactgtggagagccacttccgggacgcgtatcccacgtgtgaggtggttgatgtgcagctgtgctacaacgtggccaaactgatctacctgtgcaaggagaaaaagaagactgagaagagcctgagctattacacaaacctgcaggtgaagaca

SEQ ID NO: 156505 - DNA, 455 bp, Homo Sapiens
acagaaagacagcttccccttctccgtgcccagcaagaaacccgggagctgacactgccctctgggtcttcccaggccgcgctagagcccaggagcccttctcttccaaccattctccttgaacatgtccaggacgctcccctcgaaagcctcgcctagtgctccaactgggaatcttaacaaggacgcattctcttggtgtctaacgcctaagaggctgttcaaggccagagggagccaaaaggtggctcagccatacccttccaagaagggtaacctgccagccagcacatttccagagcacccaccccacacccaaagcttcaaagcccctctgggcacgcaccctcaatgcagaggcctacagaagcgcaagacacgcacccagcggacgctcaggtacctgcccacgaagcagcaaggcacctctgagcttacgctggaatgaattggga

SEQ ID NO: 156506 - DNA, 756 bp, Homo Sapiens
caattctccagcgtacaagttttaatatactataaatattagaaagtagcatacaattaacatatggtgtgataagtgttacaatgacatcaagagcaagggcagagtgcccgtctagtatgacaaaatggcacagaccgtcaaaagactcatggttttcaggaagataggaagtatctttgggcatttatgactctgactgtaagtttacctacagagaggtgagagaatgaactgcaatagaagtgggccaattaatacaagaaggtagaggcaatatttacaggagattatggtgaacacagcttaaatcttcatgagatgctgttgggttgggggtcggggggtgttccacatgagccagtgaagagatcgaggaagcagaggagtgctgggaagttgggtcaaaaaagaagaaaaacaaagaatggatgagacagtgaaaaaggatacatcgtagttactctgacagtaagaaaagtgccaagcaattccattcaccctgaccactactgccctgatacaagttatcaccttctcttcctaaattacttaataacttccaaattgaccctttactccagatttttatgcttgcccacgttatatagtctctacacaaaagccagattatattttttaaataaatcagattgctttatttccatgcaaaatcttccagagtcttctcagcatatactccaactgcttttcatgatctgcgaagctgtgctggagtatacgctgtggacattg

SEQ ID NO: 156507 - DNA, 277 bp, Homo Sapiens
tcctcagacatagagctctatctatacttcagagtcagccggtctatgtagcaacaggcatataaagtgcagagaggacttaaaattgattctctctgagaacaaggaggtttccaacacagctcatggaaatggaaatagagctgtcaatttattcaaaataagcatccaaagaaacaattgtgattcatctcactactatacttagtttggttgatgcaaacagtaattgcagttttagccattacttgttgcataatgttacgctgaggaattg

SEQ ID NO: 156508 - DNA, 844 bp, Homo Sapiens
  misc_feature (499)..(520): n is a, c, g, or t
tccagcgtatcctgaacagccgcgttagctgtcctgggtccactcggttgaccttgtgttggtgcttcattactgctcagtcggggtgggagttaaggctctccgtaggcctcagctgataccaccctagctgggaagggccaggatgcctaattactgccccccctagtggtctccatttacactctgggtagttggtggtggctttaccaatgaatggttatgaatgtcctaactctattaggcctcctctgataccaccctagcccgagaggaggcgggtcaccccattgctataagaggtacagggagagtcatggggtaggcacttggggtgcttagttacaacctgagcatgggttttcactggttcagatggaggtgggtccacagatttttctagggtgtttggctggagtagagcattgttgtctgaaaattttgtcctgttaggctgctactttttttggttcattggctagaaaaagcaggcttttannnnnnnnnnnnnnnnnnnnnncttcactcattagcatttgtgagttgctgccttctctcttatctagtctggaatacataaggcaaaagaaaacccgggaaactcaacggttatcgtttgtgttccaaggtttctaacttgtttgccttttctctacctttccaagtcttatgtttgctttgtgtatgatactccgacttttaagtggacttacaggaaaaaacacatctgctacattgttccaccagcagaagtaaaaagctattagctttttaaaatttctgctcttagaacttagatctctggaaaggatttctgaattttaggtggtacgctgtggaattg

SEQ ID NO: 156509 - DNA, 578 bp, Homo Sapiens
caatgccacagcgtaccacctaagctttaatagcttctgattttgttctaagttttcccaaatattaggtggtacgccagatactgtttaagtgaaaaatcatttggttaccttggctatcttaccaactttttaagagacctacattgatgataaacctccagaaattggagattattgtaggaaacccaggtccatttagtgttcactgatgccctttcagtttaacttttctcattttgatgatcatcagcttcctgttctaaaattaactggcaaatcattctagcatctcccttcagatagaattttgtgttaatgatttttctaagtgtttacttggcagcttggttttacttaaacattccttctcatgcaggttccatgatgaagatatttctaaaaacataagcatgcttctactttagttatcactttgaatttgatttttaaggtatgtgggcattattgtgctattgaaatgcaatgcaaagctgtccgtaaaactgaacacaaagtagatcacctagatattttagctgtcttcatgatggaatcatacacgactggaatgaata

SEQ ID NO: 156510 - DNA, 167 bp, Homo Sapiens
  misc_feature (117)..(117): n is a, c, g, or t
ttaatttatgagacatcaggattaaacacctttgaaacaggcagaggtcacattcggccaataggtatcagtccagctccactagatcttaacatgctgggacacattcataccccnttagtaagtagccactgcccagtcctgccagtgcatcgataacaccgtcg

SEQ ID NO: 156511 - DNA, 285 bp, Homo Sapiens
tcagtcggtaccggtgtttatcgatgccaccccagcgagcagccaatggataaggccagccaataatcccagcactaagctcgccggcactgaaatggtcaagctggtggttcaggagagctggaagcctggctcaggacagagccctgggaagttcgagtctgctaacattccctcggtttcttgttgacgatcaaagctcagggttgtggggacaaataccaggacttaacagatatttaagacatctttgttgatgctgggattttgtggcatcgataaaca

SEQ ID NO: 156512 - DNA, 353 bp, Homo Sapiens
tacagttacggtgatttgcagagagactcacgtccgggtgtaatattattgtggataatagtaacacggacatcgtgatcctcacggacatcgtgatcctcacggacatcgtgatcctcacggacatcgtgatcctcacggacatcgtgatcctcgcggacatcgtgatcctcacggacttcgtgatccttcacggacatcgtgatcctcacggacatcgtgatcctcacggacatcgtgatcctcacggacatcgtgatcctcacggacatcgtgatcctcacggacatcgtgatcctcacggacatcgtgatcctcacggacatcgtgatcctcacgaacatgtgatcctc

SEQ ID NO: 156513 - DNA, 416 bp, Homo Sapiens
ggctatggttggggaagcacagggactgtggcaaaaagggaagaggcctggaaggtgtgcaggagtttggtagaggagtgatctaggtgaggggaatggaaggtgcagagaccagagctgagagggcctgaggcactttccagagcgtggggaggggcctccaccaaggcgagaagggctgcaggtccagatcaccagcgtttgtagacagtagtgtggcgcttggagtttacctgagggccagtggagctccagggacctatcaggacggggacctgtggggactgggaaggcctgtggggctgcgtggagcccggtgctggaggccgccgggggtgacggggacgctgagggcacagagcggaggggcatgatggctgctgggcgtggaggtgtcgagagtatctgtgtgtggt

SEQ ID NO: 156514 - DNA, 712 bp, Homo Sapiens
tatagattgagctttaccctgtgtcccatgcacagttggacgtgttgtggcctagctgcgccaggcctgcgtgctccctctactacctgctcagtgccctgcccagcccaatggcccaggatacatctgccatggcctcagtcctgggggcctctccaatgggagccgtgaggaatgctactggggccacgtcttctgggaccaggtgagcactgtacacccagcaccagccacacagcaggcgacacatggaggtccacggtctctgccctccctgggaccagggctatggttggggaagcacagggactgtggcaaaagggaagaggcctggaaggtgtgcaggagtttggtagaggagtgatctaggtgaggggaatggaaggtgcagagaccagagctgagagggcctgaggcactttccagagcgtggggaggggcctccaccaaggcgagaagggctgcaggtccagatcaccagcgtttgtagacagtagtgtggcgcttggagtttacctgagggccagtggagctccagggacctatcaggacggggacctgtgggactgggaaggcctgtggggctgcgtggagcccggtactggaggccgacgggggtgacggggacgctgagggcacagagcggagggcatgatgctctggcgtggaggtatcgagagtaactttgcatggaccggttagcctcgactgt

SEQ ID NO: 156515 - DNA, 257 bp, Homo Sapiens
ccccgactagcccgacagggctgaccgctctggcccagggtggtatgtaattttcgctcggcctgggacggggcccaggccgggcccagcctggtggagcgtccaggtctgggtgcgaagccaggcccctgggcggaggtgaggggtggtctgaggagtgatgtggagttaaggcgccatcctcaccggtgactggtgcggcacctagcatgtttgacaggcggggactgcgaggcacgctgtcgggctagtcgggg

SEQ ID NO: 156516 - DNA, 797 bp, Homo Sapiens
taaggatcccgacgctctctctgtggggaagcgcacgatctcgttggagaccgcgcgagccagagccaccgggaagccgttgcgcttgaccccgggcgtccagccgtagggaagagagaagccgtcctcatactccgccggcagccagcgcacaaaggcacggttggaggcccccagcgtggggctgcgtctgttgttgcacatcccggtgatggtgcggtatttgtcctgctccgggcaagtcacccccacgtcctggtaggcgcagccgcttgacttggacaacacattcagctgggcgggcgtcagcacatcagtgacattgaatggccttcgccacagggaccgcagcttcctctccagcaggtctagagccacgtgcaggtagtcagcggccctcaccgccgtcctggtggctgccaccggctgcttgaagtaggataggagttccatggggctggctgagccgctgcgaagccgctgcttgatgctttcccgccgctccttgtaggccttgtccaccagctgcttggcctcctccatggagctcagcaccaacgaggtgtccacctcccccaggacagctggagcagcaccttcagagggctggggcgtggccagaatggccaggagccctgctagggccagaagcagcttcatctctgcagtgagacccccagcccagcaaggtcctaagtccaccatgcatctgagagaagagaagaagggaacccccatctctcttctcctgggctgctcaatccccctttgtacctcagccccacagagagagcgtc

SEQ ID NO: 156517 - DNA, 188 bp, Homo Sapiens
acactgtttaaaaacttataaaataacaaaaatagatttacatgaaatgcacaaaccattattgattattatgacttattatttatcatcttttatcttctgataaaaaaagtggttgtctcttactgctacccaagtccactagcagctcttttctaagctaaatgttatctgtcgggctatcgggg

SEQ ID NO: 156518 - DNA, 337 bp, Homo Sapiens
acgctctctctgtggggaggagacaggagatgcagggcaggcatgccggcaacgggacgcccggtgaaggccggtgaccgcaatcgccctgccttctctgcagaggacatgcaggcgccgacccacagagaaaggtgagctcaattgggccagactagacggcaagagggagagtcaaaggaccgattgtgaaatctgagctagttaggaaaagtaaagaaaggcactgatgactgggagaaaataagggagcaacaaagtagaggacaagtgaaggggagtggctgatatagccggccagctggccccacagagagagcgtcgggatctgacacag

SEQ ID NO: 156519 - DNA, 565 bp, Homo Sapiens
acgtgtatccactcaaaatgtctgacattcttactcagtgctagcaaccatgctgatgctagggatacagaagagtaagcatggttcctgttcttggggagctatggcccctgacagtgcctgataaataccaagaatgaattcctctttcctcctcctccctcaaacacctgttatattttttagtgtttttcagtgctaagaaccacgtgctttagaatccccagaggttattagaaatgcaaactctagggttacttccctgaccccaagattctcagggaacagagtcccaatatttgcatttcactagcagcgcactaagggttgaaggccactgctgtagcgaaagctcctgatattcctcaatgacccacatgactacttcagtaattatccacacattatggcttggagataaactgaaattggcaaggctgtggactcaatttaggtcagctggacctagtcattaagacagcctgaggctagttttcaaaaataatgataagcctgggacagtggctcacgtgtatatcccaacacgttgcgatatacgtcgcga

SEQ ID NO: 156520 - DNA, 552 bp, Homo Sapiens
ggcaggatgtactcaagtctgagaatgccaggcttgtggtgcagatcgacaacgccaagctggctgcggatgatttcagaaccaagtaccagaccgagctgtccctgcggcagctggtggagtcggacatcaacggtctgcgcaggatcctggatgagctgaccctgtgcaagtccgacctggaggcccaggtggagtccctgaaggaggagctgctctgcctcaagagcaaccatgagcaggaggtctataccctgcgctgccagcttggagaccgcctcaatgtggaggtggatgctgctcccactgtggacctgaatcgggtgctgaacgagaccaggagtcagtatgaggccctggtggaaaccaaccgcagggaagtggagcaatggttcaccacgcagaccgaggagctgaacaagcaggtggtatccagctcagagcagctgcagtcctaccaggcggagatcatcgagctgagacgcacagtcaacgcctggagatcgagctgcaggcccagcacacctcaactctctggatacacgttcgcga

SEQ ID NO: 156521 - DNA, 448 bp, Homo Sapiens
  misc_feature (292)..(365): n is a, c, g, or t
ctcgcgaacgtgttatccttatgtcctactagtatcatttctttcttgaaggacataaggataacagttatttattaggatgtgacaccagagaggagtaatttaactgattaggttttctttattttctgtttctgtgaaataaaagcaaagctaagaaagatggaattcatgtggaaaaatcctttgcttctttctagctgttaatgctagttttcaattttcaccatagatgtcaccaaagcatagaaagtagttcagagttagaaataagacaattgtttttagattnnnnnnnnnnnnnnnnnnnnnnnnnnnnnnnnnnnnnnnnnnnnnnnnnnnnnnnnnnnnnnnnnnnnnnnnnnaccttcccagggtcaggcgtcctcctacctcagcctccagtagcattacatcacagttcgcgaggggatcctctataaccgtg

SEQ ID NO: 156522 - DNA, 443 bp, Homo Sapiens
tcgcgaacgtgtatccaaagcacctgccaaggctcctctctccacatttagagcattaagatgtgtggggccatggtatcaatatcctctcctgccacacatctccagagtttctttcacagaagggactaacagttcaggaggcagagtacaggaattagaagactctccaaagaggagaatactctggaggtctcaataattaggtaaaattattgagaatccactgtgtgacctggaagagttgctgctgtagccttgaaaataaactcttagctctactggcacacctattttctgtcagacaatggcattccaaatataactgatggacaagatgttcagtattagctgcttatactggtggctttcatacacattttctattatcccaattctcttcattcttttggaggagagaattgggataacacgttcgcgag

SEQ ID NO: 156523 - DNA, 665 bp, Homo Sapiens
gcgggtcaagcccaaggcttccttttcattgtaccatcaattgctactgagcctctgacctactgacttggaggatctgacaacacctcgcttgggcagaccctgtcgcatggtcgctgatgtcccaccagcaggtgctcggtctctacctgggtctggtagtgtgcctgatactgctctcacttggcgagtagttctctgctgcagaaggcatggtcttgtccaggaactctaggacagtgtactgcaactcttccgttggagtttgccagagatgccatatagggtccttcctaccccaaataagccccccggtaacccattggatctatgcagcagggaagcccatctcccaatccaaatctttagcagagccctctttttctctgggccccactcaaagctggcagttttcccgttacccaataaaggggtcagagaggtatcctctagcgcggtgcatgctgactccaaaacacagaggtgcctcaatgctgtgcctctttcttccttgtaaggatgcaggatgcaataacttgtccctggcttgccctcatacgctgcacccctgagaatgtcactgatatggcaggctccagaacttctgagggcttctcgctcatccatctgacatgcgcgccttcttcaccatgtcatgaggatat

SEQ ID NO: 156524 - DNA, 499 bp, Homo Sapiens
gccaggtgagggtctaggaatatatcccctacgaatatgagggactgtgtagttaaagctagtgcacagataaattacattaggtagtatggaaatcagaggaaaagggaaaaaacaattattactttacagttaccccaattctcattgctatttcaataagacataatgacatgttttagaaagtatcttcaagtaatattggcacatattccctggagaacaccgctaccatgcaagctgttcaatatttattctagtggaaggaaaggactagcagaatttaaattaccatgaattgtaatacaatgtgacatgagcaagtgccttgggagggccagcacattagagacccagataattgaaggaatttgcaaggagaaagggcaggttaaggagtggctggagaatagcttatgaagaggtagtgtagcaagacaagccacagagaaaagcctcagacacccaagtttaagaagagaggggtttattcgggtga

SEQ ID NO: 156525 - DNA, 693 bp, Homo Sapiens
gcctggcttcccagagtgctgagattacaggtgtgagccagcacgccagtttactgccattgtccatgatttttcctacagggaacatcacaatcccagaagatcagacaaagaacagtaaaaggtggcttttgaggcagtgagttctacctgaaggtgggaacagcccagagtgtctggggacaggagtggtaaattctaatcaagccttcccatggctttgtggatgaggatgagtttctaccctgaagctcgggctgttcagccataaaatcaggataatggtgggtgtgcctccttagagtagaatgagaatcagagcagtacaagggaaagctgcagtgacttgtccggtgtcaaccctttcagcatgatgggagagccatgggaccctttcccttgtcctaagagagccagccctcacagcaggcctgggatccaatggcccagcactcaagtctgggagcaccagggaccttggccaaaatctggttctgcttcaacttggtgcccggcctttgtcaagtcacttcctcatttgcaaactgggagagtttggatgaaactattgaatgaaattattttgggggtttctttctggcgctcacagtcctcgcatgctcaccatgttcccttctatttcagtacgcacagcccaacataggctaagcactggcagtactctctttcttg

SEQ ID NO: 156526 - DNA, 623 bp, Homo Sapiens
cacttggttgtgcgtatcttatgcttcgtatagaaggacaagtccttaatctaggctgtaggagccaggtgcagattgtgatcctcttgaatgaagttctggaggaatgtttctcttgagacagtatttctaggtccatgttgacatgaaatcatctgatgataaaatggtgacgattcagagctctgttaccatcttaaagatggactcggagaggaaggcgacctcgtgtcccctgcagggggttcgtgggcaggtgtccccatcaggcccgcgggttggaagtgtcgctgctggggatgaaagcagctgctcctctgcacgcctgatggtttcctccttccacgcttcctttctcactttggacacctgattctataggccatgtgcaaggctgtgtatctggtgtgtcccctgatagctctgcaggtttgatggaattcatcccagggtgcgttgggcacgggtgatctaccaaaacagtttgagtttaaaattatccagtgcagtggttcctagaatcactttgtgcatggaggcagccccctcttcagaatggagtcttagataacatgggtgaattcactgggtgggcgctgagggtgcccaaagttcagaggaag

SEQ ID NO: 156527 - DNA, 562 bp, Homo Sapiens
cgttagaggatccccgatgagtactatctgggatatggcctgggggaggctttcaaccccttttatcttctaggaaactgcctgatgaagtggagattcatgaattctactaaccacattttctgtgactttcaaaaagtccctgatggaaattagacaaataatttactttcacttaaacatcagattttttagttacactttagaaaaataattgaaatgtagatttcaatcactgctgctgctacactttaggattctcataaaagtactttcagttattatgccaagtattcctccgtagagaagagaaaaatcgctctcagtgacaccttagcgagcggcgtgttctgaagggcaagaagccttctttacagagcagtcaagggcaaggacgctgcgctggtgtggttttgactcccgcagggaggaaggctcatccccccacacattttcctccactgcagtctcaggaagaaattgaaaatagtcacatacatttaaaattcctttcccgacttacacctaggccgtcgccctagaccgtctgagtggcccacaa

SEQ ID NO: 156528 - DNA, 577 bp, Homo Sapiens
ttcgactcggtccccgatgagtaatcttggcattgagatccctcttccaaaatagaaatctttgaaactatcatcactcccatcctgagcaccaaaatgtaactcccttcctacaaatatgcttcagtggtccacagcaagaagtacttgccaagatgagctgatagtttactgtcatatattttgtcccatagtacccaagaacaaactggatgtcctgtgacttcctccatattttaactagagaagaaactggaaatacagccagcaacgcatacagtgaaaacaaaatctacacattagaacacagagcctgaacgactaatgaaatatgctccatctaactctgcccaggtaacgagtgccttccactgcaccactgccctgggaaagtcaatcattcacaaactcactgcctttcactagtgattttaatggtggcacgcagttccttaaaagaattgtgtaattttctgaataagtgaagcgactaactacacttcaaagaatccgattttaaggcagtcagcacagaatgcatattctgccgtttttatatggctccagatttactcat

SEQ ID NO: 156529 - DNA, 481 bp, Homo Sapiens
agctcggtaccccgatgagtaaatcttggcttgttcatagacttttccttgtgtctggatgactagtttccactgggtgagcagctgcagcagcaacttcagggacgaatcaaggagtgtgtgatgcatatcatttacttcccggagcaggaagttggtaaagcccaatagtacatcttccctccaatctgagaagtcaacaagtaaaccctgaagagaattttgtgcaatatgtcgcaattcatcatccatatgaatagagagcctgtgaaacgaataaaggaaaataaaatcatttactttattaactggtcttctagagctaacaaggattaacagatattaatgtatatctcttctacttgagtctgaaaatgggtctcccttattttttgcttagtaaatgacttcataaatacctttaaaaaaacttctaatttggccaggcatggtggctcacgcctgccaagattactcatcg

SEQ ID NO: 156530 - DNA, 841 bp, Homo Sapiens
tctagagatccccgactgagtaatcttggatagcaggttcattagacccgaaaccaaggagcatcctgatctggcagagggtacggaactcagtttttctcttgctgtggctaaacctgattcctcctctactgcctgcaggcggattggtcccaatagaggcttctttacaaaggcactgttccagactagattttgttccaggttctctcctactcatttgtaaaacaagaggaacgataatgagccaatttgtagaccatggaggactttcagataaaattttcaaacaaaatcttaaattttctctctctcttttttaaaccaatcaattccactggcaaagctgccgtcttgaattgttatggttctcatggaagctgttcactgcccctccgctacatgtacaagtactttacactcaagaacccattttacagatgagtacaactgaagtccaaagagatgaagtggcttgctcaaagggacacaaaccagtaaatagactaggtagtgttcatccctggcgcgctctctaaaccccatccatttttttccactgggccatgttgcctcagatggcgaaactttactcttctccccagtcccattattcagaaatgtgctttgcctatttggttggaaaggctctgtttagcattacagtctcatttgcaagtgcctgtatctacagcagccatatgtcacagattttctagatattttccttccagttctccatgccttggtactggtgcgtccccttcccacccccgcatttgacagactgagtgtcccagatttttcacacgaactgaaagcctcaagattttactcatcg

SEQ ID NO: 156531 - DNA, 745 bp, Homo Sapiens
aggaccccgcgaggaaactgggccagaaccatgctgtgcaaattttcgttcttactacaccctgtaggtgtctcaaaaaaggtcttttagctcagacaccatctgaaaacaggatatgcattaaataagtcacagcctacccactcatacctgcaactggtttgaattagatccacttattaacattcttcatcaatataaaaaatactggatctgaaggtcccatcaatggaaatgcataactctcagtatttctctggtgagcataaataaggggtccccaagatttgcctcaaaaggaattacttatgattcacccaaagccccgtgagcaactgcgagtaaggctctaactctgacgagaatcctccaaagaagacagtgaaagtcaccaacttagaagtcacaggctttgggatctaccaaaggattaaagtctacttctcctagagtcctgggggattaacaggaacaactctatatatagaatgactgagccaatgggggccacagttttgggtgttttggaaggacagaagcaggagtaaatgggcaataatcaggtacttccctctacacagtgtgcacagacactgaacacagcgctttgacatgcaaaggtaatgaaatattcattctggtgcctccaaataggtttgtttctatactcgctttgtttgatcatccttgggcctccccacttccccaaccattagcattcccagccttccccaccttttgcttt

SEQ ID NO: 156532 - DNA, 549 bp, Homo Sapiens
gagctcgtaccccgatgagtaaatcttggcaaagatctttgccaagtgtacttcttcctgcatgaggaagagaagttgctccttgagtgctgcatgacctttaggctaattttactcctgtgtgaccctgggccgccagaagtctaaaagcccttctctcccaagagtggacttatattttccacatttcaggttgtcagaaacaggaaaggagagtggggctttctttcatttgtactgcaaatctatcaggaaatttggtttctttgtttttgtttgtttgagacagagtcttgttctgttacctaggctggagtgcagtggcacagtcatatggctcactgcagcctcaaactcctgggctcaagcaatcctctagtctcagtctcctgcgtagcgaagactataggtacatgccacacaccagttaatttttaaatttttttgtagagataggggtctcactatattgtcaaagctggtctttaactgctgggctcaagccatcctcctgctcagctcccaagtattgggatacaggctgagcat

SEQ ID NO: 156533 - DNA, 392 bp, Homo Sapiens
  misc_feature (296)..(304): n is a, c, g, or t
ggctgctctagagtaccccgatgacgtaatcttgtgccactggcaatgtggctcgtgctattttgcaaataaagttttactgggacaaagccaagcctatcatttgcaaattgtctataaatattttcatgttacagaatcacacagtttcaacagagaccatcttgtctacaaagctgaaaatatctactatctggcccttgaagaaagtttgccaaaccttagtttatataataaaagatcagctatctcatagacacctatctcacacaacacattgtgggaaaggaccttcnnnnnnnnnggagacggggtctggctcctgtggaccaggcgggacggtagtggcatgatcagggctcacggcagcctcagccaagatttactcatcg

SEQ ID NO: 156534 - DNA, 551 bp, Homo Sapiens
  misc_feature (444)..(503): n is a, c, g, or t
ccctcctcagagacaagctcctgcccgaggagctactggtcctgcacaacagggcaacagccctcccaggagcccacaccaaaggagaactcctgcctcattgcccctcactttcctctcaggttggatgtctcagtgttactgagattaaaatactttccttagtcaaaatcctcctgattcccacagcagcaggagggtgtgaggtctttatgggggctgaaagatgagatttggtgaattacactttccacccttgtttttctcccccagaagatgtagatcctctggctacagggataagcagacacctgttttctttcttttaaagaaagcagtgtctgtctacaaatttccttatgtatttctcaggtttgaaatgttctatgttccattttccttatgtatttctcaggtttgaaatgttctatgttccattttctnnnnnnnnnnnnnnnnnnnnnnnnnnnnnnnnnnnnnnnnnnnnnnnnnnnnnnnnnnnnctacccaacgtctcacaagatttactcatcgggggtcatcaagaacac

SEQ ID NO: 156535 - DNA, 424 bp, Homo Sapiens
ggaattcgaggctgcacggagctatgattgcaccacttgtacttcagcttgggtgacagagtgaaagccccatctctaaataaataaataaagagaggtcctgattcagtttatcaatcccatgtaaactagagagaaaacagcagaaaatttatggggtgaaacctttggtgatggttaattttttgtcagtttggctaggccacagtattcggatatttgatcaaacacatctggatgttgctgtgtagtttttacatgagattaacctttaaatcagtagactttgagtaaagtaattaccttcctatgatggtaaattttatgtgtcatttgactggaccatagggtgcctgggatatttggccaaatatcattcagggtgtgtgtctctgagatgaaattttgccagaattttactcat

SEQ ID NO: 156536 - DNA, 620 bp, Homo Sapiens
ctcttttcactgtattgtcaatatagtactggagtcctagctagacaatcagaccacagaaagaaataaaggcatccaaacaggaagataagtcaaattatccttgtttgcagatatatgatcttatatttggaaaaatccagagacgccatcaaaactgttagaactgataaacaaatttagtaaagttgcaagatgtaaaatcaacataccaaaatcagtatcattcctgtatgctgactgaacaatctgagaaggaaatgcaaaaagtaatcccatttacaacagccacaaataaagtgaaatacgtaggaatcaacttgatcaaagatgtgaaagatctctataatcagaattaggaaacactgataaaagagattgaagaagacctcaaaaaatggaaagatatttcatgttcatgaattggaagaatcaatattgttaaaatgtccatgctacccaatgcaatctacagattctatgcaatatgtagactgcattctgtgacattccttcacagagatagaaaaaacagtcctaaaactcatatggaattacaaagacccggaataccccaagctatcttatgcaaagacacgaacttgccaagttttactcat

SEQ ID NO: 156537 - DNA, 519 bp, Homo Sapiens
cgatgagtaaatcttggccctagagccaagaatagtttccatatttttaaatgggtggagaaaacaaaatctaccaagaataatgtttcatgacacatgaaaattatgtaaaatatacatttaacgcttgtaaataaagttctgttggaactcagctacagtcgttagtttacatatcatcgatggctggtttcgcagtacaagggcacagtttaaagcctgccaggcctaaaatgtttactgtctggcctattacagaagacgtttgctgacccctgatttagggcattcatgaggcttgatgagatgttgaaaatcagctgtctcctcccgtcactttcttctgattgtgggtaggctctggtgcaccagctctccagtgatctcctatctgatgctcagagttctttttcccattgcatggatgtcaaataaaagtgtctgctttgtggcatttctggcttgagagtacctgccccactgtgatttgccaagttttactcatcggggatcctctga

SEQ ID NO: 156538 - DNA, 188 bp, Homo Sapiens
accatggggactggtgttgagcattcaagatggacgcaggcagattttagctggatggaaggatgcgtttctcacagggctgaccattggagtagcagttcctttttttattccatggatggtgtgtttgggctggctcaccgtgggatttgtccggtccagccatgacgccgggggatctctataat

SEQ ID NO: 156539 - DNA, 209 bp, Homo Sapiens
tgctcctggccttgaatcctcatctttagccctcccccagcaaatacacaatttcccttattgtttcctacatacctttgtgccttcgtatctacctctcttccatctgcctggaatattctccctcatccacccctagtaaattcctattcaatcctcaagagctaatgatagcacgctgaaaccttcctgaacctttccctccgccc

SEQ ID NO: 156540 - DNA, 142 bp, Homo Sapiens
tgcatcatgggccaacatatacagccccacacgatacgggtggggtgtgcgcggcttcacatctggctggtcaaagacgacaggttgcgtgacggggatcgaaaatgaggccttctcgttgatgcagcgccgctcaatttcg

SEQ ID NO: 156541 - DNA, 170 bp, Homo Sapiens
ccacatatttattgatgcaattaaaagtttgaggaacaaaaataccctggaagagaatacatgaatattttcatgtatagtggttcaatagtggttatctccagaaagtgagttgtggaagtctatatcatttatttgtttaatattttaaaacaacaaccttgtattat

SEQ ID NO: 156542 - DNA, 103 bp, Homo Sapiens
ccagagctaatgctggcaccccaaggttctgttcagatgtcatccatacgtggtctctgccaggagcaagacgatcatcttgtaggggatgcacatactcaag

SEQ ID NO: 156543 - DNA, 225 bp, Homo Sapiens
ttttggctgccatgaggagggctctcctgaaaagattttccttaaatagaaaaattcctgtggaaaaccacagatagaggcactaactagttttcaagttcttattgtctagattgagtttacagtgccaatgaaggtgacctgctagatcaggagtcagcaaacatttttgaaagggcaataaagtaaatattttaggtttttagactaatagcttcccttaca

SEQ ID NO: 156544 - DNA, 348 bp, Homo Sapiens
  misc_feature (164)..(179): n is a, c, g, or t
cctcccaggcactgcagaggcaccggtgaggaagggtctccaggcttcactcagggtagagaaacaagcaaagcccagcagcgcacagggtgcttgttatcctgcagagggtgcctctgcctctctgtgtcaggggacagcttgtgtcaccacgcccggctaannnnnnnnnnnnnnnnagtagagctgggctgtcacccccgagctccttagacactcctcacacctgtccatacccgagggtggatattcaaccagccccaccgcctacccgactcggtttctggatatcctccgtgggcgaactgcgagccccattcccagctcttctccctgctgacatcgtcc

SEQ ID NO: 156545 - DNA, 528 bp, Homo Sapiens
tatttggagtgctttgaagccttcgttgaaaacgggaatatattcacatgaaaactagacagaataattctcagaaacttcattgtgatctgtccattcaactcacagagttgaaccttccttttgatagagcagttttgaaacactctttttgtagaatctgcaagtagctaattagagtaatttgaagtcttcattggaaaaggctatatcttcatataaaaattagacagttgaattctcagaaacttctttgtgatgtgtgcactcaaatcagagagttcaaccttccttttgatagagcaatttggaaacactctttttgttcaatctgcaagtgggtatttttagtggagaggagccttcgttggaaacgggaatatgttcacatacaaactggacagaagcattccaagaaacttccttgtgatgtgtgcattcaactcacagagttgaaccttccttttgatagagcagtttagaaatactcttttagtactatttgcaagtgtgtatttgtagtgcttt

SEQ ID NO: 156546 - DNA, 310 bp, Homo Sapiens
gacctgcaggtccttgagtggggtagagccccagagaatatggtgtcctgatttgccaaagagtcacaggcagcatgtcttgctggccatgggccactcgcacgggtatgggaagctggcatggcagggcctcttcgggtggggtgtctctcccagggcagtgctcccatctgcccgggaagccctggctgaggtctcagaggagagacaggatgctccgaggaacttgcttgccttcagaatccctatatcttgccaatgcttccctttcctcctccctttctcctcgcccaggcttaacgtgcgggta

SEQ ID NO: 156547 - DNA, 234 bp, Homo Sapiens
agctcggcccgtagcgggtttgcttcaaacaattatcgtttattggtcacttctatggcgggcgcagtttgataactatgtgagcattgggccggcgtgcttcaaccacgccccaggcggacgctcacccaagctggtcctacgttgctggcgttgtcttatagataccgggagggtcggttatgccattattgtcccggcactggttgaatgggggcatgttgcaaccagtcg

SEQ ID NO: 156548 - DNA, 156 bp, Homo Sapiens
ttcatagttgagaaagatgaggcatagacggtagtgaccggcttgagcctagactgcgccaagcttgccagagcagagccgggtggaaactgtcttcctgcaaagccaggttttccttcacggcccctcctaatgatgtttcttttcctatcattg

SEQ ID NO: 156549 - DNA, 477 bp, Homo Sapiens
tccagttctttcgataacgcgatgtaatcgtcacaactgagatgagaaaaccagatacctcgtgaagccaacggatgttgcttaacaatccgagccatctcacgggcctcgtccagagatgcccccgacggcaagtggatagtccagcctctcaggtcaaaaccgtcaagatctaaagccgccacctcgtcggccggaacaccatgccgatgcatcgacgtctcgacttcgaccaaaatcgacgcgctcggcgcgaggtcacgcaccgcagcgacgtcctcacgccgcgaaatcgtcgtaatgaccttgggatcattcaacaggccggtggctacttcgtcgccagggcgccacggattaaggacgatgacatctttgtcccagccgtactgacggaccgacgccacctcttgggctaccccgacggcaagaatgtcgattcctagtcgttgggactcctgaaccagcaactcatgc

SEQ ID NO: 156550 - DNA, 470 bp, Homo Sapiens
ctgctgcctgtcacaacttgggaaaagggcaaaggaagtgaggtgtcagtcatgctcacagtctctgctgctgcagccaagaacctgaatggcgtgatggtggcagtggcggagctgctgagcatgaagatccccaactcctatgaggtgctgttcccagagagccccgcccgggcaggcactgagccaaagaagggggaagctgagggtcctggtgggaaggaaaagggtctggaaggcaagagcccagacactggccctgattggctgaagcagtttgatgcagtgttgcctggctataccctgaagagccaactagacatcttgagcctcctgaaacaggagagccccgccccagagccacccactcagcacagctatacctacaatgtctccaatctggatgtgcgacagctctcggccccacctcctgaagaaccctccccgcccccttccgcagtagtcagcga

SEQ ID NO: 156551 - DNA, 486 bp, Homo Sapiens
cccccctggggatgccaccaaccatggtgaataatacaggcgtgtgaagattgtagtgagacaagcccctcgggatggactgactcctgttcctccattggccccagcaccccggcctccgagctctgggcttccagctgtgttgaatccacgccccacgttaacccctggccggctacccacacctactctgggtactgctcgagcccccatgcccacacccactctggtgaggcctcttctcaagctggtccacagtccttcacctgaagtcagtgcttcagcccccggagctgcccccttgaccatctcttctcctctccacgtgccatcctcactccctgggccagcctcttctccaatgccaattcccaactcctctccccttgatagtcctgtgtcctctacagtctcagttccattgtcatcttcactccccatctctgtccccaccacacctcctgccccagcgtcggctccactcac

SEQ ID NO: 156552 - DNA, 253 bp, Homo Sapiens
aactccgagatccaccaggtcacaaagatctggagaaaggtggctgagaaggagaaggcctttctgacgaagtgcgcctacctccaagccagaaactgccaggtggaaagcaagtacctggccggtctgagaaggctgcaggaggccctgggggacgaagccagcgagtgctcagagctgctgaggcagcttgtccaggaggcactgcagtgggaagctggggaggcctcacttgacaggggtcttctataga

SEQ ID NO: 156553 - DNA, 410 bp, Homo Sapiens
ggcgcataattcaccaagcgattggttttatcatgattgagaaactgtgcctaatcaaatcagccattgagtaggtaaacagtctgtgctggcaggcaccatacacaggtgtgaacgggaatgccacctgcaggagttgcctgggtctgccataacaaattaccccaaacttcatggctgaaaacaacacacatttattgtcttgcaataaatgtgttctggaggccagaagtccagcctcagtttcatgggttaacatcacaatgtgggcagggctggttcctccagaggctctaggagagcatgcgtcttcttgccttttccagctcctggaggcaccggcatccctggacttgtgactctctcctcacatcctcctgcttccacgattccatctcctgactcctgct

SEQ ID NO: 156554 - DNA, 349 bp, Homo Sapiens
ctgacgacgggggaaggaatcatgttgtcttaaaaaaacatcaggactaaggtttaaagaagggaaagattgccttcatttttgtacaataacatgattccttccccaccttaatagtgtgcaaagtaagtcaaaactcactcttcactacacccctgcaaacttttccaagtaacagtaaaatcagtttagcagttctttgaactatacataatataggctgaacaatcatgtaatacacattttatactagacaaatcaatgtacacaactgcccataccaacacacaaaagggaggaacctgatgggaagtgattggattatgggggcggcttcccccgtagtcat

SEQ ID NO: 156555 - DNA, 560 bp, Homo Sapiens
aaaaagcttagtctttatgggagccagataaataaagataaacttagaaaatgtaagtcacctgagctatggcatcattgcagggaaggcacaaacttgatgcagcctcaagagttaagttcagtttctttgcgggagttatgtctgagttggattctgaagggcaagtaggaggtaagcaggggaagggattctgaagggcattttgaaataagcagaaggcgtgaaggcctgaggtccgggaagggcacagcacatttgcggagccagaagtgctcaatctggtccttgtcagttggggaaggttgtgaatgcaggctgggagacacaggtaatacaaaagttaaggagatcttaacttttgcttgctaaagagatcttaaagaagacccagagccctattagacatagtaaaaaccactggaaaatgtgaagatgacttctaggattccgacttgggccactggagaatggtgagaggtatgtttgcagagccagtaggaggtgatgaattaacttgtgtacacgttaagcatgtaatgaatatttgtgtcttttat

SEQ ID NO: 156556 - DNA, 456 bp, Homo Sapiens
cttcgccatcgccagcttcgccaccctcgaggccttgcagaaggatgcatctcttcagcccccagagcgactggaacatcggctgaagcattctgggaagcggaaaagggggggctccagtggggccaccggggagccaggggacagctctgatcgagagcctggccggccccctggggatcgggcccgaaaatggcccaataagcggagaagaaaagaggcgtcctcccgtcactctctggaagctggatacatatgtgacgcggaaagtgatctggacgagagggtctccgatgatgacctcgacccatcctttactgtctcaaccagcaaagcctcgggcccccacggcgccttcaatgggaactgtgaagcaaaactctccgtggtccctaaagtgtcgggcctggagcggagccaagaacagcccccggggcccgacccgctgctagtgcc

SEQ ID NO: 156557 - DNA, 139 bp, Homo Sapiens
atatactgtaagtgaccactttctctgaaagtcctagcgcctccctgggtgttattttcttatgaccaccgtctctatgatgctagactaatgttatgatgatcacggtttccaaagcaatcccccacaactccaagaa

SEQ ID NO: 156558 - DNA, 137 bp, Homo Sapiens
gactcgggggaagggtgtgggcaaatgctggctttgacgctcggggtctaggaacagagagaaatggacattgagaggacctcgttcaacgggtgaggtccatggtagaagcatgacaggggcactgaggattggag

SEQ ID NO: 156559 - DNA, 164 bp, Homo Sapiens
cacatctttcgtctttctgctgatgagtcttgttctcatcaacttgttggaattccctgcaccctttgctgtgtccaccacagtggctgtccttccagctcaattcatactattttgattaacagaaattctgaacttcactgaacttcagtggtcctttacca

SEQ ID NO: 156560 - DNA, 342 bp, Homo Sapiens
ttttcaggttctcagaaattggaaggagagttcaaacaaccaattcttgtgtcttccatgccacagcaaataggcattcctaccagttctttaactcaagttgttcattctgcgggaaggcggtttatagtgagtcctgtgccagaaagccgattacgagaatcaaaagttttccccagtgaaataacagatacagttgctgcctctacagctcagagccctggaatgaacttgtctcactgtgcatcatcccttagtctacaacaggccttttctgaacttagacgtgcccaaatgacagaaggacccaacacagcacctccaaactttagtcatacagga

SEQ ID NO: 156561 - DNA, 310 bp, Homo Sapiens
ggggagggcatgtcctggctgctcgtgggctttcgggggaactcactgttcaactctgcgcggcgtgtgaaacatgggtttcagtgcagtttgccctgcgtgaggcactgatcgcacctgtggctgtgggctgggccctgtcagtgcttatgaaaagaagtggctggttttctaaaggcggatggagactcggacagctgcaaacacagcccggcattgctagagccacagctgggggccccttcccggagcgtaggccctgatgaactgaacctgttctccacacacccgatcagatgatccaccatac

SEQ ID NO: 156562 - DNA, 275 bp, Homo Sapiens
atggtgaatattgcttgatgtctttcatttgaatttggtgttggatatgtctgtgcctaggatgttgaagacaaaagggtggaggaaatgttgtaggttaaaatgggaagatgttttgctaaaacactgtaagaagttggaatataaacaatatgctttggtatcataatcacagtgcattgcacaaagagaaaagtggcattttccatcgttgtactttataactttgatgtgttgcaagctatagtgcatccgtggtggtacctggcaggaat

SEQ ID NO: 156563 - DNA, 381 bp, Homo Sapiens
  misc_feature (11)..(11): n is a, c, g, or t
ctgactacggngcaaggcctagctgcactctctgttcacttcactcccacttccttttaccactgacctcccacagacttatttaactgcttcctttgggagggactattctttcctctcctacctgacctcccctgcttaacagattttccatgatatgctttgtggtcctcagctgttttactttcaggatgccttctatatcctcagcttctcttaacttttattttgcacatccttccagcactgattgcttgtgaactcatctcgtgcctgcaagacatcaaaagtttctccaaagacatcccttcctctctgccctcatcctatatcaaggtcttagctccttgaagactgcattaatgtgtcttttgccttcat

SEQ ID NO: 156564 - DNA, 425 bp, Homo Sapiens
aggcgtcagaatttccatggcatccatggaatcctcattttggctgtcgtcctgcccctcctcatcctcatccttgtaacacagcttcttctggtgcttgatgagatcaaagatgcgctgaaacaccaggctacattttttgcactggtagttcaagttgcttgttcgaatgtatctatcatttgtaagctcacgccgctctccatctttgccctctccctgattctcataattcttcctggccttctgtcgggcattctgaaaccacaccactatcactcgggttggaaggttcagtaaattagggagttgctcaaattcatcatcctttgggtaagcattggcatctaagaagtcctgtaataccctcagctggtagtctgtaaaccttgttcttgaagacctcttgcttcctccgtagtcag

SEQ ID NO: 156565 - DNA, 361 bp, Homo Sapiens
gtaccctgctgatgactttccaaaataatggcctgacacgcccaccagcagtagcaggcatcactcacctcactggccttcactggcgtcaggtctctctcattggggttggtgggtgtattctcttgctgtttgtcaggctgctgtgaacttgaccttttgctacatgcttggggatcaggggtcacccagtttgtgcagcagccatgcagtgccaggtctctggggtccgatcaagtcagcaaatatgtatgtcataatggttagaatgaagtggattctaaactccacttaagaatacattaataatggtgttggtgtgttattcatcttgaagaagtgacagatgtttccctcagca

SEQ ID NO: 156566 - DNA, 318 bp, Homo Sapiens
ccccagatgtcaacagtgccgacggagggggagaaatcccgctccagtgtgatctccaagcaatgaaaaacacagcacacaggattctgtggcatatgctatcacagggtacgtgtttttaaaggaaaggcacacacgtatcttaggaaagggacatacggagttgatgacagtcgcttgtctctggggagaagggctggctgcccgaggagcaaagaggggaaactgacttcttcctctaccttttcaactttgtaccttgcccatccagaggattttgaacgtaactgctctagacgcaacttttccctggctctg

SEQ ID NO: 156567 - DNA, 359 bp, Homo Sapiens
gggcccctcacggtacaccacatggtaggccacgtcctgccgggcagcaagcactggtgaggcctcgacgaaatgcaggaactgctgagcttctgcgtctgtcaggtacaaggccaggctcatggggccaggccagtgcctgcacagggcttccaacatctgcagccggtccatggacagctgggccacaagggtggcatcgtgaggccgggggggtggcggttcatggggcaggaaagtgacatgcacacggtgcacagtgagctgctgctgccggaactcaaagcaggggtctttctcgtccagttgtgccagggcctgctgcaactgctcagcaccaggtgggggctggctggggc

SEQ ID NO: 156568 - DNA, 285 bp, Homo Sapiens
ttgaccataggaacgttaacgactccacccaggtgggcgtccgtaagggctccgccgtagccggagggactgcagcatgaatattgattggacttcgctagggctggtgtccgtcgtcaccgtcgtggccaccgttctcattgtctccgtcgtttcgggtggggcattaatgctcgatcgggcgcatgcgcgcgcgaaggctgacagcgacggtgccgccgggttggtgtctctgggctggacggcgattggcgtcgcaggcctcatcgtcttgtatgggttata

SEQ ID NO: 156569 - DNA, 192 bp, Homo Sapiens
cctttgttttgatttgtagttttattccattgtggtcagaaattatacctgatatgttttcaatttaaacaaaattgttgagacttgttttgtagcctaacatatggtcaatcctggagaatgagaagactgtgcattctgcagctgttgaataaaatattctataaatgtctgttaggtccatgtggggat

SEQ ID NO: 156570 - DNA, 476 bp, Homo Sapiens
tatcaacagggaactggctagacgcctagggaatcagggaatatccagaccagggagcaggagcaagggatggataccaacagggatgttttaatgcagtgaagaaggagctccaagaattctgttaaggtgcggaacagagggtggagtaggcgactgtttgtgtttaaagaaaaaagaaaaaggaaatgcatatgtacatgtgcatgtgcttaaaatctgtctggaaagatagtgaggagcctttctttgtatacttttttgtgctttttgtattttgaatcatgtcgatgtattacatggtcaaaagttaattaaagcaaacaataaagaataaagagtccttagaattttagaatcaaatggcagaatcttagaaacagaagagaatttccaggccctgctggaacactttgagctctgcggcttcccataatggtagggcgggtctttttatgggtcagctctctcaagat

SEQ ID NO: 156571 - DNA, 202 bp, Homo Sapiens
tgtgaagccatgtactggggctggtcggtcggtggtaagccacctcaattgatcttcagtcagttacagttagaactcttatggtcatatgccttctaccacctaaaccgatgagagcccaacagagagaagtggaggctggaagggttctggagtttgaactttcgagggaggaaaccggtcggggcccggcgttcgcata

SEQ ID NO: 156572 - DNA, 358 bp, Homo Sapiens
cagggcattggcttcggttggctattgttaagactacggaccttgttagactatggaccttatgcagctttcagtgtctgtatgcgctgtgtgtgcattctacgcagggtgatctgatgtgtagtatcttgtaaccatctccacgcctgccattgccatagaactgtgtcgtcaccgagtggaactcacctgccttgtgattctccttttgagcctcatccccacacattgtcccgtgtgtccttggcatccacaaatcccttctgtgttctccatctctagttttgtcatatggaggatgttatgtacatggaagcgtgtagtgtgtaaccttctgtaagaccggcgatctcataaa

SEQ ID NO: 156573 - DNA, 683 bp, Homo Sapiens
tagccacttctaacagtacccggcgagagaggcggtgccggggcagaaatgtgtctgcctcatatcgagagacacgaccttccaggccaataaggtcaaatcgacccatgtctatccgctggaggggatggacatccgtggcccttagcaccagagaggcggtgctgaagcagatgcctggggtgatgaaaggggaggtaaccggtcgagggtcgaacagatttggatgattgcaaacttttctcagctgcatcaaaatgttgatgacgctcatgaaatggcctgtggctagtgtctccttagttgtggtctgtgccatgaagtcatcatagagacagcgttgacgcttggagagcctgcagcggataacatgctcgtactttttgggcatctgcttctcaacatccaccttaactcggcgcagtaaaaaaggcctcaaaaccttgtggaggcgtttgactagaccttcattatactcttggctgccctcaatcatgccagttaggggattagagaaccactccttgaactcgcgatgagactggaagacatggggcatcaaaaagtgcatcaaggaccacagctccatgaggctgttctgcaagggagttcctgtcaggagcaggcgtctctggctgttgaagttgaggagtgactgccagcgctgtgacttgaagttcttg

SEQ ID NO: 156574 - DNA, 290 bp, Homo Sapiens
tcatggactaggagttgtgaacgaaataaagactgcgacactttcgtcttcttttggaaccgggataggaaattcccccattcaatagtgccattgtgggtgattcgaataagctggtggaagatgtgagagctagctggctggaactgccacgtcacagtgagtggcaccttgaggtcagagtaaccggccctcacgacacaggacaggtcaaaggtgttggttaacatcacttgcggctgacggctcatcagactaacttgtaaacttgactccagagactttacagt

SEQ ID NO: 156575 - DNA, 613 bp, Homo Sapiens
gctcgttaccagggtggaaagtttgtctaatttgggataaaggatttagcaaacccgcttggccagtcagccactttctccagttgcttttatctaaaacagagcctgtatctgatctccacttgcctatctacagtgtgtgcggctctctcaactggtctggaatttgagagggtaaaaagtgggtgctaaatataaagccccaacagccccactttttaggcctccctcagtcaggaaccaggacttacagcctacagctccttgttgatctggctgtgggagacccttactcacagagccttattttctcgagcacagaccctgccccaggcatctgggcaaccagaggtagccgtgtaatactcttccagccaatgagagacactgggtttcctgagctccctatcgctttcctgatgcagagacaccccttcctgcctcaccacctctcagttggaacgtcaggctggagacatgacccaaggagccaagcccgagaaggaaacgtgcaccctgaaacagcgggatgcagaaccctgaaacagcgggatgcagaaccccgaaacagcaggatgcagaaccctgaccggcggtcgcatacaggggatct

SEQ ID NO: 156576 - DNA, 542 bp, Homo Sapiens
tgatgagctcggtacccttccaccagcaaagacagtcaccactgtgcttggatctgcccaccagccccaccgggcagccagagctccacatggtttccatcatggttacaaaataaacaaatgcaagtcactctgtcccttctgtggcccccctacagcccgacatctgcacatctgcgagaacattctctcgtcattagagagatgccacttggggatctcagaagccatgtggggaagacagaaaccttcagctctagttcaggaacattaaacacaccatgctatcccagtttgttcataaaattcttgtgttaatgtcctaggggaaacaaaaaggatagctattttagcagcattctctagtttggttgggattctgtgtggaggagaagagctctgttttccttctggctgcaatgtcttgattctctgggtctttgtggttctccctgcatggccctgccgggctctggtgagggaagataagagtgtgctccaaggctggcgaggctggggttttcgtctgcacctggtgaaag

SEQ ID NO: 156577 - DNA, 118 bp, Homo Sapiens
tagatcccccaagcggcagttcatcgcgctgccagcctgcgaatccgcctgccagaattgaaacccgctcgacaccgaaataacgcagcatccaccaggcgcgcggggcggagaagag

SEQ ID NO: 156578 - DNA, 684 bp, Homo Sapiens
gggcacggacagatgggcctcacctggggccatctgcttcctcccccagctctgtttgaaaggggacgcccaccggcaggtggtgggtttggcctcagtggaaatgcagtgagagccaaggccttttgcgataacatggagttatgggcaggggcctgtccctgacttgggccttaaggttagggccccactcccagcttcatctgcttgcctgaggttctgggggatagtgcacctgaacacctccctttctgctttcagaggtccccatagccggggaagaagtactgggtctggggggaccccatgtggtgctgggttctatcttttgttgtgacatgccagtctgacttccttctgccttttcccaacccgttcttatttctttcctctcaaggctgagttctctgtgaactaattaggtgacagaaaaaactcattaacgtggatctgagtaaatggcctgaatcaccgctgtggctggggactaggagatggcatttgtgcgagccctgggccccaaagacaggagatgaccaatttttcctcttagatctgaagagggtggaggcgggagagacatcgttgctgcagcttcactgtccttggaggaagtaaagacattcctgatttgctccaagcttaccttcccccagctccttctggagagcgacaagcctcgtg

SEQ ID NO: 156579 - DNA, 567 bp, Homo Sapiens
ggagaccttcatgccaggacaccagcaagctggcaaaacagatcttgcaaagggtttctgcactctatctgtgagcttcattaataggcactcaggactgagaaccttcatgtcagctgtgacaagtgaatagtcagtagagagaagctattaatttaagacaccgttgataatgcagtctactttaagaacaggcaacaaggggcttcatatgttgaagcacagacacaagacatcctggaactccaagtccaaaggggaatgctcagggcagatatcaacaatgaaaccttttaagttgagtcactctcagcctgacggctgccgagcccaacagccatccttggttacaagttagaggaaaagtccctgagcatatctgttgtttcctgtgtgtaaagatgctaaatgccaggtgctttcctctagagtggaagggccggggcggggcagtgcctgcagaggcagcaaggtcaagagagttcatttggttattgccattaaaaaagacttcccagccaggcgcggtggctcacgcctataatcccagccactcgggaggctgag

SEQ ID NO: 156580 - DNA, 289 bp, Homo Sapiens
agcgaagggtgctggaaggaaagaacaggttaggagagaccggaggtggggagaaagcagagaccccacccgcgtggaggaactgcgggaactgcgtggtagaaagagattaggtgcaagagaaggtccctctcccagggagataggctgtgggaagatagaggagcgacaaaaagtttcaaaccttgacagcctccttcagggaaccagaaaagttaaaacaaaaacacaaagatgtcattacttaggttgttattttagaaataggacctgtccactaaggacaacc

SEQ ID NO: 156581 - DNA, 399 bp, Homo Sapiens
gcaagaggcttctttgcaaggttgagttatggagacatgccaccgcaccctggacatgcacacacacaggctagtctaggaacttgagaccctttaaggagctggtggttgctaagaccatgaatcgattccagatgccactcctcctgctctacagacaaaaaggtagatatggaggtgctctctctgccaatcctgaatcctccttctgccttcctagaggcctgagaacctcagcaaaagcagaggagagacctaagggaaatgtttaaacgtctgctagccaaaggggaagagtcatgaatggaaaaggagaccaccataggacctagaaagaaagaggctgagggtcagaagttaggaagggtaccaggcccctgaaacaggcaaaagcagggg

SEQ ID NO: 156582 - DNA, 333 bp, Homo Sapiens
cacatgctaaattggaggactggggagtcataattcccgttacgtgttcttgttgctgattggggaaattttttacttcaccccccttggtctcattagctcaggaaaaagttaaatttgtttcttctatatttgcctataggaagaggaatatttgtctcttctgtctacttgaggatcgacacattaatcactggaagattagtttgatatagctatatgcctctagttatccagcttggaccttgtatgataggggtataatagttggaaattttgaaaaaggatgtagtcctgccatatgagggacagctgcatcagaccttctctctc

SEQ ID NO: 156583 - DNA, 507 bp, Homo Sapiens
ttgtcttcaatgcaaccagtctcttgtgccaaaaaggttggggaccactgaactctaaatcattcattaatctaaccaacttgtgtcaagtgctctctgtcctggggcagttctgggtgctgggagagagtggtgggcaatacagacagacatgggcttttcctctttgagcctacagatgcatttttcagtgtttagcttgggcccccagtccctgggaatctccctttctgtgtaattcccacaggctgtcctgggtattggccaccctttcagtgttgttgagcttaggtcttggcttattggtaaaacagaggcccctcaatgtaggacttgtcacttatggtgcttccagctttcagggctagtcagtgcagagcctcagatggtgtgaccattcattcattcattcattgaccagccgccacgtgtcagatcccacgcagtaggtattgtggggccggggtagggggcatgcgataatgaatgaaactctcaacatcctgg

SEQ ID NO: 156584 - DNA, 340 bp, Homo Sapiens
cagccatcttgttccagttgctccagtcggaggcgcctccaacccaccagtgcctcttcctagtccatcgcgccttgccctcccactccaccaccagttgtcaggtctcttaactctgcgatctcgggactcttaacttgggtctcgcactcccatgctccaatccttagagacagcaccccttttcacacacactcgcgatctccctcccgaacatacccctctgggcttcacataccccacaggttgttgcctgttccgaggccatgggattcactatgtcagtcgtagttctgcccagcccccaatagtcagggcggtggtagcataaagagtcatc

SEQ ID NO: 156585 - DNA, 649 bp, Homo Sapiens
  misc_feature (79)..(79): n is a, c, g, or t
tttctgggagcaggggaccaccagtcgcctaaggagaggtaaacctgccctggtcagaagcggagcaggtcaaaactcncacgctgctcagtagtgggattgcacctgtgaatagccattgccctccagcctgggcaacgtagtgagatcctacctttaaaaacaaactaaatagaagctttcattctgaggtcaagctggcattcttaactcgctgctttatccaggtcatgattcctctctttcttctggaacaaatacattcctccttccatggggcagtgtgaaaggcagattttccacgtgggcctcctggcttctttagagtaggacttctccatctttatctgcatccgagacccccatcagacgcttgctgggcgtgtgtgtcttgtggtcgtcagcacctgacgtccactcagcactgtctccagctgcagtgcttgtggacatctgtacttaacttgtctaagaacccggcttggtttccccaccttgggaaaaccctgtggtcggaggctccagctattctttcccaggtaagaaaaaccattccatgttcatcagatggcagggatgtgggtgcattctcctgaagtgggggccgaggaagcggcactcatgctgattcacactcattcacagccca

SEQ ID NO: 156586 - DNA, 127 bp, Homo Sapiens
gaagatccccaaccatcaaggtgataaatgagtttctgggggagggaggcatcggccgggcccctactttgcaggaccacacacctctgtcgcccttccaccttcttcgcagaacaatgtgtcacag

SEQ ID NO: 156587 - DNA, 595 bp, Homo Sapiens
ttgacatcagcagacacgcttctcacagtgcccacctgtgggaagggtaaggatgatggccatgggaaatcatgtttgaaccacagaaatattccagttcattcaaatcactaggcttcttattctcttatgccatattgttaaaaccaccatcaccaggaccaggaacctacccattttttaataaaggccaaataaaattttttccacttagaaaaagcacatgccctcctaaactcaaaattcacttggaattattagaaagtagacgatattcctaaactgcaggaaaacttttaaaactcaagttttagaaatctcatttgctggatctttcacaccaagaaagaagcatggagtttttccattctcattaacattgtgtaaatactgatcaaagagactgtgtgggagagggcggtgagctctgataaaagctcaggctcctcaggcagggaagagcaactggatcctcagatgacacctacacaaccccgaagggcctgcgcgtcccgtcccgggagcacacacagggatccgcatgaggaaggcttgttcgaaaagcctaacataagcattgctgtagaggaagaga

SEQ ID NO: 156588 - DNA, 280 bp, Homo Sapiens
ccatgaacgagagtcgccgaagccgtcgtcccatttaagtcaaggtcaacgagcctgacctcagcttgctcagattctccgtaagtaacgactcgcactgtgccggtgctttccagtcggcaggccaattcggttgcccccggatggtcggcattagtcgcgacgtagcgcacctcgggacgggttgccatcgacacgaagccgtcgaagtacgcctgcggggtaccccaattgtctaggtgatcggcttccacattggtgacgacgacgatctggcttg

SEQ ID NO: 156589 - DNA, 317 bp, Homo Sapiens
agaccccatctcaaaaaaaggatgctattccccagaccacctcacagacccccagtagtgtcctctgagaagattttgtccccctgagacctcctttggagatggtacatgcatttggcagaccagccaacctgccaggacaaatgtgctgtctgtgtgtggtccctgtagtcagccccctctcccatcatgaccccagctcccacaccaggcaggttccctccaacctcaccccagacgacactgaacacctgccgcaggaatttggacataaataagccatccaacccttcacactgatgggtgaggggaatcct

SEQ ID NO: 156590 - DNA, 644 bp, Homo Sapiens
aagatacacagtggctaataagagatattgacactaacctgcccgttgaagttgcatgtaagtatctcaagggaaatggctttgaaggtcccctggttgagcccccagccaagggcaggaagagagtagagaagtgttcaggcaaggacgtgccccagagccccttcatggggcacccagttctgagtttggtccaggactgccaagcacctcctccattcccagaacatccccacttcccagctgcagaggccagaagctcagctgggcattgacagccatgtgggctggcaccttcccatgcatcccctgaggctccttcaactcagaccaaaggccatgtagcctgagtggcttgtgaaacccctggtgtttatgcttctcattggaagcgggtagaacaactttctaaaaccacattgacaggttgtaagttcgcatcagcttcctgcctggcaaagccatggaactctggaacagtggtcagccggcagcatggatggggataaagggtgatcatgatgacaaagcctccccgggtttcattagcgagggaggttttataatctctccaaagtcacattactcaattcttacaggagccttctaaggcttgtaagattatttagtctttattttataat

SEQ ID NO: 156591 - DNA, 424 bp, Homo Sapiens
aaacaagtgtggatggcattctttcttctgattttgagaccatcttcatgataagaagcagagataccgatatccttttgtatttcttttcaaggaaattgaggtttattacacacaaaaggacttgcttgagtccatatggtaaacgagctgtgggggctgagccttgaacccaggtgttttaacttttatctgtctctgttgctgtgtcctcttggctttcatgtgacacgtctgattgtcctgcctgcataactttgacacacctctttgtgctttgtgctatatacaacactctcacctgtctcctgtccaactcccagccatagcgttggccttccagtcccccctatcatcacttcctccctccccgtgcctcacaaaaagggggaggacacggggatccttaagtcggcggcgccac

SEQ ID NO: 156592 - DNA, 451 bp, Homo Sapiens
  misc_feature (368)..(406): n is a, c, g, or t
tcactctaatgatactgaatagaatttagaaaaagaatatttgctttcatatttcattttaaaagatggcttgatgaaaaatggcttagagttttctttgaaactgcttgtttctttggaagttatttcgctttctggaacattcttttagttttagtaattagaattgttttgaagtaattagtaaccacatccagtcctagttttctatatctattcattgaatacaattgaatagtggggctattttctctttattgtttttgagctagttctcttaagctatttctcttagggctcaaaggctgtagttgtgtacgatgagaaagaatcagccatgccaggcccgaagacaggtccctctagcnnnnnnnnnnnnnnnnnnnnnnnnnnnnnnnnnnnnnnnctattacccacgaagggggatgtacaccgaagggggatgaccgga

SEQ ID NO: 156593 - DNA, 533 bp, Homo Sapiens
ggacatgagcaatgggtcctgtagaaaagtctaaacagccaaattcatgtgtgctttgtctagcacgaattgtcttctcctctgtgttcttttcccatagcattcacgcgtggacatcctgcatattgtagtttttgattaatttactgcctgcttccctttactagaatgtaagctccacgagggaaaggacttttctccattttgtttgctgcggcatctctggtgtctagagcagggtctggcacaaagtagatgctcaataaatagctgttgcgtgaataaatgaactccttccataggcacacttacctttgtgagtattgttatattacaggggagaaaacggaggctcagagaaaataagtgatgtgccccagccctcaactacgaagggggatggacacacgaagggggatggacacccgaagggggatggacacacgaagggggatggacacacgaagggggatggacacacgaagggggatggacactcgaagggggatggacacacgaagggggatggacac

SEQ ID NO: 156594 - DNA, 402 bp, Homo Sapiens
tccagctgtccctgaagccgccggtcctgtttcaacagcttcaatcgtttggtgtcagctcgaaaaacagcctggactggtggtgtttcatttgctaccacctctgggaggcagagggagaacagtcaggcagcctcaagagcctagagtctcatctttctttcccttcaattacatttttgttttgcctgaccctgcccagctctttgtggttgttccaaataaaacactctcaagttcctcattgaccctcccctcctttccttaggatccctttgccggtctccagtctccctccagatgcccttgcaattccatagccacgatttcttctattgttggatgggaggtttatagaagaaactgcccgccccaccccaaaggggaatgacccgggtgccc

SEQ ID NO: 156595 - DNA, 324 bp, Homo Sapiens
ccggtgcagttactatccacatgggaaagtctcccagaactcaattcattgtgctctttctcttttgtgaacttcaaatgcagggttcaagctcacttttccccttcaatgatctgtaaatgcttgaagggggatgcccccctgtatggcggttgaggaggagaatctctgtgagttgattgaatggggagaggcaaacatcaagcccagtgcccagtcttgtgggaggatctggtgctactcagtaaaaggaaggtgggaggtttgggagggcagatggatgagctcatttatggacagattgagttcaagcatctacagatc

SEQ ID NO: 156596 - DNA, 121 bp, Homo Sapiens
ctagataacaagaaatttgaaaataaacagtaccctgctaaataacccaaaggcttttgtgtggacacattttttaaaatttctcttgggtattctctaggggtgtaattggggtaccgag

SEQ ID NO: 156597 - DNA, 172 bp, Homo Sapiens
ccaaatgcatttgcaacgtggttgcaatgttgagccgctccgacatgtcttgtgccagctcttggctagttgcaccgacccgccgatgggacgggaatcaaacagcattgccaggactgacagcgcagtgctgcttcggtcaccagagtagtggcactaggggtgccgagct

SEQ ID NO: 156598 - DNA, 135 bp, Homo Sapiens
cgagctgccccccccagggacccaggctttgatgcgagatccatcctcgttcaaggtttggttgacaggaacagagctcatcgaggcgcactcgacagagatgtgcccacgagcagtcgagtacatgtttctggt

SEQ ID NO: 156599 - DNA, 492 bp, Homo Sapiens
tcttcttttcattttggaaaaaagaaatgaattttgctgcatcatggtcatcactaatgcttattaagcacttaactttgcaccagacattgtttaatgtgttttacatatacagtattaacctgcttaattttcctaataaccttttgggggaggtactgccatcaccctcacttacccaggaggaaacagcacagagaggttaagtaacgggcttaaatggagaagtggcaaagtgggcctgacccagaaagcctgtggtattaccaccaccatatacaccgggtacatgttagaagttcttttggaaagcagttatttgaattgcatacctttttctagccattgaagcaacccctattaaccctttcaacacgctagaaagagagcctaacgacttttataaagcaatgaaatagtccataagtagtaatctagaacagaactaatatatatcccactggttctttgaggagtgggagtggaggggtg

SEQ ID NO: 156600 - DNA, 154 bp, Homo Sapiens
ctcggcccccattctgaacttgggccagatcttaacctgctggtaaagcactggctgagggtttagactttcaaggaatttgaggttgttttccctgccttattgcaacccagtgtctggctgctgagaccagaggcttgggccacccaaggga

SEQ ID NO: 156601 - DNA, 156 bp, Homo Sapiens
ctcggacccctcatagggttcgcggtcctgtgagaatctaacgccaccactgatgtgacaggaggtggagctcaggtggtaatactgacctctcacctcctgctgtgcagcttggttcctaacaggctacggaccagtaccagtccatggcccagg

SEQ ID NO: 156602 - DNA, 376 bp, Homo Sapiens
cccccttcgtggaaggggaggtggatcatgccatggagctgagcgagttggctcgagaaggtgagctttccatggaggagctattgcagcagtatgcaggagcctatgccccaggctctgggagcagtgaagatgaggatgaagatgaggttgatgctaatagctctgactgtgaaccagaggggcccgtggaagcggaagagcctcctcaggaggatagtagcagtcagtcagactctgtggaggaccggagtgaggatgaggaagatgaacattcagaggaggaagaaacaagtggaagttcagcatcagaggaatctgagtctgaagagtctgaggatgcccaatcacagagccaagcagacgaagggggatg

SEQ ID NO: 156603 - DNA, 556 bp, Homo Sapiens
gaaagttgaccagacagctccagaggctgctgataagaaccaaagttttataataatcagatcttttcagatcaaatcatcttctacaactccggacaagacacccatgggtccccatttctcagcgtggaaacagggaatagagaccaacatcctccattccttctgttctccctattgcatctgcatcctgggagctatctaccacatgaacgtgaatatatgtacatgcttgcccacctgtcctagtgaatatacatttccctaggggaatgcctggggatgcctccgaaccctccttcgagatcatctcctccctacctcggacatggtgagattcccacccagctttcctttggtcttccataggtacccacgtgatccctcatcacagacaccacatgacaatcctctcaagatactccgtgggacaccccctttatgcagcctctgtcctggcccccgcacacccaactttgggtcttcgaacatgccccttgccgtgctttttcgctgtcagcgaatctcacgatcctctgccaggaagagacgctgc

SEQ ID NO: 156604 - DNA, 559 bp, Homo Sapiens
  misc_feature (502)..(502): n is a, c, g, or t
  misc_feature (511)..(511): n is a, c, g, or t
tttgcaagcaaaggtctagaaaattccatgtgttgtaagccactacactgtggtgattttgattaccacaggacctgctcttactcctgcagtgttcaaggagctctagtccatgatccttgcatttattgttctggggaaatctgccctgccttgctaaagagaaatatgatgccaaattgctacaactgccggtgccaccaccaccaatgcattcggtgttcagtttgctatcataatcctcagcacagtgccctcgaggacagcagcttggcacctggcaacacttggaaacccaggaagctgacagtgcaggaatttcctggggacaaatggaatccaataacaggaaacaggaagaccagccagtcagggagggaaatggctcattccaagactagcttttcatgggcaacccctttccatccttgccttgagaacccagcactggacttgtcaagctaccgagcaatttcttctcttgacctccttggagacttcnaaacatgcnttgaaaaatcagaggaaacttcagtcttgctggaggaagggtaccgag

SEQ ID NO: 156605 - DNA, 1107 bp, Homo Sapiens
  misc_feature (167)..(167): n is a, c, g, or t
  misc_feature (469)..(575): n is a, c, g, or t
cctaaccagttcctctgctctacttgttggtcacctctgtggttccgggtcactcctctccctctccccactgttcccagctcactgcctctggggcctcttctccaccccatctgtgtgtctcttcctcctgttctctcctgcctggaccccctagttcactcctntgcctgggcttcctcagaaccctgaggtccctgctttctcagcttgtcgctgtgctcccaccatagagaccatctagacagcctctggtctaccaggacaaggcccagtcccactcagctcctttgagagcaccagaaacgcttagggagacacctgtgttgagaccacactgggcgcggtgccagagggccctggtcaggccatgcccctgcagtgtccttcgttcactagacattgcgcctggcttgctgtgggtggggatgagttgcttgactcatgtttagacgcatggttctgtctnnnnnnnnnnnnnnnnnnnnnnnnnnnnnnnnnnnnnnnnnnnnnnnnnnnnnnnnnnnnnnnnnnnnnnnnnnnnnnnnnnnnnnnnnnnnnnnnnnnnnnnnnnncctgccactgccattgggcctcagagctcagtcttgccaaggtggagaaattctggtcgaagaggttgaccggtagactgaagaggccttgagagcctggccaggtggctgtccacgtgaggtcatggtcacagcatgggggccttgagtgcctggccaggtggccctccacgtgaggtcatggtcacagcatggaggccttgagagcctggccaggtggccctccacgtgaggttgtggtcacagcatgggggccttgagagcctggccaggtggccctccacgtgaggtcatggtcacagcatggaggccttgagagcctggccaggtggccctccgtgtgaggtcatggtcacagcatagtttggagctagggagggactgtcagcctggaggtttggagactcattctggaatctagtgtgggtcaagccaacttcagggaaaggctgagccagggtaggagtcacaggagcagacgaggatgtggggtgccgtgcgcagagctccatgaccagcttgggaagttaga

SEQ ID NO: 156606 - DNA, 391 bp, Homo Sapiens
  misc_feature (88)..(224): n is a, c, g, or t
ggcagatctagaggtggcagcatcgggctccagtgggagctctcttcctggctcaccaacggccactatcttacatggtggtgaaagnnnnnnnnnnnnnnnnnnnnnnnnnnnnnnnnnnnnnnnnnnnnnnnnnnnnnnnnnnnnnnnnnnnnnnnnnnnnnnnnnnnnnnnnnnnnnnnnnnnnnnnnnnnnnnnnnnnnnnnnnnnnnnnnnnnnnnnnntaatgaaagtccacggcaatagccctctaccggtgtaactaccatccagatggagatggccagtgtctcccatgccccagacatgccctacaaagtgcccaccattctagcatctttcccatcggtctgtggtgtttggtgtgggacctcacaccaagggggatgga

SEQ ID NO: 156607 - DNA, 404 bp, Homo Sapiens
ggaggaggaaaccgaggcatgaagtgcagtgacttgccagagggagaggtcagcacctggccctggcacttgggttccgctacccataagaaatccacccagacaccccagacacaagaccctgccgttctgcctgggagagctcaagctattctggggctattttctatcccaccaaggccaaatcatgaaacacatcctggccctttcccccagctcactctgcctagtgccaactccaaccagccaaggtgggccacccacaaagccaccagcctcaggccactctccatggcctgacacccctttcgccaccacccagctctcccctctccagttcaccctgaaccacatgggaactacaggtacctggcacgcgtggtggtgacaaagggggatggaca

SEQ ID NO: 156608 - DNA, 348 bp, Homo Sapiens
gtccatcccccttcgtgtttgcatcttggactctgttttacttcacagggcagggatgcaaacacgaaggaaagaggtgtggcacaggcacagttttaatgtgcaaacccttcctaatgcaggatccccattgaacggcctgggacctggctgcctttgatgatgtcatatctcatctcatgaaccaagatggcaggaattctctgcagccaaccttgacaggaaatcatcctggaaatccgctgcttccttaattcatgcaagaaacagggagaaggggtatggtcctctcatgaatgttgtgccattcagttgagacgtgtcacgggttcacctgacagctcaggg

SEQ ID NO: 156609 - DNA, 715 bp, Homo Sapiens
  misc_feature (50)..(154): n is a, c, g, or t
tccacagcaaagacttctgaatccaagaagagaaactgactgggcaacannnnnnnnnnnnnnnnnnnnnnnnnnnnnnnnnnnnnnnnnnnnnnnnnnnnnnnnnnnnnnnnnnnnnnnnnnnnnnnnnnnnnnnnnnnnnnnnnnnnnnnnnatgagccattgtgcccaccgtctctggttcttaaccttctgcctccctcttccagttttaaagaatgcttgtaattacatgggctctcctagatactccaggataatcttgttttaaggtcaactgatgagcaacattaattttatctgcactcttaattcccccttcctatgtaattgtgctgtgtaacataggacatgagcaattggtggcggtgggggttattactttggccaccacagtaactattttatgccaggtactcagctaagcactggtgaattaagcatgaataacacacactccctaatctccatccattcatgggaggagcacttcacctggcatgctcctgagagtctcgggagtcatagaagtcttctatgaggaggtgatgcccaagcggacaagtgacagaggagtcaaagctagctaggaagagagtagaggtttaaggggaagcatattataagcagaggatattacccacttcagagactccacagaggagaaagagtgtgcgttcaggggcagatgagctcagttgactccatacctcgt

SEQ ID NO: 156610 - DNA, 397 bp, Homo Sapiens
acgatcagaattgcttccatgctgcagggctgatttactgtgaaggggtagggttgttgcaggactggtttcccaggctctctggaacgcctgttctttggccaggaggcagcctgtagcctcattgcaaggaggatccctcccctaccccaggtagggccactcccacacatgtgcacacccacacttataccccacataggcacaggcaggcttactcccacctatgctcacacacacacttatacccccacaaaggcacaggcaggcgcttacacaccccatgcgcgcacacacacttatacccccacataggcacaggcaggctttactcccacccgtgcgcacacacactcatacccttcacattggcacaggcaggtgcttacacacacgt

SEQ ID NO: 156611 - DNA, 380 bp, Homo Sapiens
tgtccatccccctttgtgagaagggaggtgtttggagggttttgagcagaggaatgaggggatctggcttaaggtttttaaaggatcactctggctgctgtgttcaggttgactgtaagggcaaggatggaagcagggagacctgttaggttgatgcagtaattgaagccagagagaatggtggcttagaccaggtgggtagtaagagaggcagtaagaagccgtcgtattctgagtattgctgataggatttgcttatggtttggatgtgcttatgagagaaagggtgaagcacgaccctgtggcctttggcctgagctattggaaggctttagttaaacagtgtactgagatggagaagactgagtcccaagggggat

SEQ ID NO: 156612 - DNA, 265 bp, Homo Sapiens
gtgctcggcaccccatcccccttcgtgaacctgatcttgtcagagtcacaaggacctccacgatctccacattgctaaccaaatggtcaatgttcagtcttcatcttattcagctcatcagcagtccataacttcctcttccttgatgcatattcttcacctagcttccaaaacctatacttctcctggcttttctctgccttaccggtaatgccttactggtctcgttgctggctccttctcttctgccccactttatacatga

SEQ ID NO: 156613 - DNA, 420 bp, Homo Sapiens
gtagacagatgacatctattcttctttctgacctttgtgggacagtaatgagcacaactgatgtggaaaaatcatttgataaattgttgaatgatctacctgaattagcactggatactcctagagcaccacagttggtgggccagtttattgctagagctgttggagatggaattttatgtaatacctatattgatagttacaaaggaactgtatattgtgtgcagctgagcactggacgggcagcctttgaaggctgtggcagacagatgccagcagacaagcactctgctggtggtggaggcaggaggagaggagtgaacgtggtgagtctctggaagcacgttgagcagctctcctcttcttggagctcagggtttttcgatgagtggtggggctgaagctagatgggcagctgac

SEQ ID NO: 156614 - DNA, 196 bp, Homo Sapiens
ttggaattgacttcttcaaagagcttctggcatagtgtgtagagtggggtgcaatggggaggaggtgaagtgtaacggtcacatttaccacaaggtccaagataagttggacatacatactggagccaaatttcataagtcttgatctttcaaaagcataagccttattttgcaagtaatcacaaggggtgccgag

SEQ ID NO: 156615 - DNA, 165 bp, Homo Sapiens
cagcgcactggcttttcctctccacttcgtgtaagtttggagttctggcctgtaaattaggtcatcaaccacttcaccttgaaaggagaaaaacacgaagagcttaagcagtttatctatgctcttacagctctttagtgtcagagcagtgtgttcacctagaaa

SEQ ID NO: 156616 - DNA, 608 bp, Homo Sapiens
gcagccccttgtgggggggcgaggtcaccgtcctgccccagccttggaattctttgagagcagggaacagcctggcccttcctacctcctagaggttgctgaaggcccagagaatgtaggctgctccatctgtgagtgaccccccgtgaagtggtacgaggcagccacccccacgccatccacacccgctggtgatcggattccacctctgctacttcttacccctgatacttaaggcagttcaatttcatctgagaaacattcattaggcacctattgtatggcaggtcccctttgtccccgcagggacgagtgggtgacaactcacaagctagtgggggcagtggaaatggccccggggggctgcagttcctctgggtcctctgagaaaggagaaagaggatttaacccactggggggttgctgggaatgggaccaggaaagcctcctgaatcccttaagaccaacgattctcaacctgaggaacaagttcaaaaataaagaaaaatggcatccaattcccaggttcccccgcagcgtatgaaagctccgtactgagtttccaacaagaactcaccacctccccctccccagcggaggagtgcagg

SEQ ID NO: 156617 - DNA, 408 bp, Homo Sapiens
cctttcctagtcaagatcctaggaaaagtagtctctcacctcctactcctggctccaaatagcctcaaaacatggcttctgtctccctccctcaattaaaactgttctcaccagagtcatcaatgacttcctacttcccaaatccatcagcacattccagctctaacagtcttccacccttcctggcagaaatgctgccgccctgctcttctgcctcccactctccacccatgtagacattactaaaccattactgctgtttcccacggagcctgtgggatcctcagaatcttctcaaggcagtgcactggaaggctgacaggaactggggcaaaatgtaagggttaggggaagagactgcatggagagactgagcagagaagcaggagtggagtccgcatttctgcc

SEQ ID NO: 156618 - DNA, 286 bp, Homo Sapiens
ggggaggcttggtacagcctggggggtctctgagactctcctgtgcagcctcaggattcacctttagcgactatgccatggcctgggtccgccaggctccagggcaggggcttgagtgggtcgccgctattagcggcattgatgtcggtacatactacacagactccgtgaaggggcgtttcaccgtctccagagacaattccaggaacacgctgtttttgcagatgcacagtctgagcgtcggggacacagccgtttactactgtgcgagggaccgcatccgccg

SEQ ID NO: 156619 - DNA, 127 bp, Homo Sapiens
tttagaatgtgggttttatcctgagcagtgggaaggagtgaagggggcaggcatcagtgaaaagtgatttactctctgccaggtggtccagaaccctgcccccagcctcctaaaccccatctgaccc

SEQ ID NO: 156620 - DNA, 123 bp, Homo Sapiens
tacccagctccagctggagacagtcagtgcctgaggatttgggggaagcaggtggggaaaccttggcacagggctgacaccttcctttgtgccagagcccatgagctggggcagcgtgggtga

SEQ ID NO: 156621 - DNA, 239 bp, Homo Sapiens
atccaggcgctgctacgaggccgtcgggagaccagcggtctgcgcgaacaagggaccctgtgtggttaccagcaggccaattaccttcttcgagaccacacacggcgacgacgtcgaattcgcgacctttaatgcggtgggccgtcacaacgctcaccccatcacggtcctcatcggattcacgtgctcggtcagctgggatctgttcctgccgcactactgggtgccgagctgagatg

SEQ ID NO: 156622 - DNA, 357 bp, Homo Sapiens
tcctttcattcctttgaacaagccaaatattccatacttcgagccctgtgcacacgctgtactccactctgtttggaatattcttctatgtggtctatgcatgtctgacttttcaaccttcaggtttaagcttcagtgtggcccatgtcagtctatgctcatcacactatctgaagaaattcaccacccagtgtccacggaatacccatcccagctgtgcttgttgagctacttgttgcatgtcgttctccttgggaatgtatattccatgaagagtaaggagcattccatttagactccagccagaaccccagtgacattctagggagtgctgagtgtgctctcgctccctccccc

SEQ ID NO: 156623 - DNA, 347 bp, Homo Sapiens
gggggtgggaggtggctgcagacccaaagaaccagcagcagcagcctggaaagggaacagagccatgagcacagggagacggtggagggatgaagctgacatcttcacaggaaaaccagctgatctctccctgaagatctccttggtgtgtactcacctgtcctttatactggctgaactgttcattcccacatatgaataagtgaataacatgagtaagtgcccaaccctgggccaggcactgtcataggcgtttcaggacactaatgatggaatccctggcctcattaagcaaaccctctggagggtgacaacgttcaaactcataggctgctaggacttagtgt

SEQ ID NO: 156624 - DNA, 321 bp, Homo Sapiens
gtatttgttccctgtggatattgcacacacttagaaatggaacaaatacaagaaggggtgagaggtaacgtctaatgcaactccagtgggcctggggtccacagtgtgatctcgggaaaagacacttttgctctgggcctcatctttcatgctgcaccagtagaggttgagattaaatgaaattcagacatcctcctcctatgacattgcaccttccagtgccttcccattttgtttagacccagaccctgtgcctcatctcagcctagggtgggcagcgtccacagagacagcactgaggggttagtgactcccttctga

SEQ ID NO: 156625 - DNA, 428 bp, Homo Sapiens
tgagaaccattagaagtaaatacaaaattgtaatgcctgtttcacagtgggacaatattatgtggttcaggaaaacaggcctaaaaatatggtattcacgagcagtgcacactaatcaatatgtaacgataataacatcttacatagtcttagttcttccttcctcactaagtctagaaatttctaataaatgcttgatctttttgaaattacttgcctttcttttctatgtggggtcaataacaaccttcttttgtatctcataagttgttatgcacatcaaattagataatgcatacagaaagaaacagggaaaaaaaatggtacaaatgtaagaatgaaggaaggaaggaccatttcttgtttttcttcctattagcatgtgccttactggcataacaccttgcacaggggtgccgagctgagat

SEQ ID NO: 156626 - DNA, 334 bp, Homo Sapiens
tttgttatattttgcttagaattggcctcttcttcctccaccctcagaactgcctcaaagttgacccccttgactgatttattgtcttcaaaagcatgttcctctatctcttcctccagacgatccgctgcctttcttacatcttcaagaatatcatcaagcatggataaactttggttttgatgttgcatatttttaagggcttcaacttgatgtttttctgctgccagaagttccatatattctgtttcttcctttattgcagcctctctcagggcctccaggcgctgccggctgctctccttcatgttcacgacatctttgtaatccccct

SEQ ID NO: 156627 - DNA, 437 bp, Homo Sapiens
ggaagtttacaagcagaagctttgcacagtagccgaggcccacatgcactatagaacggactttgtaccccatgatgtgtcatggccactgcaggcatgagtgtttcagtataggtctatgaacaaacctgtgaggtcccaaggaccaggtgggtccctcactgtcacgttcccctccagtgcccaggatagtgttgtgcacatcatacgtggtccctcaagctcccattgcggcttgcgctagtgatgtcatgtcgaaggaggacagtgttggtcgtcagagataaagatttatttaaacagatagttgcacacacacaaagtcatgttgaatgtgatgcttgccacgaaggaggagtttaggacactggggagggggtgataataatggcaggcttgacctagtaggggggcagggtgcagaaatgtcctctctg

SEQ ID NO: 156628 - DNA, 287 bp, Homo Sapiens
gttatttcatcgggaaagccttccaatagaaattacacggggcggggatctgagagggcgatcgcagctgtaactaggacagccaaggacggcctcgtggggtaacatgggatctaagacaggaggaggtttcaagaaactgcgcagatctgaagcagcagcaccccaggccgcacaagcagcacaccccggggccctttgtcagctgctgtgtttaatgaacgaggaggaggtggtgtggcttggtgggggacaccaggaggcaatgagaacgaaggggatggaca

SEQ ID NO: 156629 - DNA, 112 bp, Homo Sapiens
ctcatgaacggaaataccgggccgtgtgagtcccccgacacgagaacccggcccctaccgcacaggggatcaccatgccaccacttcgtacgcatcgcgctggggtgccgag

SEQ ID NO: 156630 - DNA, 131 bp, Homo Sapiens
ctcggtcccctgaagatggcagagtggaaagctgggaaggacctgaggctttgatggagtcctactgctgaatcatccaaccctcagaactaccctgcctctctatgttatatgtgtgcattgctgaagcc

SEQ ID NO: 156631 - DNA, 144 bp, Homo Sapiens
gctcggcaccctattcgcttttcattgggacagctgccccattgtgaagcggattccaccttccgtgcatgacacggaaggcttgccgttcatgaagcatggttgcgtcttcagtgcgcaccgccggatgaacgacatgctggg

SEQ ID NO: 156632 - DNA, 112 bp, Homo Sapiens
taaggagctactaggtgcctcggaccatgccatgtcggcccttcggggcggcagtattggaatggttttccaggaacctatgaccgctctggacccaactagggtaccgagc

SEQ ID NO: 156633 - DNA, 128 bp, Homo Sapiens
acgatccgatcgaacacggttagggcgcggcgcacgatgtcgacgtgacccagggtgatgggatcgaaggttccggggtacacggcgagcgtcatgactccgaggctatcggggggtgccgagctcga

SEQ ID NO: 156634 - DNA, 182 bp, Homo Sapiens
tttggatttttatggaagctttgttaagtaggcaatgattgattaaatcactggctgttggtatcaacttaaccttcacgccctctctcctccccagagattaacaggcaggactgtaaatcccaaccctctaatcctgcctgtttctgggtaactaacatccatccaatagggtgccgagc

SEQ ID NO: 156635 - DNA, 156 bp, Homo Sapiens
gcaccctagggctcgatcccaggacccggggatcatgagctgagcgaaggcagacacttaaccgaaagagcacccaggaacccctaattacatggatttttcaccttatcggtagtatattcttggttttaggaggtgttcacccaagcttccaat

SEQ ID NO: 156636 - DNA, 285 bp, Homo Sapiens
  misc_feature (285)..(285): n is a, c, g, or t
ctgaatagttgtgtacttttaaatctcacacacagcctgaaaaataggcttacccatggtaagcattcagtaaatatttgttactcaaaagaataactttaaaaacgtattgccagctcaaaaattactagccccttcaacactgacactgaagcccaacaggagcataaaagtactttaaaatacacagtgctaactagcagagtcacgcgtcggaagtgtgcaggttctgtgctagtggacaggaaagtaaggtgacaggagccggacgtggtggctcacacn

SEQ ID NO: 156637 - DNA, 272 bp, Homo Sapiens
gaggagtaggctgacgtggggcaaccggaaagcatagtgtggggaaggacgagaacagagccactgatgatgctttctcttccccataggagacagtggtgaacagtccttcttcctagtcaatttggggaaaggcagagtatgttctacttagagaatgttctgctgtaacacatttgaaaagagtaaaggaagtgatggggaggaaaatcatgcaaggataactgttatcttgatttcccaccctgagattggacgaagggggatgcaca

SEQ ID NO: 156638 - DNA, 307 bp, Homo Sapiens
gtgagaatgcaagagggaatccttgacctatccctatccaaccagttttcttggcacacaccttccattctctgaatgagcccagattaactcactgacccctgtgccacgtatctcccactccatcacccgcccaggctcactgcttccacttgcgtcccttcatatctccctactgacctccacttttttctaactttgtcgccaaaggagtcacagaaataaataggaggattcaaaaagaataatttcagtacatttaaaaaaattgtagaatataggattctcatctatgtttatcacgttc

SEQ ID NO: 156639 - DNA, 429 bp, Homo Sapiens
ggggtggtttctgttttgttttaaatcatggttcacttcgtaggactgatgtctgcactgggctgggtcttttggttctgcagattgaaaagttacaaacccagctggagagagaaaagcagagcaaccaagatctggagaccctcagtgaggagctgatcagagagaaggagcagctgcagagtgacatggagaccctgaaggctgacaaagccaggcagatcaaggaccttgagcaggaaaaggaccacctcaaccgagccatgtggtcgctgcgggagaggtcgcaggtcagcagtgaggcccgcatgaaagacgtggagaaggagaacaaagccctccaccagacggtgacggaggccaatggcaagctcagccagttggagtttgagaagcggcagctgcacagggacttggagcaggccaagg

SEQ ID NO: 156640 - DNA, 509 bp, Homo Sapiens
gtcccagggtgcgcttctctggagcccacgtggctgactgtgagggctggatgcgtcacagaggggaggctcagacccaccttcgtgttaaagtgaaaaaggcccaggcctagcctgcaggcccatcccccgcccctgcagccaagtccgcggccgtgtgatttcgggagacacctgaggtccctgggcctgtgtccgcagccatgcctcacccccagctcttcagcggtgagagcgtcgtgtcctggagtgacctgaacatcatcatctctgtgccctggtacctggggctcatgttccggacccggaaggaggacagcgttctgatggaggccaccagtggtgggcccaccagctttcgcctccagatcctgaacaactacctccagtttgaggtgtcccacggcccctccgatgtggagtccgtgatgctgtccgggttgcgggtgaccgacggggagtggcaccacctgctgatcgagctgaagaatgttaaggaggacagtgag

SEQ ID NO: 156641 - DNA, 440 bp, Homo Sapiens
atgatgctcatttacaggcagcgagtggcaagcctccaaaatgcccccactgattcccggcacatttggggtgagtgccttccctcactgaaatagggtagactggggaaccaacaggatactgcagaacagcagggtagcatctgtgattataaagacatgtcacttctgccttgtgatctcttggattacttgctctggggaaagctgctgacatgttgtgaggacacgcaagaagcatgtggagaggtccgtgtggcaaggaactgtggcctcctgtcaactgccagcactgctcgccagccctgtgagtgagccatcttggaggcaggcctgccagccccagttaagccttcagatgactctgaagtcccagctgaaatcttgtctacaatctcatgagagaccacaagctagaaccactcagctaacccacttct

SEQ ID NO: 156642 - DNA, 326 bp, Homo Sapiens
ggagctacgtggaatcatgtgagggaaccgtgcagagctctctgtgcagctacgggaaagtatgtgagaaaccgtatgaggaattgcgtggggaactgtgggaggatttgtgagaaactgaatgtgactgtgtggagaaggcggggaagcaggcgggaagtgtgtggggaatcgcttggggaaagtgtgcgctcgtgtggggaaccacatgggggctctgtggagctggagctccgcgtactctgaggacctgtggaaatgggagcggaagtgtgtggaggggtgtggggccgcgtgggaatcgtgtgagggacgccgaggagcca

SEQ ID NO: 156643 - DNA, 107 bp, Homo Sapiens
ccaccgactgcaacagtcccgactcagcggcggcgcgtcgagccaccctggtcttacgggcagcggctcgacaacaacactcaccagggccgcgggagcaggtacag

SEQ ID NO: 156644 - DNA, 389 bp, Homo Sapiens
ggacgtagctctttcctcctgaccctgagaggaagaaggctaggctgaggtgggaggagacaggacaagattggaaaggcattggaatctgattttactggttgaaaggtagccctgtcacagagctgactgatagagcttattgcaggacacccttaccatttatcattgtctcactggctcctttccaaaagcttcctccattaagagggtcagagcctcggcctccttgccttctagtgaaaatttcctttgttttaggggattttaaattagggtgcttaaggccttgaagaacatgggtgggaagagaatataactaattaagtcatgtgtgtcattttcctttgggatgagagagtgtctgtttgtgtaatgagacctttctc

SEQ ID NO: 156645 - DNA, 453 bp, Homo Sapiens
agcagctgaggacctagaaaccggcttttagaattgtttcccaactaggagtccataggccgtgagtgaggctcagggtctttgggtaaagggccgccgtggaagggctttctcactgggcgttgtggtctccagcctggctgctcaggggtgtttggttctgtttattctttagtctttgttcctgaaagttggcccttgccagatgaatgacctggtaacttttgaagggactgttatttctgtgtgcagtggcgaggggaggttgagaagccgacaaggaagtcaagaagcttggggcggaggggggtcttcagatggctccagggtggccacacggacgaggctgcagaccagctgagttgtgtatcagggtagaactaggcccctagagtgacacagcacctggctcacttagacggagagtctttctaacagccagaggttctcctg

SEQ ID NO: 156646 - DNA, 234 bp, Homo Sapiens
atttgctgattctctccttttgggttaattctggtatcactatttagctttttctacattagtctcttttaagactataatagtgttcaaagttagaaaaaaacactttggcaaaaagtagactagctggaactgtataggtagttccagccaacacatgccttcatgtccagaaaaagacaggttccatggaatcagtgctctcgggtctagtaagaatgaagggaagcagtg

SEQ ID NO: 156647 - DNA, 538 bp, Homo Sapiens
  misc_feature (398)..(398): n is a, c, g, or t
  misc_feature (489)..(489): n is a, c, g, or t
tctaaccaaccttctaagttgtcttttaaatattcaacataggcgcacctttgcaatacatttatagatactttttaattttctgtcccacagtctatattttcatgtagatagaattttagcaatccattttaattctgcctttgtcacctcattgcaatgggggtacagatcatgtacgcttttggacttcgttgattttgtctttcatatctattacatgaccattttctcattaatggtgtttgaaaaaatattaattaatttgaggaacataatgtcctgtttagagctattatatctgttagtcattgcagaattcaaatactgtgcttttacaaattatttttcaagaagacttactagtgttttaaaaagtactctaaaatatcccattntgttgtagatgccactgttcccatagtatgctgaagctgtgttgagcagcacgtgaagggtcaccttgctgctatattatcttagtgggtnttaacatttaacatgctttgtcttgaattacatctctgtattatttcta

SEQ ID NO: 156648 - DNA, 135 bp, Homo Sapiens
cccccaccgaccatggccgccatcgacaccgaatgatggggttgagccagtgggggcctcgtcatgagacgcccgctccctcgtccggccaaggaatgcagtgcggtgacttcgagggcgtcacggtgatcaagt

SEQ ID NO: 156649 - DNA, 120 bp, Homo Sapiens
ttctctcgcgaactaatcacgaattcgtgattagttcgcacggagaatccaagcttggattctcaaggaccggcagttgcgcgcagagcaccctgatgtgcccggcaccacgggcactca

SEQ ID NO: 156650 - DNA, 154 bp, Homo Sapiens
ctgaaaagtttcatggcttttatatattctgtcacttagcgatgcaatgcaactgcgctcggagcctgctttaattcagccaccaacaagcacagcggcttcgttggcaagtcgacccgcttccaatgatgatccatattaacttgataattat

SEQ ID NO: 156651 - DNA, 311 bp, Homo Sapiens
gcacctgcacggagggcgtggagtagaacagaatcatcagagagcatttgactacttcaatttagcagcaaatgctggcaattcacatgccatggcctttttgggaaagatgtattcggaaggaagtgacattgtacctcagagtaatgagacagctttccactactttaagaaagctggtgacatgggcaacccagttgggcagagtgggcttggaatggcctacctgtatgggagaggagttcaagttaattatgatgtagcccttaagtatttccagaaagctgccgatctacgaagggggatggact

SEQ ID NO: 156652 - DNA, 405 bp, Homo Sapiens
tcaaagcatcactccccgggaggaggagggcaagcggcgggctggcctgcaggcagacctggaagtggcagcccagaaggtcgtgcagctggaaagcaagaggaagaccatgcagcctcatctgctgaccaaggaggtcacccaggtggagagggaccccggcctggacagccaggcggcccagctcaggatccagatccagcagctccgcggggaggatgccgtcatctcggcccggctggaagggctgaagaaggagctactggcccttgagtaagagggaggtggacgtgtaaggagaaggtcgtggtgaaagaggtagtcaaggtggagaagaatctggaaatggtcaagcagcccagttcaatggctgcacacggagagtcatgcttcgaggatcctctc

SEQ ID NO: 156653 - DNA, 786 bp, Homo Sapiens
ctctagaccatcccgttagtggttgtgggtagcacccagcgtctagagttgggtgacgtgcatagacctggacttgaggagcaggattcctgactggcttgctgtgaaggggcaccactggggcagtgacgcagcttcacacgcagctcgggaagcacacagtcggcgcagatgcttccaaaatgtctgcaaggctgcggcctctactgcatccagatggtgaactgcctaactctaccgcgtcccgatggtgaactgctaactctgccgtatcccgatggtgaactgccgaactctaccgcatcccgatggtgaactgccaaactctaccgcatcccgatggtgaactgctaactaccgcatcccgatggtgaactgccgaactctaccgcatccctatggtgaactgctaactctgccgcatcccgatggtgaactgcctaactctacctcgtcccgatggtgaactgcctaactctaccacatcccgatggtgaactgctaactctgccacatcccgatggtgaactgctaactctgccgcatcccgatggtgaactgccaaactttacctcgtcccgatggtgaactgcctaaacctcgtcccgatggtgaactgcctaactctaccgcgtcccgatggtgaactgcctaactctgccgtatcccgatggtgaactgccgaactttaccgcatcccgatggtgaactgcctaactctaccgcatcccgatggtgaactgctaactaccgcatccgaagcagttgccggggtaccgagctcgg

SEQ ID NO: 156654 - DNA, 666 bp, Homo Sapiens
gagcctatactgaaccatggaaagatctagaatcagcctgtcctgaaataagcagatggaaaaccttctaaacttggaccgatgagacaacctagaacccaccagccctggaatgtgggtgcatcaggagtcttctagaccaacaggaccagctagagcctcagccagacctgacgtcagaagggttgggaactcagccaggcctagaatgctgcctgcttacatggactttggagctccactgggaatggtggggagagttcccagggaggctgagggtttggatctgctgactcaccttggatgtagctcttacttcccaccggtgccacacatggacctcagccacctgccaaccactgcccatggtatctggcagcctgggacagacccatctgtctccaggaatgctgggtggccctcactctgacatctggatgcccacgctctactaggccaggtcctagggcctttgtaactggagccagccgtggaacccacagcctttccagcaggggttgtgacctgcagtgccattgtcaccaggcctagggggttgacagggctcatcggcctttaggagctcctgagatgagttgtatttgggtggctgcagctctgggtccacagactcgggctcacagcagactctgacctccccatgcc

SEQ ID NO: 156655 - DNA, 435 bp, Homo Sapiens
tgagccgggcacccagcgcttcgagctgcacaagaaggcgcaggcgtcgctgaacgccgggctggacctgcggctggccgtgcagctgcccccgggcgaggacctgaacgactgggtggctgttcacgtggtggacttctttaaccgcgtcaacctcatttacggcaccatcagcgacggctgcacggagcagtcctgccccgtcatgtcggggggccccaagtatgagtaccgctggcaggatgagcataagttccggaagcccacggcactctccgcgcccaggtacatggacctgctgatggactggattgaggcgcagatgaacaacgagtaccttttccccaccaccgttggcactccgttttccaagaacttcctgcaggcggtgcggaagatcctgttgcgggtgttccgcgtgttcgtgcacgtcta

SEQ ID NO: 156656 - DNA, 498 bp, Homo Sapiens
cgagctcggtaccgatgtgaggttcgctaaaagccaaaaacaggatcagatggtgaagctcaaagtcctggaaaggggtcagaaacatgaaaacacaggagccagcagccctcagggcccagaggctggtcaggagcttccccagtccgaagcacgggagttggcggtgccttagcgtggacagtggtcgattggggagttcaggattctgctcaaagctccattgccgagggctgaccacagcattccagaaaggaacccttgttgtagaaggagcctgccatcgcaggccgtctcctttccagagaggtttttggtaaccgccctatctatgtagtggggagcctgcctggaccctgagaccaggtgatccccaggtgggggccagcctcccctgccacgcaagccggcaggaaccctgagttccacctgggtgcgttgtcaccgttggcatacgtttgagtaataccgtcggtcatccgaaacagtttccggggg

SEQ ID NO: 156657 - DNA, 460 bp, Homo Sapiens
caccggcggagcttgtcctctgtgtccctcagagccatagcgtattcattgacatcatcggagacacccaccatcttgcccagctgctggtgtacgctgaggttgtacatcatgaccgccccatccaggacttccagcagcgagttctcggtgaggggctgctcaggctcctcggggggccgccccagcagcaagccctcattccagtggctgccttcaatgtcctcacgggtcctttgctccacgctcagcgtgcggaccttcactttctccgaggtgctcagaggccgccgtggggtcatgaggctcacagccgctgtgctgagggagcggttggctcggcccaaagttggagaactgagccagccgggccggggcaggggcagtggccccccaacagccagggcctgcatggggcgctgggccatagctggggctggctcctcatcctcatttaggt

SEQ ID NO: 156658 - DNA, 248 bp, Homo Sapiens
  misc_feature (158)..(167): n is a, c, g, or t
taataggcacaattcccatgttacacttcaaggaaccaacatcagctctttacagtaaattactcaaagttacagagctaagaaggtctcaactgtaggacctgaaccttggttttctgactctaggaccaagattttttatatttgttccctccttnnnnnnnnnnttcattcccttctttaaaaaaaagtgaggtcacaccatgtgatgaggtcacacctggcccagatgcccggggtccgcgcag

SEQ ID NO: 156659 - DNA, 381 bp, Homo Sapiens
caggctacacgcgtcagggtcaggggtgcaaagggtctcaggacggggaggacaccagaagctctccgttccctcaagcctcaccccagggctggtgcagggtggcccctcacctccagccctcccatgcctccccctgaaagcccttctcacctacagtatcgcccgcagctcccaaatctagctgaccaacactctgtgcatcctttcctcctcattcaaccatcatctattaagcacccgctgaatgcctggggactaaagctggcacgtaccagctcccattattacactcttgttaggccatgggtggcttaaaatcagccatatggggaggatttacagcacagcgatcggccaactcatcaggggtttgtttcc

SEQ ID NO: 156660 - DNA, 518 bp, Homo Sapiens
  misc_feature (210)..(268): n is a, c, g, or t
aggacaagaagcgtcgctcatctggaataggctgttctaacgaaggcgggaggatcctagatcagaagaagacaaaccggaagagggagcctaggaaaggaaccacatgcacatttagtgcaaaccatgtaaacataacataacaggactatgtggagcaagggggagtcaggctgtggacccaccagggaatcttgattcatgtttttnnnnnnnnnnnnnnnnnnnnnnnnnnnnnnnnnnnnnnnnnnnnnnnnnnnnnnnnnnntggagttactagcacagttccatgttggggaggttgtgaacgtccctgatatatggtgctcaggaaccagtagttgcttggaattgtattagagctggggtaggagctagacatgggggccagggaagaagggaagatgccgcgaagaagggcctggaaggggacgaagggcgtggattatcagaggaagtgggagtagtcggcaaggatgggtggggagtgttgagtcatccaagcgttcagcaaatgt

SEQ ID NO: 156661 - DNA, 359 bp, Homo Sapiens
gtctcctgccgggcaactcacccttctttgaacgtagctcccgagctgagtcgatgccagtggatcggtctgacagatcctttcggggactcaacctggtgctgatgctgtttggtttggttccttgtggagtagagtgatttaacacattcctatgatttaatatgatatgaaatataaatatgtaactgtgatataaacggcgtagaatgaaatgtttttaattgaacagtatacgttaaggcatcacgtcaagattggaggacttcatgtcagttttacagtgagaaattgtgtggagtgacggaactgcagtgccttgctctcgcgccccagcacctggctgcaaagtgtcacgg

SEQ ID NO: 156662 - DNA, 645 bp, Homo Sapiens
tgtttcggatgctgcgtggggtagctctttctgagtccccgcttaggaggactggtcctggtagaacagcgagaggggaagtcgtccttctcaggcagtggctgggattgccatttgcactgcttgagggttttatattaccatcgtgtgggtttgcttttcttcagtcctagtctcagaatctaccttctacttcacacttaaaattctgagagcagttggcaaagctttgccttctctgtctttgtcggggcaccaataacagtcatgtttgattttctggaggaattgatagaaagattgggcgtcagctaaagccaaataaaacattatagcagtatctgtggttattagaatatctgaaatctcatctgatgcccttacctataaacagtttcacaaatcccacacatggcctagcccacctcttcatgtcgcccatgaagtagctccatccacagggcccagatccctcccacacatggcctagccctcctctccatgtcacccatgaagtagctccatccacagggcccagatccctcccacacatggcctagccctcctctccatgtcacccatgaagtagctccatccacagggcccagatccctcccacacatggcctagccctcctctccatgt

SEQ ID NO: 156663 - DNA, 415 bp, Homo Sapiens
ccatgaagaaatacttcaaaaagactgccccataaggttggggactgttatggagaatgtccctccaaagatgccaattatccaagtgggcccagaaatgggcactccctgagtgcctaggactggactgaggagctttcatgaagaaagaggtgcagaggacctggagaagaggagtagagaagagagaggcaggctctgcacattcaaccctgagaaataaaagatgaggtcaggaagctttattcagcctaaccaagagtcagggaccagcaatcaggacagtgactttgtaagaggagcagaacctcctgagggaccccacacctgcttcattggtacagctgttaacttgttaccttgctatctttgctactttgcctttattacatcagtcaccttccacgttaccttg

SEQ ID NO: 156664 - DNA, 623 bp, Homo Sapiens
cggcaactgcttcggatgcctctcagggctttgtgttgggacactgactcactgcattagtactttctagactgtgagcaggggaatcgaggaacctctcagggctttgtgttgggacgctgacacactgcattagtactttctagactgtgagcaggggaatcgaggaacctctcagggctttgtgttgggacgctgacacactgcattagtactttgtagactgtgagcaggggaatcgaggaacctctcagggctttgtgttgggacgctgacacactgcattagtactttctagactgtgagcagaggaatcgaggaacctctcagggctttgtgttgggacactgactcactgcattagtactttctagactgtgagcaggggaatcgaggaacctctcagggctttgtgttgggacactgactcactgcattagtactttctagactgtgagcaggggaattgaggaacctctcagggctttgtgttgggacactgacacactgcacttgccatcttcatgtttggggctcttctgggcagatgggcttgatcctcacctgtgaattcctctgctctcctttgccaagcaatgcttgcccatccgaagcagttgccg

SEQ ID NO: 156665 - DNA, 542 bp, Homo Sapiens
taaccctagagagagggggacagagagcacaattgtctacgtgcattgagaaataggacactgatagtccgtggtgagggaagtgaaagtgtggatggggtggcaaactatggagtgtaaactatgctgagccatggagggaaggagaggtaaaggtggagattaccaagcatagtgagtactttctcaagaagatgcctgtgaagagggaagggtgaataatatagagtgttatacttaggtgtgtatgcaatttgtttttttgccttcttgagagatctgggtatgaatcctggtgctactacttgctgtctgtgaccttagacaagtcacatgaccccagacattcggttttcctagctgcaaaaataactcactgcatagcattgtatgagggttaaataagacaatacaggaaaagcttttagggccagatttcgacacatcataaaaaggaataatttataattatcattataaataaatgctgaggagaaatgaaccaccagttagaaactgaaggggttaatggtttctacagg

SEQ ID NO: 156666 - DNA, 139 bp, Homo Sapiens
ctgtccctctgtttctgggtctctgtctccccatctctgtccctctgtcccagtctctgggtctgtcagtggctgagtgtctggcctgctgggacactgcggtggggccctgcacccgctcctggctctcccacttgtc

SEQ ID NO: 156667 - DNA, 415 bp, Homo Sapiens
cggcaactgcttcggatgcggcaactgcttcggatgggacctgccattttctcacagataaacctagaaggcttgagcttcttttaaaataaatttgcataatcattctgtttatgttcatattacttaattagtttggggtgatgaaaaacacatgcaggttttggagttaaatacacgtgattcaagcctgcagctttgagcatgttagcaaacttcctgaagctctccctacccagtttactgtacattgtgagacataaataagatgacatttaaagtgctcagcatagagtctggcaaaaggtggatgtacttaataaatgtgtaattgcttgctatcttgactcttctttatattaatatttctatatatttattccgattactgtaggtttgagacacacacatccga

SEQ ID NO: 156668 - DNA, 372 bp, Homo Sapiens
aggataagggggggactactgtatacacaccggatgaggataaaggggggactactgtatacacaccggatgaggataaggggggactactgtatacacacgggatgaggatgagggactattgtatacacaccagatgaggataaggggggactactgtatacacaccagatgaggataaggggggactactgtatacacacacgggatgaggataaggggggactactgtatacacattggatgaggataaggggggactattgtatacacaccagatgaggataaggggggactactgtatacacaccagatgaggataaggggggactactgtatacacaccggatgaggataaggggagactactgt

SEQ ID NO: 156669 - DNA, 559 bp, Homo Sapiens
ttagtaaggggttgtctttggctttctgtactcctgaaggtaagccctgttacaagacttctagagttgactgctgctaaaccaggggtctaatgaagagtttgtcccacagagaggaccagtaaggaacttctggaaaccctcttggcatcaagttgaaccagcggctacattttagttatatgacaacttagcctgctgttgtttgttaggtccaacccagaaaatgggaactactcttaagtatttgaactgcagggatttaatccaggggctgcttatacagaagatggtaaagctgagaagccacataggtagcagtgaggtcatccatagaatgggagcagcaggaagctgcagctgcctataggccagagggaccatgggaggaggcagggttcctggagcccaggggctggatttacctggcagagacgcttctaggaacagagagaggggaggagaaataccttagcttttccctgcctcccatcatccattttcccaccaaagcctcccatgactgaaccatccgaagcagttgccggggtaccgagct

SEQ ID NO: 156670 - DNA, 180 bp, Homo Sapiens
tccccgatctcctgtccgtccttctcgacgtcgatgatctcatcctggaactggtctttgttccccgcatcgtcttctttcgtcttgatgacgcgagtcacgtagttcgttacgtggctgtggccctgccgagccatcttggcgtacatctgcttcttatcttcgttgcgccattccggg

SEQ ID NO: 156671 - DNA, 417 bp, Homo Sapiens
aatcagtttgttccctgtggtattgagacacttcttcaaggaatgatttggatgtttctctgcttccttacgtttgatcttcctcctcaccccatgggatgtgacttcctccccctgcccagctcaccggtcttagtgttagagatctggtagacctggggcctcactgtggcctttgaggctgccaacgtggccctcctctcctgctctctggtcctcctgccctgagggaccatgtgttgtccacttgctggccagcccctctgacatcccacagggtgggtactgcctgccccaattaacagacaaggacactaaaggccagaaagttcggctagtgaggtcggctagtgaggggatgagcttgggcctgccccagccccctgcgccagctctcaggccccctctctgcccaca

SEQ ID NO: 156672 - DNA, 201 bp, Homo Sapiens
ggtgcagttcctggaaagttttaatcattaggcaagttacttaggttctgtaggccttgtttttctcatttgacaaagtaaagagtttaaagccactaacaattgtaagatctgtaattcaatgcttagaagtaataaatggtgaggtgatgggataaccccgattatcctgatttaatcatccgggtgccgagctagagt

SEQ ID NO: 156673 - DNA, 460 bp, Homo Sapiens
ccgggagaaggactagggaagcttccttcccatctgcacctcccagcctggagaggagcctgtgacttgccctgttccttggctcctcaggctggggtaaggtgtgggggtggctccagccttgaggccagtctcctgatgctggattccttgttttccctgcaggcatcaaagagagaggctttttgctaagtagcagcctgatgcactccgagtcagagctggacagcgatgatgccatctttacatggccagaccgagagaagggcaaactcctgcatggtcagaatggctttgtacccaacgggcagacccctttaaaggccaggagcccgcgggaggagatcctgtacccatttggtctgtctcctcagggcagggcccagcacagtgcccggccagtcctcctacctcccgagtctgcgggcagctgctgtcccagcatctgctggtcatttcg

SEQ ID NO: 156674 - DNA, 273 bp, Homo Sapiens
aggaaagcgacaagcggctgttcatcgaagcgattttccgcgccaccaacagcatcgacctgccgctgatcgccgagatggtggaaaccgaaggggaactgaaagtactggaggaactgggcgtacacggcgccatgggccgcctgctcggcgccccggcgccctggggcaagcaataactgcaggagccccgccgggggtaatttctgaagattacgggtgtcgcacctgccgcttcgccgcggggcgcggctcctacagggtaccgagcta

SEQ ID NO: 156675 - DNA, 328 bp, Homo Sapiens
gctcggcccctgggttagattcaagggcctctgtccccaccccatctgtgctgaagatcccttattcacacaatagagctgccctgcctgggggtggaaaaatgtgaggctgggcctgagaacttgtgggaaagtggaaaccgtgttttacccaagcaagtcccagcagtgaggttggataggcttaacacccagtcctgtgctcgtagtgtacgcctgagcctgtggaactctgtgcccttctgggtgcacccctgagcctgtggaactctgtgcccttctgggtgtacccctgagcctgtggaactctgtgcccttctgggtgcac

SEQ ID NO: 156676 - DNA, 484 bp, Homo Sapiens
gacactagagtgcatcatcaaatcaggaaattgatccagaccccttcccatctcccagcttcctccagggcggggcactagagtgcatcatcaaacgaggaaattgatccagaccccttcccatctcccagcttcctccagggggacactagagtgcatcatcaaaccaggaaattgatccagaccccttcccatctcccagcttcctccagggggacactagagtgcatcatcaaatgaggaaattgatccagaccccacaggatccacctgccaacttagcactgctggcattcatggtagtaactaaggggaatccctccaagcagcatggtggaatggagagagcaagcacactctagcttctgacaccatcacctatgaactgtgtgacccatgtaattcatgtaagctgctgggtcttaaagtccatgcctctaaagtaagaatcatcatgatgcttaattcacagagaattaagtga

SEQ ID NO: 156677 - DNA, 647 bp, Homo Sapiens
cacaacacctgcgggggcactgcgaccgctgctgccccggcttcaatcagcagccgtggaagcctgcgactgccaacagtgccaacgagtgccagtcctgtaactgctacggccatgccaccgactgttactacgaccctgaggtggaccggcgccgcgccagccagagcctggatggcacctatcagggtgggggtgtctgtatcgactgccagcaccacaccgccggcgtcaactgtgagcgctgcctgcccggcttttaccgctctcccaaccaccctttcgactcgccccacgtctgccgccgctgcaactgcgagtccgacttcacggatggcacctgcgaggacctgacgggtcgatgctactgccggcccaacttctctggggagcggtgtgacgtttgtgccgagggcttcacgggcttcccaagctgctacccgacgccctcgtcctccaatgacaccagggagcaggtgctgccagctggccagattgtgaattgtgactgcagcgcggcagggacccagggcaacgcctgccggaaggacccaagggtgggacgctgtctgtgcaaacccaacttccaaggcacccattgtgagctttgcgcgccagggttctacggccccggctgccagccctga

SEQ ID NO: 156678 - DNA, 620 bp, Homo Sapiens
atccaggcatccatcggggaggagggagacagctcctcagcaggctgtggcacaaatttctcccctaaagcattgaggataaagcgaagagcattccagatcttgttgcagaaatgtcggcagctctggacctcagagactgacaggtgcaagtcgcccgcctgaactccatgggagcagagtgtgaatctcagggcatctgtcccacactcagggatcccgtgaggaaagtcctttttctgtgctgcagccacaatggccagctctgcagggtccaaatttccgcttctcagcttttcctgcagcaactgcatctccaccccactgatgatgtctcttgggtccagcacattccccagggacttgctcatcttccggccctgcctgtcccgaaccatgggatgaagaagcaccttgctgaagggcagctgccctgtgagctgggtccccaacatgaccatgcggcccacccagaacagcagaaggtcgctgcccgtttccaaaagtgacagggggtagaaacgagcaaggtctggggtctcttggggccagcccagggcagaaaaggggaacagggcagaagataaccatgtgtctaggacatcaggatccctctccag

SEQ ID NO: 156679 - DNA, 584 bp, Homo Sapiens
tgtattgtaaacgaggttgaggtgattgaacacactttatagagtgaggaagtggttagagttaaaatttcctgctgaaagtgggtaatctgcaaattccttgcattgggttcactcctcactgccacttcttgctgcattttgaggctgccctaagcatgatgtaatgacaggttaatcctctgcgcgcactagctgatgcaatgcaaatctgaggcgcaggctattattccaagcaagggttagtcattgctgttactatcattgcaaaactctgatagttctagattgtaaccaggaagatacaatcaaccacaaaactcagcttcctctgtcacaaattctagatagaggtagcctttcatgaggctgagagatggaaaaatgaggcggggggactctcttaggacacataaatatgcaaaaaaattgctacgctttagaaagctatacattcaaatcatagataagctgacattagtaggcagtgcatgttcacaaaaagaccattaattagaagaaatgtgaaatattgttaatttccttatagatttgcctatgtataaatggccaatttcaccgtc

SEQ ID NO: 156680 - DNA, 327 bp, Homo Sapiens
  misc_feature (49)..(58): n is a, c, g, or t
ctcatggtgaaatgttcaggaagggaaagttttaaaaagtcttcaactnnnnnnnnnnttgacaccgaaccaaagaagaaaggggaaattttcgtataaagagccaccaaagtcaactttgtaaaagtaaaaatgagaacgcgtctctgtggataacctttacttattccaaaactgagctaagaggcaccttcattttcaatatggaagcaagagcctccttgttgctctgggcaacctgttgctgtgatcagcttgtatgaaacgctttgtgaatattcctccctccactgatacatgcgccgttctgtagcattagctctgggg

SEQ ID NO: 156681 - DNA, 195 bp, Homo Sapiens
ctcagcttcactgtcctacgctgtggccgtgctctttccccttccagctttctgatggccgtgccttctgctgcacatgctcttctccctcgaagaggccgtctggggccatggtcccgtcctagcctcctggtcagtcagcctcctcccggcctgccctccgcagcgtacccgtctttcacacgtcttccgcag

SEQ ID NO: 156682 - DNA, 618 bp, Homo Sapiens
aggggacatcccgggtctgcccaattcggtgacagcggtcctgggcctgagcatccatggtgggattccagtcgctgtcataaaaaacaacagtgtctgctcctgtcaggttcacgcccacacccccactccgagttgaaaggatgaagcagaatatgcgtttgtctgcattgaaccgttccatcaaggcctgtctctgttcaactctagtagatccatccaggcgcaggtagagatggccatggtaggtgagaaactgctccaatacatccagcattcgggtcatctgggtgaagatgagcactcggtggccctctgccttgagctgccgcaacagcactgccaacgtctgcaactttccgcaatcatactggatgagtcttaagtcagggaactgggtgcgcatgttacacacaatacggtgcaaaggacgagcccggggccagagctcagaggccaattgctcctggaaggctgcctgacgtggggccagccaaggaggtgggtggcaggcatgcagggaagggggaggtgcctccacaggaggcatgacaaagatgaacctctcaatgttctgacagctggtctagtcttgctgtggaaggtacgagctgatta

SEQ ID NO: 156683 - DNA, 181 bp, Homo Sapiens
ccgggattcctattgcatgatctcttttgtgattttgctctgtggaacacaaacttacagagttaaagcaaggctggcatcccatgtgaaaatgaggagaatctgagccttttcatttgctgccactggggtcatgataggaatcggcgccgcaggaatccggcggccgaggggatcctcg

SEQ ID NO: 156684 - DNA, 492 bp, Homo Sapiens
  misc_feature (198)..(350): n is a, c, g, or t
  misc_feature (358)..(385): n is a, c, g, or t
  misc_feature (410)..(451): n is a, c, g, or t
atcacaaagcttattcttgcctacttgaatttgcagtgattcttccccaaatacaatttaatgttcccatgtagatgtccgaaagcatttatcaggcacttaaatgaatcccatacctgtatgccacagtagttaaggacacaagtattgcatagacctgggatgagttactaattcacaatttactctctaccaggnnnnnnnnnnnnnnnnnnnnnnnnnnnnnnnnnnnnnnnnnnnnnnnnnnnnnnnnnnnnnnnnnnnnnnnnnnnnnnnnnnnnnnnnnnnnnnnnnnnnnnnnnnnnnnnnnnnnnnnnnnnnnnnnnnnnnnnnnnnnnnnnnnnnnnnnncctttcannnnnnnnnnnnnnnnnnnnnnnnnnnnagagagaggatctcgctctgtcatnnnnnnnnnnnnnnnnnnnnnnnnnnnnnnnnnnnnnnnnnncagaattccagggtcaagcaatcctttggcttcagcctctc

SEQ ID NO: 156685 - DNA, 275 bp, Homo Sapiens
gactccccaccttcagcttttgccaagcccttccttggctacccatgtagtactccatatagtaagtaagtcagcaaatctcattgttttgagctaagtgcctacgttaggctctccctaaacaggtttgatgggctggttttttcccaatatgctttggaaatcattgtataatactgacaagaaaagtgtccatctctgcaccacccaaaatcactgcctcccttgggagactccggccagagcaaagccttcccaattaactttgcgacgtg

SEQ ID NO: 156686 - DNA, 419 bp, Homo Sapiens
  misc_feature (22)..(22): n is a, c, g, or t
tgtgccaggggacagctgtacnccacgtacacaagcacaacacacatccctcagccctgaaagatctgcggagaagcacctgctcatccatcccactgtcgcccaagacctgggctagactcaggctagacaggacagcagccggctgggccaggcacctgatcatctctgggtgagtggctcctacctgtgcagggagtataggtcgggctcaggaggcgcattttggtgcaccatccctagagaaataaagtaaaccagaaatgatcagctgagtgacctgagggcaagggcacaagcgcaggggcgcgcacaggaaccctctgacgtagccctagtatcaggccctctctgcctgtgtgcacacctcggggcaggcagggttcagcttttgccatgccttcctgtaatgagctctg

SEQ ID NO: 156687 - DNA, 514 bp, Homo Sapiens
  misc_feature (272)..(379): n is a, c, g, or t
  misc_feature (403)..(459): n is a, c, g, or t
gggagaaaaacatcatctctgattcagcttcatttcagcagcaagtgcatttttacatcctcacaacaggaaccagaggatcattggagaagtggggtgggaactaggaaggacctgcagaatttgcggactccttgtgagttcggggagcaccttctcagaaggaaggcacagggaagcggctcacacaaggaacacatttctgctatagtttttgagcagcacagcttcctttaagagaaaggactaggctaggtgtggtgtctcacacnnnnnnnnnnnnnnnnnnnnnnnnnnnnnnnnnnnnnnnnnnnnnnnnnnnnnnnnnnnnnnnnnnnnnnnnnnnnnnnnnnnnnnnnnnnnnnnnnnnnnnnnnnnngatagagagcctgtcttagaaaannnnnnnnnnnnnnnnnnnnnnnnnnnnnnnnnnnnnnnnnnnnnnnnnnnnnnnnnagtagtagtggacttcaatcaactttgctgacgtgggcgtttctctacatccgtg

SEQ ID NO: 156688 - DNA, 581 bp, Homo Sapiens
ggggcgggcagtaaacacgtgagcaaacaagggaacgtcagaggtgggagtgccacgaggattgggaggggtggggcattggagaaagtattcagccaagcggaggtctgcggaagggagctgaaggcaggaagagcagcaagtaaagaaaaacacaggtttgatgtgtttgacacgtggcagggggccgctgtggcgggtgctgggaccagtggcagaagaatgaggttacagaggccttccttgtggaccaggctgaggagctgggcttagccttagggcatgatctgtttcgtgtgccatctctctggctgctttatagattccaggccttaggggcgaaagaggaaacagggagaccagttagaccagtggcagtcagcaggtgaacgataattgtggcttagactgtggtagtgggaatggagaggaagagaagtagaggggtcaagaagtgtattgaaagtggaactgacagggcaggatttgagaaatgacagaaataagtggtcaaagatgacttcatcatagatttttggttttggcttaagtaaccaagtgtattatgctggcatttacta

SEQ ID NO: 156689 - DNA, 574 bp, Homo Sapiens
tgctttctgcaggtcatactggaccctttgtaatctcgcgttttcatcttccaggcatttccggtcatttgtttctttgtcgatcagttgttttaacctttctatctccttgtttttatcctggatggttttggcagcatcatcaagagattgcttatatcttacgctctcctctgttcgcatctgagtgacttgtctcagctcaacctccagctgctgtttcctctgagacacctcagagccagtggccttttgctgttggatgtcttcttccaccctcctgagattctctgtggtctgggttagagtgttcttcagcctctttatttcttcagataagctcctgttttctcgggtgagattgtctatctgagcccgggtagccactggtatcctcttcctttctgcatggtgagcttgtggatggtggtcttggtgatgttgatctcggtctcaaactgatttttttaagctaatgatctcctcatcataattgtttcttaccttactcagttcattttcatattcccagcggcgcttggcctcctcctgaaactcagctttgagtctctcg

SEQ ID NO: 156690 - DNA, 252 bp, Homo Sapiens
tagaagatacaccttttggaaaatggcctcctcatcatgttgtttcaaaaaggcagactcttacccagttaagacttcaggtagaactcatgtggtccatatgagggatgcttactaaagagcaaatacacccaaaggtcagacaactgagctaaaacacacttgacttttccttggccaaccactggtacggggactgtcacaagatccccacgtcctgataaggcaatccccaaagccgcttctataacg

SEQ ID NO: 156691 - DNA, 276 bp, Homo Sapiens
aactggaggccttaggcctgtcagcccccctttttgcctgcttgcagctctggtggtggttgtgtttcctccttggtcacagctttgctgagtggcctctctcctgtgtcccgtgagcccagttggcatgggctttggtagagatatttctatcctggtgccacactagcccttattagttttcttcatctgatctatggctttagaaactgccacatcactaaacccttcagtgaaaccctctcgaatgtgtcatttattttctgttgccaccct

SEQ ID NO: 156692 - DNA, 369 bp, Homo Sapiens
ccagtgaggcatgcggttctcgggctccctcatctcttcatctctccacactccctcccatgcggcgggcagacttacccaggcccaccctgctgagggacagggtgtgccaggcttcctaagcagcctcacctatcagatgccccccactcactgggaggcccacgtccggtccacagcacaggtgggaccttaactctaaagacgaggttcaaatgtaagctgagtgccagcgggccagggcacacagcacatgagccagaacagcccggcagagccgtcgccatcagaaggatccggggatctggggtgttgggggtgatggacagcaggtggccacgcctcaggatgtaggtgtgggagtgcagc

SEQ ID NO: 156693 - DNA, 332 bp, Homo Sapiens
  misc_feature (20)..(20): n is a, c, g, or t
agggttggcgaggccttccncactgtgtgcctggcaggaactgttgctctgtgctcctcatgggaagctctgcctgtgaggaccccacgctctctgaaaacccagctgcagtgttaggtgctgttggccagaagcacctctccattctaagactgatcccagactaagcgctgcctagcctcctttctgctaggtgcgttaaatgagatatggcgcacgtacagtatgcgcgcgtgtcttaagtgcatagttggtgagcttgcctcatgtgtccgcctgtgtggcacactcctgttataccaacactttgagaggctaagccaggtggatcg

SEQ ID NO: 156694 - DNA, 353 bp, Homo Sapiens
cgtatctaaccaactgctctaattgtacatcatttatttcctttttgttctactattttaaatagaccacactgcactgaaatctacattgcttatcaaaatctctggagctgcttctgtcttgtgggcagggagctcatcctgtagcccttaggtcctcccagcctcctcctcctctgatttgtgggtgccactggggcagctgctgagtctcagtggttcctagtcatcaccaagttctgcccacctagatggtttgcacctgtccttaccagacaccctgaactgtctgtgatgactaatgcctgacttctgcccagcgtgatctgctagctgtgatccgcgggcatatc

SEQ ID NO: 156695 - DNA, 385 bp, Homo Sapiens
ctaggccacatgagaatttgcatttttaaattggcattgatgtgggaggttggatagtttagttggtcacatgcgtagatggttgccaggcatttcactgtgcccatttccagaatccaccccgagatcatagacaacccactacaaatggttcagaatgaaggtgttgggtcagattctctttttatttgattttgaaaattatttccttgtgtccttcctactttcaagtaggaaattagcccttgcctgcctctacattgtgggttcatttgatcagctcaagtccatttaaagctgattttccaagcagtagctgcacattcgggctctagaacctagtaggggttctggatgctaggggccgtgtttcaagattctcaca

SEQ ID NO: 156696 - DNA, 164 bp, Homo Sapiens
  misc_feature (115)..(115): n is a, c, g, or t
cctgctggctcctaatgagacttcaggtgtggaccctcgaaccctcagctgcacaggtctggaaacatccttgttcatcaagcaccaggctgaccatggtgtccgtctcagtgcncagcagatgttctggtgaggggaggcgggagtgcaaggtctgccgagtg

SEQ ID NO: 156697 - DNA, 407 bp, Homo Sapiens
ttcagatcagactgaaggggccggggtcaggtgacagtgagtccttcatgagcgttaattgccgtccttcctttgggtttctaaaattttaaggaggggggcaagaaaagctcctatgatccacagttggccagcggaagttagtccacaaagcgcagaagattaggcagccactttcagcattagcacagggcagcagaggtctgctcaaggttggccaaaaacactgctccattgcttcctggcagctggcagagccccatgactgagcgccaagaagatgaacagagtgacgttccactcctgaacagtgtcttatgaggtccattctttgccttcttttccctgctggcagctgggtgcagaaggagattagtcccacagatcggtaaagcctgggtcagtac

SEQ ID NO: 156698 - DNA, 455 bp, Homo Sapiens
catttcacagggagctgaggtagtggttgtctcctagactgcgcctggagaagcttctctgcctcctctctcttggtcccagccccccacagggcctgtgcttttaccagacctggttctgtgtttgcaacgagacgcctggccagccgggcctggacctggctacacttgggtcccccggccactggagagggggagcccccacatttgcctacttcatcatcgagccccccacccccactgccttcaggaagcgtttgccagtcattcttgctatctgctccccgtacctcccttccccagccaggtgtggatccttcctcctctgagcttctgcagttttcctctgttgtatttctcaaccttgaccctgtcccacgctgtgctgggctgcagtttcctgggtgcagtctgctctcctagtcagacaggcatcttctcactagaatctgtaa

SEQ ID NO: 156699 - DNA, 408 bp, Homo Sapiens
  misc_feature (36)..(36): n is a, c, g, or t
  misc_feature (46)..(46): n is a, c, g, or t
tgctatagtgactgctttttctaccatgaaaaaganaatcagagtntgcactatgactttagcaacctcagcagtgtgggctcattaatgaatggccccagcttcacctccaaaggaacaaaatattgacacatatttaccaaccagtgccacgcctgacccagaaccttctcacttgaacaccaggaatggacttaaaggctttatggcgttcaggcttagactgctaaggtacgagttcaacctgattcatcagattaagctaaatacatacagccttgggtgtaggtggtatttacattaggactcctccctctcctatagaaactgtttctcaagcccaacttagggagagagcagcaggcaggaacaggacgatcacaaccttcatttctcattagtttctac

SEQ ID NO: 156700 - DNA, 243 bp, Homo Sapiens
aggcctcccaaagggctcggcttcacgcagtgagtcgctgaccctacgccagtgtcattcttgactcttcttctctctatcttgttggtccatcctttaaaacatatccagaatacactacttctcatcatctttgcctcaagcccccaatccaagtcactatgtcgtctcttttctataattataattgtaaaatcagcctcctaaactggactccctgtttccagggttaagggctcccgg

SEQ ID NO: 156701 - DNA, 409 bp, Homo Sapiens
  misc_feature (42)..(42): n is a, c, g, or t
ccagcatgtccttatgtcacctgctgcactgccttcattccnccgacttccctcggctactttggcctcctggaccctcccacacgccttgcttattgtctgtgcacctttgctcacgctatttgactctggaatcctctctgcagatcaaaagcctacccatctgtcaaggtctggttcaagtttctcccagctgtcctttcatcacagaaaaggctgtttgccttacagaaggcaatcatacaatgttagaaccagagaagaccttacagattatgctgtgtagcagttttcaaactgtgctgtcaaggaacccctctgggaacatgctttagggctctggtggttgggtgagcaggcctcactcgctggagcagttacacttttccttaaggtttcctttgaagga

SEQ ID NO: 156702 - DNA, 416 bp, Homo Sapiens
  misc_feature (57)..(57): n is a, c, g, or t
agacgtccacaccgtcgtagtggtagtaatcccaatggcagaacgtccatcttcacnccacaaaaacccagccacgcagagaccttctgtctccgggcgtcacagggatagtgactgtctgtggccctgtcctgcccttcccacggaaccctccacaggcctctcacgttctccacattttggcctgacccctcagaagcctgaccactgtcggcctgggaagtccaactgcaagtagacggctgggaagtcacccccaggattccagaaaacccggggggcacccgtcccagagagcgggtgccttgcagcggggcagagtcgcacaacacaaccatcacggcagcccctgagaacgctgtagaggtcaccccagaccagccgaaaaagcccccgtcccagagagcgggtgcctt

SEQ ID NO: 156703 - DNA, 324 bp, Homo Sapiens
cgggagccctttacccttgactaaagctgcttaacattttgtggattatgaattcctctgagagttttattaaagctgtggccccctcttttccaaataggcacatacatgtttgcataaagttgtgaggcttcacagactccctaaaactctttcataaaccttccaagggtcctctaggtattcatgaccgtctattatgattgcatctcttgggggtaggggaaagagggagggcatgagcaagtgtgtgtcaaggctgaggaaggtggcgctgttgcttctccatttcccaataagcttccagattccttttggagccag

SEQ ID NO: 156704 - DNA, 240 bp, Homo Sapiens
gggtcatgtttacagtcctcagtgccccacaccggtggccccctgaggacacctccaccctgaccttgattttcccaaacgctgcctcttggtgacagactcagcccaaaaccccttccttctgtctctggagacccttgagcttggggaaatatggaggggtgtgtgtctgcaatcaaggcctctgcagctcacggctggctcggtgggctgggacttccgtctgaattttaaatactt

SEQ ID NO: 156705 - DNA, 427 bp, Homo Sapiens
caggctattcctgtcagctgctgataacatgccaccaggcgggaattcgcgttttgtgttaagtattttaatcatgtccgctcgttcacctttttaagtcacatggttttatttgctgatggtgctgtgccagcctcgggttcttccagacgctcggaaggaaagcttctctgcaggctgcgtcatcccactccaaggactggtgctgggctcccaggggagtgttggggagggagtgagcgccagcacagagggaagaagggagggtgtggactgactacctctaccactcagttgctgtgtgaccttgggcgaagtctcttgacgtctctgaccgtgagtctctgtagttcgtgacaaatgcagactacatccctgcctgtagcagtggttatatggcgcctggggggcttctcgagtgtgctcc

SEQ ID NO: 156706 - DNA, 382 bp, Homo Sapiens
agtgaatatccttcaacagggccctcctgtcctcaagaaaaactcaagcctctgtgaccagactctgccagctactgcagcctcctctctctctctgccaccagctcaattgtgtcaggctctaagaagatggagtatagcttataaagagccaggcacatcatactgtttctgtatgctatccctttgctcctgtggttttccctgtgtggaatactctctcctattattctcaccctttaagactcaggacagtcattctcttgtacacagagccttccgtgaccacgagcttgctattgcaccagacccaaactatcaaaatacgccatccgctgctatcataccagaaccaaagtaccaagtcacaggacttcaccct

SEQ ID NO: 156707 - DNA, 573 bp, Homo Sapiens
aggcagtatgaggaaagggaggcagggaggtggagctcatgggagttctggccctgagcaaagaggagcaggagaggagcctggaggcaggtcccaggcacgcgggtctgtaaaggcctgaggcctccgaggccttcccaggagcctgggaaaaccgcacgagaaaggacatggagagaggaaatactcaggaggatgcggccgatggcgagcagcgggaggaggaggagactgcgggaggccagaccctgggggctgaggctgaaggagaccgagagtctgaactatcagaagtcccagaggcaggcggggaggggctgccaacccaggacgcgggatgtggaactgaggagggagaggcgtctgtctcagagaaccaggagctggacggaagcacaggggcagacgcagggccttgcccgtcactgggagaggcctatgccagagaaactgaggatgaggaggcggaggctgacagaacatccagaagaggctggaggctgcaagcggtggctgtgggcctcccggaccgtgaggatgcacagactggctctgtggctgctgggattatgg

SEQ ID NO: 156708 - DNA, 371 bp, Homo Sapiens
cttggatttcctgttcaggaaagttgtgttctacaaagaagaggttggaagacacccccttaatcttctcatacttaagaacagatggatgattctccagatcctggtaaatgtggggggtcaaaaggcgggcaatttcagggcacatacggtgctggtaattcagacggacaaagggaatgtttactttcactagccgttcaaaaagggacacctcaaggttgaagttcttggccagatcatacacgttggcactggggcgcagctgctggtggtccccaatcaaaatgaggtgctggcaagctttgctcaatgtgggcatggtatgggcctcaaggacttccgcagcttcttccactatgacaatcctc

SEQ ID NO: 156709 - DNA, 325 bp, Homo Sapiens
ccagcagcccttaagcctttagccctcacctctaacctcctggcatctagcggtgaagccccagaacctggcttctcctggcatggagctccatcatcttcatgatgttgttgagtggactcctttgactgcctctccaaccaccagaagagccaccaccaaacttattattgatgatggtgcccctctcccagcacattctttatggtcttagtgaagagtgagctttctgctccttctcttggactatgaccttctcttgggtcttttggtctgacataatatacaatctctgcttccttcagcatatcctctggcttctgac

SEQ ID NO: 156710 - DNA, 445 bp, Homo Sapiens
atggtttagtttcccttttttaccttagagtgctgaattgggctaaatcgacccctctggctaggagactctccacttgcaatctcagtacctcccctgttacgggagaggcaggctgaagcatcttgatcccaggactgccctggtggcttcctggcaatttgtttgcctctgcccgttcaggccagccatcaggtttctaggtctggctttaaccctgggatctgtagaagtcacgtgctctctatctaagccaggtcctgagaatggctgtgttgccacctgagtcgggggaatactgcctcccggagtttgtcccgtgcatggcagcagcgtccgctcgaagctgctgcttgagctggtaactcctgagctggctttggatgcattcaggtggcagggggcattccttcattagaatcaagaatacccattcaggaaatga

SEQ ID NO: 156711 - DNA, 351 bp, Homo Sapiens
aaaggaaagtgacccaaaaactttggtagcagcaataatcccctaatcaaaggcaaaggactttttgaaatcctgaggatcccttcacagactagagacttgggtcttccacatgggaggcaccagagtctcaagtccgcccccaccagtggccaaggcaacccagcccctgaggctaagggcattgcccagctgagactggctctgccaacagtgatgagcagcagtaacagggctcaaaaagcagacctgttataggactcagcaagtcaggacaggggggtaggtgttggcagaggaaggcctgttgttaggattaaacagcagagtttaggccaggctcctggctca

SEQ ID NO: 156712 - DNA, 496 bp, Homo Sapiens
caatatgttttattggaatctatttttttcaatggctgaactatttttagctgaattacagaaacaaatagaaggcattgaaaagagatcaagtattaaagaatgttaaggttttctttctaaaggataattaggcaatgcagttttgtcttcattagaagccaagagggaagaaagtaaagatatgccagctaggtcagagaaatgagagagacagcagtcctgtgttcagtcattgattagcatcggcaacaccaggaagagccattcaggctgggagagggctacaggaactactcaaggaattgtgagtttccttacttaactgagtaggtaaagatgctgagaggtttgagatgatttggtagtaacaagccaagatcatagaccttttctgtaggctcttggggatgtgtgagaaaggtagttaacgcaaagcaagttggctcagccagggagaggtgacaaggggaagggactggttagggatgctgtc

SEQ ID NO: 156713 - DNA, 389 bp, Homo Sapiens
agcccttagcctccatgttcacgcagagctggctgcaggtgtcgggatcctgacactcatcgatatcttcgcatcttcgctgggccaccagctggaagccgtcggggcacaggcactcgtatccgatcttaaggtcattgcagacgtgggaacagccgccgttgttgtcctagcattcgttggtcccgcactctttgatgggttcgtctgagcagttccggcagtctctagccatgttacattcaggccccgacccacagaaccggtagctggcgggtgttgtattaagcccacagatgctccgagtcagctgtgcagtgacagtgaactagcgtgcctagtgtggggcactctggtccccctcccgatggttaaccgctcccgtcctc

SEQ ID NO: 156714 - DNA, 296 bp, Homo Sapiens
agggtctggttagagggttctggggccatcttgagatcttgagatatgtcccaggggtgaaggagggtctgcaagacctgaagagtatcttcagagccatctagaggcctggggtatgtcttttatggctggcaagtgtctgcatgggctggcctgaggatgcaactggtctgcataagtctggggccatttatcaggcctagaaggagtgttcaagggctaagaagtcatttagggccccctagggggttgggttatgcccaccagggaagggcgccaaatattgagatgtactg

SEQ ID NO: 156715 - DNA, 345 bp, Homo Sapiens
actatcacctattttatagaggaggaaactgaggctcagagaggaggaagtgaccctggacaagtcacttgacctccctaagcctgagctttctcattgtttaaagaaaggaataaaatggtgtgcttgtgagacagagaaccggggtagcacagtgaaggtgctctccaaggaggtgcaggagttacccatgtcccctgctcccgcctgttccgggcaggaccgtgctcactggtgggcacgggcaggtgtccaaggcctggactgcttcccttccacccttggcttcaggatggcagggtggttctgccccaaagggttaagggcttcccggggtaccgagct

SEQ ID NO: 156716 - DNA, 263 bp, Homo Sapiens
  misc_feature (60)..(60): n is a, c, g, or t
ttgttagcctgtaaacttaagaagctgatcaatctctaagcctcactttcctcacctgtnagaatgggtaatgatgacatcaaccttgtaaaattttacacaaatcagaaataacataatatcaagatctgacctaaatagctattcaattaatgacattactggtgcctatactcaatgcctcaagaacacagagggaaatatgtggggtggaggcaggaagcagcattcaagaaagcaacaggccgagtgcagtggctcgt

SEQ ID NO: 156717 - DNA, 281 bp, Homo Sapiens
tctggatagcccagaatttcttgtgttcctgagttaaatatgtgtgtcagtcaacagacagaaaccatgccagttatttgagcagaggatgtaatagcaaggattgttaaccaggtataaagttgatgaggtgtcaaagggtaaaaagaactgtgaagtgtcagggaggtggcagaactgtgagccacagttactaccctagggctggggaacaaatttgacagcttggtcaaaggcccacggtgctgagcctcacagctggcagcggggccagtgcatgg

SEQ ID NO: 156718 - DNA, 376 bp, Homo Sapiens
cacacggccgctgagctgagtgaggggtgtcccagaaagaaactcttgatgctgtcccttcctgtgatcatttcagcttaaaacagcaaagagcaaaacacaactcctccccagaggctctccaagcccagcaaccccttcctggcctccacaagctcagtcattccccagaacagacctcgagactcaaaggtctcaagcccgaccacctggctgggcacctgcctgaagaaacgctggctggggccaggggcagccttgcagtgacacggatcaaaagccagcatgagggatcagaaaacccccgtcgcggaccctccactgggaagcgcgcagagcttcccaaccaagcgaccctcaacccacagcccactga

SEQ ID NO: 156719 - DNA, 251 bp, Homo Sapiens
ctgctaaaggaatgactcgacttttaactatcaggtagaatcctgtgcgaagtcacatgagcctggtgttttattttggtggaagggtcttttgactatttctgtgaaaactggtctgctaagatttttcatcttgactgaattcattttgggtctctaggattagaggctgtaggactcaacaaggaccagcttcatgggcatatgataattgcacagggccccgcacccaggagggggcctcacacata

SEQ ID NO: 156720 - DNA, 513 bp, Homo Sapiens
ttctgactctagtttcatctgactttcctaactcattgatcagaaaaggggtggggaagaatctggcatgcgctaacattggagctgggcgacattctcagaatcccagatgtatcctgcgagtcagcacttcactccctactctttctgccctcctccatccccttccccatggcagtttaaaaacagacacttttatttcctgcaaacctggagatacttgtttcatcacctaagaatcatttgactgcatatgctgagaaaaagggaaattcgtgcctgtgaaatctaacaagagcccagcacaaggtatgtttgatcctcttttaaagccatttttagtttggtgctgtgtggtttaaatttagaataacatttctacaactttgggggaggggcggtgatggtggcgtgcagagattgaacccagctgtgactcctgctgctgtgagataaatgggaaaatctgggaaccagtgttaaaaggagagggctctttagagaggtagctgc

SEQ ID NO: 156721 - DNA, 423 bp, Homo Sapiens
gcacttcctcatttttctcagaagcagtacctgaaataaaggcagagtccttgtctgcctctatgtacttgataccagcttgtcaagacccacccttcccttttacctcgtctaaaattcacaccagtggacagcagggcctgcagcatgtctgtagaaatttatttaaacttatgtatgattcatagaagactgagtactttgatttgatggggatgggctatatttcttccaataacaaattaatggattagttcataagattagctacattatggaacaaatggaggagatggaggatgagttagttttagttacaggaggaataaggtaataaataacttcaagtagaacaataaaaatttggacttctaaataatttggataacccattttccaaatataggctaagccctagtgtaa

SEQ ID NO: 156722 - DNA, 379 bp, Homo Sapiens
ccgggagccttaacccttattctagatgttttctttctttggtattaatcagaggccactatgttctcatggccctctaaggcaaatttcatttgccagtattctgtttgagctaccccgcttgctgattaccagttcgtattgtactcaagattatcgcagcttccagacctggattgagattagggtttgactggtagtcctccatgttcttctgcgagacaaagcggtagtagccagtgaggttgggaggcattgtgtggatgaaggtttcaggagaatgcagtgaggcagggtgaggaagtagggggtgttgtctggcaggttaggctgagaggttccagccagctccgcgcccagagacaggatgtgtaatggc

SEQ ID NO: 156723 - DNA, 354 bp, Homo Sapiens
ccgggagccattaaccatgcggcagggggaacaactgtagaaagaacagatgacgtctgaggagaagcgggaggagagggaaggagacaacaggtgctgcggactgcagggagtggggcaaagacaagtcacctaaggaaacaaaggaaacacggaggaactaccaagagcgacagtcacactgggatggggaaggcacagcaggggctgggtcagcaaacgggcatgacacagcacagggaactgcaaagaaggcaccagcaaacacctctgggagagacagtgcagacagggagatggagacggggcagggaactacctctttgctctagatgcccttggctcattctatac

SEQ ID NO: 156724 - DNA, 430 bp, Homo Sapiens
  misc_feature (310)..(310): n is a, c, g, or t
ccggaggccttaaccctggaggctgggagaccagcagaaggtgtgagtgcaggctagacacattggcggcttggaccaaggtgggacagtgaaggtggaggcaagtgtactggacatgttcccgtgggtttaggggcagaatcaacaagacttggtacgtgcagtgcctgtgagcagagatggcacctttgatgctgggtctcctggcttccagctgaggtacatggtgggccctgggttcctgaagccaggtgagcggcgctgctttgcccgctacctggccgtgcagaccctgcagattgacgtctgngacggagactccctgctgctcatcggatctgctgccgtccagatgaagcatctcctccgccaaggccggccggctgtgcaggcctcccacgagcttgaggtcgtggcaactgaatacgag

SEQ ID NO: 156725 - DNA, 259 bp, Homo Sapiens
ggcttgcctctgtctgcaccacgctctgctctgcggcaaatgagagacagctgatgtgaacagggaggcaaagaaaggcaacaccaaaaactgagggccactggaaatatgtagaaaatgcaccacttctttcatttcctgcccttccccagccccaagaaacacagtaaaatgaggcgaggtccatctcactaagatcaaggccccagtaacgcacaccctcatccaaaccaagtccctgtctactctgacactgatg

SEQ ID NO: 156726 - DNA, 324 bp, Homo Sapiens
ccgtgagcccttacccctggctcgtaagcgtctaggccgtgccctgaggtctggctgtgactcagtttccgcaccagaggcctggcctaggccctctttggacatccggagccaggcttggggcctggactcgagggcgcctgcagctcccttctggggacttgtctgtccctgctgtggccctgcccgacctcctgaccccttcctttcctggtcggcttggtcctccactgccagcaggctgccggcctgcaggaagacagcagggcctgcctccccggccttctcactcctcttctccggctccctccatccccggatctg

SEQ ID NO: 156727 - DNA, 258 bp, Homo Sapiens
  misc_feature (224)..(225): n is a, c, g, or t
accatctcttttataaatattggtctgcttctctttgaagggttcttattctagtagtagaataagatagaataagatcatgtttgttatctctgtattgacaggcttataagtggctgttgattgaatttaaagagaataaataaggtatcattcagatatttgaaatcaatttctaaagtgacagtaaattattttagttatctccctgacctttgactgcnncagagcagctttggaatacaaagaggtggagaa

SEQ ID NO: 156728 - DNA, 374 bp, Homo Sapiens
gcaatacctcttgagaaaggcaggggaggggctaggagaataagaaaacctccacacctggggaactggcttccacatctgttctcagtgatgcctgagacagcagccagggcaatgtcctccccgcttggcagaccctgcccatatacccatctgcagcaaaggcatcatctctggacatgcggagaaacaccatgggaggtcaagccacactacacagagagaagagtgggaagcagggcagggaccaaccgtgcagtgggaacagagccgtcatcaaccctggtatccctccagctctggccttgagtggggcccctgcagctgccaccaccccctcatggacccctcctgccacagctggagggtctccc

SEQ ID NO: 156729 - DNA, 368 bp, Homo Sapiens
  misc_feature (64)..(104): n is a, c, g, or t
catggtggcgagcgcctatagtctcagctacttggtaggctgagtcatgataatggtctgaccnnnnnnnnnnnnnnnnnnnnnnnnnnnnnnnnnnnnnnnnnggcgacagagcgagactccgccgccacccctcataaaaagcggatttccgttcttggtctgggatggccttgcgtgtggtacactgcagggagctcgggccagggtcagggttctggctctggagcccctttggtcccatcagctacagtcctacagttttccagctgcaggggctacctctgaggagcaggatgatgaggctgagcctcgtctggtctgtcagtggccccgccgtgtcagtctccagggttaagggcttgcgg

SEQ ID NO: 156730 - DNA, 406 bp, Homo Sapiens
  misc_feature (27)..(27): n is a, c, g, or t
tgccatcagcttcactcacaaggctcncctccctgccaatcctacttgcctggcctgggctggactcccacccctgggaacccacaccagccactaggcttagccttctgccctaccgcaaagcccccatcctcctctccagatagccaagcacacatggttcccagcccagctccagggccacctttgccagaatgcctttctcagttgcaccaaccacagctgcctctctgttttctgcagacccactgtattcggagactgcctgactcctacttggcagtgctctcatttctgactggattcttctctagttggctttcccattgatccacaggctccaggaggtatgagctctgctggagagctcttgatttgagcgttagcatgcctgctaggcttctct

SEQ ID NO: 156731 - DNA, 160 bp, Homo Sapiens
ctatagaatacccccgcgagcgcttaaccctcagtcataggaaaatgctgttggagcctcagccaggtgttccagcagcatgcacctggcacatcttgctatggcttctcatggtaaaatgctaccatggttaacccaacgcggcagcatgcagcgatct

SEQ ID NO: 156732 - DNA, 220 bp, Homo Sapiens
  misc_feature (136)..(145): n is a, c, g, or t
gctcacgcgctaataaaaccatcggctttaaatgctgaggcaagaggatcgattgaggccaggagttcgaggctgcagtgagctacaatcaaaccactgtactccacctgggcaacagagtgagaccctgtctctnnnnnnnnnngaaagctccatttgttcatagcagaggtcaaggtggggatgagcaatgtgatgtagaggggaggaggctgtaggc

SEQ ID NO: 156733 - DNA, 360 bp, Homo Sapiens
ggaggagactgacatgtaaataaacactgtagggagataggagcaataatttaagtatatacaaagtctttgatgccatagtggagggagtgattattcagaatggggaacggaagctggtcagggacggtctcggtcttgtcacaagtggcattcaccaggtggacggtagatataggatcaggaaaggggaggcatccctagcaaagtgaactgaatatgcagggtttagaagtgtggaacatatgttagaggaactagggaaaaaaattcagaatggttggaggatgaaatgctattctgagtggaatgcaagaggagtgatggtagtggtaagatgtaacattggagaggtaggta

SEQ ID NO: 156734 - DNA, 245 bp, Homo Sapiens
acctcttggacttttgaaaggatctcagggatccccagagatcagcggattatacttgcttcattttcctgaggttcttagaggcccttctatggacgtcatgagctgagctaagatttaatcttgcagatcgtattgcacaggctttcatgcgtggactaggtctaggacattcgacagagatatggtcacagggagcgattagctctgtggctactgctaagcaggagtacactgcaccacta

SEQ ID NO: 156735 - DNA, 319 bp, Homo Sapiens
cagtgactagcattagaggcctcccaaacagatctgctcagaggcagaattccaaactcaagtatatgtctcagtgtaaattcataaacaggcacttggacttattaaaatcaaaaataagtagagaatgattagcaagagctatcaagtccaaagcagttattttgtggctgacaacacttaggacagtgtgagataaatcctctgatcgcgctgcccagtagatctgagagaccagaacctaggactcctgcttcccaagccaggagcgtctcccttttacctatcagctctccctctggtcacccatccactctcc

SEQ ID NO: 156736 - DNA, 425 bp, Homo Sapiens
  misc_feature (13)..(13): n is a, c, g, or t
  misc_feature (25)..(25): n is a, c, g, or t
  misc_feature (45)..(45): n is a, c, g, or t
ggagccccttacncctcaagtttanagccatacaaaggtgagagncagcagtattaagaaagagaggagatgctgaagcaagtttctgagaagttagcagcaagaggaatttggagaatacgtgaaaggattaaccttgaacctccagtgtaagaggaagaaagaaaacctggataagtgtggctaagaggctcctaagtgctggggaggacagcaaggacagcaactgtacatcttaatggtttctaatgggtaattgaggaatgagttgcctaggagcagatcctgcatcagtcctgcagccccatgaggctgaagatttggaatttgtacttcctccagtccacgtggctatgtcattttctccattagtgctctactcagtaattcaggtataaggtagctgagaacagtttgatttacac

SEQ ID NO: 156737 - DNA, 402 bp, Homo Sapiens
cagaagggatgttctggacattgcttgggaatgcctccaaagcagtgtggctactagcagggaacagtcctggtcatgaggatagttggcaatgaggatatcagggctgacaataacttgactatgcttcagttcaaatctatgtccgcagctgctcttagggtttgcagttgccagctgctttcagccagagcctgttgggtgatgacttacttgctcgatcgtcgccagatgtggactgagggggcagaatttatgtgcagtgcttccagtcggggtcagtagccactcaggagcagaagtagatcttggcctacaggcatgagcttatcagcagggccaggggcaaggtgaggttcctggggcccaatattgaagggtcactgctctcagcatcctgca

SEQ ID NO: 156738 - DNA, 292 bp, Homo Sapiens
cggtagccggagtccttacacctcatggaggttgagtagtcttcctggaataggtgaaggctgccatgagccttgaaagctgagcaggagtcagctgtgctttgggttcaagactgagggtggtaaatctgagtttggccccccaggaagctcataggctccctggggagatgtgatgtgtacacacagaaagagaacagtacaagggggtctttatgccaggcatgggggggtggcacgcagagaggtattcctctgggaattcagaggagggggaacggcatgtggctat

SEQ ID NO: 156739 - DNA, 220 bp, Homo Sapiens
ccgtcccacactccttaccatgtgtgctgatgatctggttaaggggcgcctcccatccaaccaagagctcagggacagagacgggtcttgctcagcctgcgtctctaggatctggcctagagcaggcagcaggtgtttgataaagagctgttgacctgaagggtccctgtgtccagtcctggctcttagtgtctggcgcctctccctctgcccttcccac

SEQ ID NO: 156740 - DNA, 354 bp, Homo Sapiens
  misc_feature (42)..(93): n is a, c, g, or t
  misc_feature (114)..(128): n is a, c, g, or t
agctactcaggtggtttaggccagaacagtgcttggacccannnnnnnnnnnnnnnnnnnnnnnnnnnnnnnnnnnnnnnnnnnnnnnnnnnntgacagagcccaactgtcttnnnnnnnnnnnnnnngatgttctcttttttaaaaggtaaaaattataaatatttatctcaagagagtccagattttctataaacactacctggccactagcacctaaggtggcctcagaatggaaaaaaaaggaagaaatgctttgggcttttgcctgtgtggaaggggctgagaacggttaagaatcacgacccttagacaatgaccagttccagctatggttactggctggcgggtgct

SEQ ID NO: 156741 - DNA, 238 bp, Homo Sapiens
tgcgggagcccttacgcctcaggtgggttgagggcctagcatggtgattggatttagcagtaagaaagctgccggtatccttggccagagctgtttcagtggtgtcagtgtgggcaaggcttgtctagtgcagggtgaagagtgagtagcagatgaagtagaggcggggcatgtggacagcttctctgaagtttgaatttcttgatgttaagagaaggtattattcaaagggatatgt

SEQ ID NO: 156742 - DNA, 511 bp, Homo Sapiens
  misc_feature (403)..(403): n is a, c, g, or t
aactgggaacaatagcatccccccatccttgaggacatttggaaatgtgggaggggcattactttagctgttgtcatgactgggagttgctgccagcaatgagtgggtggggtctgagacagcaaatgtcctgcagtgtgtgggacaatctaccagacatggaagtgtcctatccagaattgcaggtagccaccctgctgaaaaaagccaaacacaacagaaccccaccttgcatttttctcctaagtacaaaataaaatagcacacgttcactgcagaaaacttagcaaacccaggacagtcctcaccccatcacccttccactcccccaccccacaatccctgtcatacgattcctgcaccaccactcctgacaccgatctcaatatctgttcagaggaanggagaggtcacagttagtgacagggaggggaaagtcactgggagtttcctctcacccaggccttcacaaatgagtagggtgttgacatggatggatgaagaggacagt

SEQ ID NO: 156743 - DNA, 268 bp, Homo Sapiens
ggacagagtcccaccaggcaatcatcacgacagcccctgagagtgctctgggtgaagcggagagaggtcaccccagaccacccgaaggagccccccagctgccgacatctgtggccggacttggggaggacaggctgcgttccctttcgaagggtccctctcaccagctttctttcctgacctccaagatgcctccaagactctgaccctgagaccctggcaacctgagtctccctaagtggactcagagagggggtggtgaggactc

SEQ ID NO: 156744 - DNA, 407 bp, Homo Sapiens
cccttaacccgtggggaaccagtttggggcgtttccttatgtgtagttagcggggatggctccaccttaacagcaaggtggtggcacagaactttctgctccagctgcctgcagcctcgccttggttccgcagtagcggtgttcactggcggctgcagatccgaaatgcctgagggcttaaaaaaatgcatgggcttctcccctacctagttaaatgggaatcgctggcgattctcatttcagagaactggtggtgtttttaagtgccttagggaagtttagcgtctgctcagttgagaatcagtgttctacccggaagggcactcgtagcctggtctggtatggacatgaacaggagagcctcctgtcttctgccggctctttgcgcaagggttaacggctcgcgg

SEQ ID NO: 156745 - DNA, 422 bp, Homo Sapiens
  misc_feature (137)..(137): n is a, c, g, or t
tggctgagtgcgactctagagtagagcatcgcgagccctgaacttataattggacatagcatctactcgagacataatctctcgctttagagttcttgaaggaaaggctggacatgagtggtgacagaacggacggnaaaagaaggtactaaacagccttgaagtatggaagctcctccttttgtccctgtcagatctgtatgtccaagtgtggtccagagtttcttgcccaaacaagctgagatatttggcagggcacatggtaggctttcagtaagtatctgtggcactgaattaaatccctctagccagagtaataatctgtttccgagttgcagaggaaacgcaagcatatctgtctttgtgcgctccccgagggttaagggcttccggagggttaagggctcccggagggtaagggc

SEQ ID NO: 156746 - DNA, 337 bp, Homo Sapiens
accctggggacttctttgggtgagaagtctacgagtcgggatggatgagatgacctttcacatctgtgagtttttttcaagagaacacgttcctgctgaatggcctgtttctactctccaagctgctctcattttaccagactgccctgaatcctggcctgcctttgtggggtcaaggaaggacctttgtctcaaacagctccccagctagtttgacttcttgccagatgtaatacccctccccgaaatatgtgccatccctttgcttctacccaggggacacctgagtctcacactgcctttaccaattatgtaccagggctaagggctcccgaac

SEQ ID NO: 156747 - DNA, 303 bp, Homo Sapiens
acaccacggcagcccttaaccctaaggagtgtatttttgtctctttatgtttgctgtctgactgatgctttcccaagaaagggagaaaggaaaaggtgagggtaattaagtgctttgattccaaaggctttctcttctagctgctgctaggctaggtgtagagtaagagcaatcagtgacgatacagacatcagtcaaggagttaagtacagaagacgtttcaagatgacagtaaatcaaagaactgcagataacagacagctgactgtttaggggcttcaccagtgcacaaccgacagagag

SEQ ID NO: 156748 - DNA, 293 bp, Homo Sapiens
gcatcagagactacagacagatgcagctaacttcagatggtgcagcttcagggaaagatcaccttcttcccgcatcatcccctttccaactcccatccgctgccagccatcattcaataaatcctccacatacactacccactatcggtttgtgcaacctcaattttctaagacgctggacaagaacccacatgctgaaagggcaggggctaggacactgctacggggcctgcacagagcctgctcccaccagagaggagcatctggctggttccagcattcgtccccgcttg

SEQ ID NO: 156749 - DNA, 620 bp, Homo Sapiens
  misc_feature (103)..(103): n is a, c, g, or t
cctgctctacccgggagtggacgtgttggggttcccctctgagcgcccgtgtgtccgcactcacgtctgtggagccagatgtctgcactcgcgtgtgggctcnctgtgcctgtgccatgcctgaactcccacctgtctatgggtcagaaaggggctccaggacccaaaggtttcaagggtgacacaggagtcggggtcccgggctcccctgggcctcctggccctccaggtgtgaagggagatctgggcctccctggcctgcccggtgctcctggtgttgttgggttcccgggtcagacaggccctcgaggagagatgggtcagccaggccctagtggagagcggggtctggcaggccccccagggagagaaggaatcccaggacccctggggccacctggaccaccggggtcagtgggaccacctggggcctctgtactcaaaggagacaagggagaccctggagtatggctgcctgggccccgaggcgagcgtggggagccaggcatccggggtgaagatggccgccccggccaggagggagcccgaggcctcccggggcctcctggcagcaggggatagcgtggggataagggtagcgcagggttaatcgctgccgg

SEQ ID NO: 156750 - DNA, 373 bp, Homo Sapiens
ccctcgccatcttgctgatggcattcctatttagatcttttatgttaacactttaaaattcttttcataatggtcttagatatcttttgctatatttatttctatagtcttatagtttttggtgctattatgaatgatattcatttttttcaaccctactgaattcatcccttattaatttggataatttatctgtggattcttttggatcctctatatgggctctatgagcttttattctgtagtctacctccattttttactgatcataccttaagatcgtttcggccctgagacctctagtctttggctttacagaatattcactgcgtgacggtggtgcgtaaggtctgccagagcgccatgtttcctg

SEQ ID NO: 156751 - DNA, 302 bp, Homo Sapiens
catattactacggggcttataccactgatagtgaaaatcttgacagttcttctcttccctttccatcatgtccacatgcatctggccaccaagtcctccccatccctgctctagtgctactgccttagggcaggcctccttcagcacttttctgcatggtagcaagaagctgataagagggaaggggtgccacatggtttagcctgttatcctttgccaccgtgttttgcactccaggtgtctgaggaacacctcggcgtgtcgtcgcccccctgctccgcggcgtgtttcagtgccctcaa

SEQ ID NO: 156752 - DNA, 514 bp, Homo Sapiens
tcggtacccttcctctttgccttttgcatcaaagaaaaatggatttttctccacttttagatgctaaccatttggaacgctgggccttcccagggacagcattccaaacaggtagcatctgaaaattgagaaaaatccattttctcaacgagaagggggcacagcttttgggagccacagtgccccatcttgctgagtctcttgggggtctctgttctagattccagcagaggtggaggctgctcaacccagggcctgtgaggaacaatgctcttctcggaggacacgtctgttttagctcgaggcagcgcctcccagagcaagtggaaggggctgcagatgcccggtggttcacacctcggtatcccaatggctcagggatggtggggcccatgatggttgacctccctttaggggcctgtttgaatgtcatcgtcacccagaatctgaagcttgctatttccctggggtttggtttacagttgctgaccctgggggaggctatcagcgcgtt

SEQ ID NO: 156753 - DNA, 303 bp, Homo Sapiens
aacgcgctgatagcctcctctcaaaatctcctctctcagttcacacccaacagctaagtcacactcacgggaacacctgcatgatcatggtgtagtgggaagcggttctgccaattatcagcattagatctgggccaagttgagccagtttcctgcaaagggaagctctttccttcctcatggacataatgcatgaaggcacccaacaatggcaggatcctcggaaatgttccttggctctgggtttggctgtagattgactgtttttgttttgtttgagacagagtcttgctctgtcaccca

SEQ ID NO: 156754 - DNA, 332 bp, Homo Sapiens
ccctgttttacagatgaagaaacaggctcagaagaggcagacgtgtctaagatcacacaagccttgacaccatgagctagaagctgagggtgaggtcacttcacatcccttcccttcagcttctactctatgtgggtagcgtcctcgacacagaaagcctgataaaagatggcaaaattaccgggcgtggtggctcacgcccgtaatcccagcactttgggaggctatcagcgcgttaggaggctatcagcgcgttaggaggctatcagcgcgttaggaggctatcagcgcgttgcaggctatcagcgcgttaggaggctatcagcgcgtta

SEQ ID NO: 156755 - DNA, 256 bp, Homo Sapiens
  misc_feature (19)..(19): n is a, c, g, or t
cttcccgccacctgaagcnatctcgcctgtctccaccacctgaggagtcacccatgtcccctccacctgaagagtcacccatgtctccaccactggaggcatctcgtctgttcccaccatttgaagagtctcctctgtcccctccacctgaggagtctcccctttccccaccacctgaggcatcacgcctgtccccaccacctgaggactcgcctatgtccccaccacctgaagaatcacctatgtcccccccacc

SEQ ID NO: 156756 - DNA, 456 bp, Homo Sapiens
gttagtcctgccccgtggcagctggttatccagctagctccctacagtgagtactagagttgtttggcctgtagtgtagggtgtctcatctcatgccctgctttgtttccctggaatgtgaaggcccatgccagctcagcccagtattgcatagctactcagttcaggcaaggcactgcatccccagagggtaatgtgcctcgtcagctgaggtctagggtgtgtgaccttaggttggtgcaggcgccattttcctgggatgcagtaaggtgcttcagattaggtactggactgtgtgtctgcttgggatggccaagacactgttacctggaaggcagggtgctgcttgaacttatgcactggggaggcatgactgctgtcgatggtcaaagtactgttttccccgcagacaaggtgctgcttcagctcaggtacaaaggagtgtgtcagtgcgtt

SEQ ID NO: 156757 - DNA, 516 bp, Homo Sapiens
tatggtaatacatggggctcattccttcctggcagggacctttagggctttgttaaattgtttgactctgtcattcctaaatgtagagtcctttagaggctcctcactgcccctgacgaagccctcaaacgctcatgctctgatcccttgccacccgcccccaccctgttctttccagctaaaatgacttcccggaaggaggacctggccccaggcaaacactcagcaggagctcagtggggagatgaacgcctggcatcactctgtacatcagcgccacaccgcagggctgtccacggtgagctatgaggctggagatggttctggagcagtgaactgcagaggaaagaaggctgccctacccctgggccaccaatcactagcagtgtgacctccggcagcttcttctcctgccaaatggggatgtttgcttcactgacaggaacacagtgggtgaaccgggagtgagcggcccacttggctgaccacttaccaacatttcggcgggcctcgtgc

SEQ ID NO: 156758 - DNA, 158 bp, Homo Sapiens
agggatattctaaaataaagtaacatcaagttgcggtaatatttatgacactatttaaattgtatcaatataattttaaacaaagtgtatttttgtgtatatttagcatattggtatacacgctgttctctatatatgttgttctttaataagagtct

SEQ ID NO: 156759 - DNA, 441 bp, Homo Sapiens
gagacaagaacagggcccctgccccgggtgctgagccttggacagctcctgacatggaggcagctgctcagaatcaacatcatcgtcagagactgtggaccacctgctggtgcctgaaaccttctgcatggcccgcaagctgaagtcctgggcccaggcccgcagatggggcagcaatgctgccctgccaggctgtagaacattctcctgaccctgctttctggtcgacccgtccaccttgggctctggcaccaactccctgccactgggcgcccaaggactggggtactcacgcctgcagttggggaagccccagtatccggtggcacagcgggagcagtcacggccaatgacatgggcatggcagggacactggcccccgaagggctcacacgtggggctgagcacctacttcgtgcagccacatccgactaccgcgga

SEQ ID NO: 156760 - DNA, 385 bp, Homo Sapiens
atcaggatgtgggaagtcatgcagttgtgtgcacacacacctgtgtgtgtctctgtatacaccggcttacctgagcatacaagcctggccaaccggctatacctgagcatgcaagcctgtctaagcacactctgtcgacccagggcccgagacatacatgtggctctgcgagctccccttgcagtgtgtgtggccactgctcacagggtccagcactggggtcagtggagatggggagtgctgagactggagagggccagctacatccccaggggtcactcaggggctatggctggccctgtgctaccagagggtacggggtcgtggagggccatggtcctgctgatgaggcagccttggtgaggggccatggagctgaaccccg

SEQ ID NO: 156761 - DNA, 440 bp, Homo Sapiens
aaatgtgcgggtggctggactacatctacatcctgctgccttgtgccctatcatcagcccctggctgccgtccttgagcctggcccaagttctagcactcagttctcattagaaggaattcatgcaccctgagacagggcacttggtgcagccctgttctagggacgctctacgagtccttttggagagccagcctaaacagactgactcacgtgttccctattttattccagccgtctaagcctttactccttctgtgcccaccacttgttttgcctagcaatggaatggtggatccattgtccttccagacgggttttgacgtggcttctgttcccatatcccctctacctctgggcctcgcagcctctgtacctcccatatgccctccgttattttgtcttatagcattgccccaaagtccttcccctcctgcagac

SEQ ID NO: 156762 - DNA, 172 bp, Homo Sapiens
cgggccagtacggatgtggctggaagattaagacatattcacgacgatcaacgacactgccatgctgtgtaaggcccccggcatctttcttgggcggccccagcctcgggcgcaaggcgagcaccctgatgagtttggcttcctgctgaccacatccgtactgaccggtccg

SEQ ID NO: 156763 - DNA, 316 bp, Homo Sapiens
ttttcagtttactcctcactgggcagtccacaggcaaaaagtccgtgctttttccgtccggcaatggtaccacgtgttttttcagatgttgccacaggtatctcttcacctctttctccctgtactgcaaatcggtccacagctgtgcctgtccttcataaatcataggctgttgcaggacaaagcaaaactgctcgaactgggtgaagaagctgttcaggttgatggtgtcccaggtctgcaggatgctgaaggtgctgtccagcatgagcgcagcgctatctgcttccccttcgccacatccgtactgtaccgg

SEQ ID NO: 156764 - DNA, 117 bp, Homo Sapiens
ttcaaatggtggggacaggggcgatgcttcaggtggtggggatagaggcgtctcaagtgcaggagatgggggtgctcttccggtggagcacatccgtactgaccggtaccgagctca

SEQ ID NO: 156765 - DNA, 156 bp, Homo Sapiens
ctcccgggcagtacggatgtggtcttatttttacccttgcactccctgtagaccatcaattctacaccctaattacaaaatcatatccacctctgcctggcagaaggtgttatgcttttctggcttgcctaccatccacacatccctactggcccg

SEQ ID NO: 156766 - DNA, 313 bp, Homo Sapiens
cctgggcccgggcgtacggatgtggagatgatatctatggcttgaggacttcaggctaatgtttgttgattgacttagtgaccacagatactgccagaaagtttctgatgcttccgcactcctgagctcttcttttgtcctcccaattccccctcacccccacatcgctcaggcctgggatcaccaggctcctcttctatcccaggtcaccagcacatcctgcaccctttggtcaccacttctgcccaggtgccacccctgtctccattcaaactctgtatttcccactggcccgcacatccgtactggcccg

SEQ ID NO: 156767 - DNA, 136 bp, Homo Sapiens
atcggcaccggttatacggatgtgcggagaaggagaggaattcgtctggttgaaattcagtgattctccataggcagttgcagttattatggctccagctatcaaattttactgacatttcccaatctgattctgg

SEQ ID NO: 156768 - DNA, 316 bp, Homo Sapiens
cgggccagtacggatgtgcacactttggctatgtggagatgaaaggctgagcactccaggaatagggcaccacattagtcaacatgtataaatgagatgaaaggacatgtagttggaagagaaataagttctatatggctggattctggaaatgaacactgtttcatttctgggtggtggaactcatgttttaaattcccttcttttcagtgagtagggaatgccacagatcctgaggccttatagctcagagagctagtgctaaggtggaccataacctctctaggtcttcccaccacatccgtactgacccggg

SEQ ID NO: 156769 - DNA, 390 bp, Homo Sapiens
acctggcccggtcagtcggatgtgcgggccatacggaggtgtgaaaaattgttaaatcttcatctatagtatgactctaatgcgtagtgcctacaactgaaagatcaagaagcagcaatataaacatgttatttagaaatgtggataaaacaccaagagaatcagatagaattgttaacagtagttgcccctggtgggtgaggaaatgggaggaagggaatcaagaggctgttgtttttcacctcaagcctacatgagtcatttggctctttaaactatatacatgtacattgttgaaaaaaatgatgtttttaaatatttgttaaaagtccatactccccaacatagttttcaatattcttcatagaattacacatccgtactggcccg

SEQ ID NO: 156770 - DNA, 449 bp, Homo Sapiens
gtcagtacggatgtgggaagtgcaggggacttcagatcacggggtgagggaggaggctcactgagagagaagaccagtactgtgctctgtggggccagctcatgagaccgcaaagatagtagcagctttgatgccaggcgtgggaattctgcctgcgctgttgggagccagtcacgtgttccacacaggtgagtggcctgttcagattctgtccctgtgtgctccatcctagtggtacctgggagttgtcatctccgtgcctctcttttttctgtccccaaatctccagttatcagtctttctattgcacctgaaaaaactgcttgcctctctccctagttgtatgtggtccctgtgtcctcatcactcatccatcaagtgacaaaactcttctcttaaccttcagccttggcctcctctggtctaccctttccatgctggcagaggga

SEQ ID NO: 156771 - DNA, 373 bp, Homo Sapiens
  misc_feature (157)..(256): n is a, c, g, or t
aactttctgttcttaccgctcgattttgctgtatacctaagatagctctaacaagataaagtctatttaaaaacccaactgtatctttgtactttaatgcgataaaagaatcataaaatcattagaaatggtttcggcctggctcagtaacgcatannnnnnnnnnnnnnnnnnnnnnnnnnnnnnnnnnnnnnnnnnnnnnnnnnnnnnnnnnnnnnnnnnnnnnnnnnnnnnnnnnnnnnnnnnnnnnnnnnnnaaaaatggacaaaataacgccattcgtggtgtaatgctatatagtcctaactactcaaggaggctgaggtgggagaatcacttgagcctgggaggcggagctcgcagtgaaaccaag

SEQ ID NO: 156772 - DNA, 313 bp, Homo Sapiens
cgggccagtacggatgtgaggggtgggccagccagcgtgaccacctgagctccgcctcctgtcagatccgccgcggcattagattcttgtaggagctcaaaccctatcgtgacctgtacatgcgagggatctaggttgcatgatctttatgagatcctaatgcctgatgatctgaggtgagacagtttcatcctgaaaccatcccccaatcccacccgtgtcttccacaaacctgttcccagtgccaaaatattggttactgctggcgtagatgactccttgaacactactgtccacatccgtactgacccgg

SEQ ID NO: 156773 - DNA, 270 bp, Homo Sapiens
gaccgggtcagtcggatgtgggggctccctgggggtgccatgggggctctgccgacccttctgtagccctgagtcttcggggaggtcatggaatccagccccttgcctggaaacactgccctttttatcagaaggagatgctctgactttcctttggattgactccttcaccctgagctggaagttctttcagaagtctaacctaaatctttcattaacaaaagcttcacttttgcaactacacatccgtcgcacatccgtcctggcccg

SEQ ID NO: 156774 - DNA, 152 bp, Homo Sapiens
tgtccgggttatacggatgtggtggaagaacagactgatttgctggtttggctgtggccatcagggagtgacccacagtgatgagatcaggccagggaagaggcacagccccccaataaccatcctactggcccgacatccgtactggcccg

SEQ ID NO: 156775 - DNA, 328 bp, Homo Sapiens
cgggccgtgaatccagcatgcagatttcacatgcaggggaaaaactaaagcccttttctttcacagctgggaggcagaaagcctcaggcaagttttcaagccagtcttgccctttgcctggaaacagacttggggcggttagaggaggcatgattagagtgagaccagcccttccgtttgcatgggatctggatgagacctgtgactgccggttttcccccacttccctgacaacctgcatgactcagcagaggcagccataatcctcctaggtacacaactccagtgacctgggaatctcacccacatccgtactgaccgggccgag

SEQ ID NO: 156776 - DNA, 307 bp, Homo Sapiens
cagtaaggatgtgaataagctgggcatcgctgtctaggtgtcatcccaaatgtcacctcccagagaggcacctgaccacacagcctggcgaaaggaggtcgctcccacacttactctgtgtgtttcaccccagcttactgtcttcatagcacccatctgcatctgaagttacctgcctgcatatccatttccttggtgattatttatctcctgcacagaaggcaagctatccaagagcagagtcccttgctcactctgacttcccattaggagaaaggacccaagccagatcttggtcaacaagcaa

SEQ ID NO: 156777 - DNA, 361 bp, Homo Sapiens
cgggccagtacggatgtgggctgtagggggtggggtatgcagtgttctatttggcctttaaagccatgggaacccagatcaccagatccggagcctgactctagcccctgagccacctgttgccctaacaccctgtctgactctctcccgctgcagcagccagtccctcctgcactccagcaactccagccatcagtcatcttccagatccttggaaagtccagccaactcttcctccagcctccacagccttggctcagtgtgcctgtgtacaagacccagtgacttccgggctcccagaaaccccaccctaaccagtggccaacccagacagcctgcacatccgactacccgggcggtt

SEQ ID NO: 156778 - DNA, 630 bp, Homo Sapiens
tagaggatccccgaacggttgatgcggttgggaccctggaaacgtctccagatgtggtgatggctctactaccgaaaaaagaagaaaagcacccagagatatttgtgaactttatggagccctgttatggcagctgcacggagagacagcatcattactacctcagttacattgaggaatgggatttagtgctggcagcatctgcggcttcaacagaagttagtatccttgctcgacaaagtgatcagattaattgggaatcttggctactggatgattctagtcgagctgaattgcctgtgacagacaagagtgatgactccttgcccatgggagttgtcgtagactatactaaccaagtggaaatcaccatcagtgatgaaaagactcttcctcctgctccagttctcatgttactttcaacagatggtgtgctttgtccattttatatgattaatcaaaatcctggggttaagtctctcatcaaaacaccagagcgactttcattagaaggagagcgacagcccaagtcaccaggaagtactcccactaccccaacctcctctcagccccacagaaactggatgcttctgcagcgcagcccgcctctctgccacatccgatggcccg

SEQ ID NO: 156779 - DNA, 574 bp, Homo Sapiens
ctgcaggctctatgccgttcgcacccaggagtacagtcgtctttgcccccctctcccgggatggaggctgtagattgtgtcagcggcaggcaccccctccctacggggcagctcatggcccagggtgccttcccacctgtagaggactttcctacagaggaatcctgatgatcactcagtgctgggctcccaccccgtatcaggaaccggagaccaaggaggacctaggcagagagctgggaagcctcacgggggatgtgagggagaggaggagggaggggctttcatcacttcccctgtgctcagagcccccagaaccggggatccagagctcggggcgccttctccaaacttccccagtcctgatgggagtccccaaaccatcttcttggggctagatggcctctccaagtctagggggttcaggctatgagacacggggcttggacacacggtgctctcccgagtgcagcctactcttatctccgcttgcagaatctctctctctaaatccgtgtattgagccgctctcagctgtacactgagcactgttcacccgcctcggcctgtacga

SEQ ID NO: 156780 - DNA, 485 bp, Homo Sapiens
tcctgttttatgcgaaggaacaggattggaggtgctctctggggtgtcctcctaccaggctgcctgttgaagtccttgtggtgctcagggaggatgggtgacactcgctgttgcttcagcttcatcttgaggccacacagcatctccgctacccaggtctcctcaggctcaggggcgagctccttccgtggctcctgctccaacgactcctcagattcgtctgaccactccctcttccttttccagccaagggacctatgtggggggctgggatctaccccaggggctgagtaaagaaaccaggccacggtgtaatgcttctgcatttgatcaccttagagcccgacccaaaaccccaaaccactctccatcctccccagccttgcagactgctggcttctctaagccatctttccttctgtctgtctcctctgctgagctccatgtgccgctccttctcctccccattctcccgtttttctgtc

SEQ ID NO: 156781 - DNA, 362 bp, Homo Sapiens
gtcacctcgggcccgttctcctctctgtggggctcttcccccgtagtgctggctggctccacttcttcctgccggtgtaccctgtgagcaggattttaccgttactgtcctgtcttcctagctttttgagaaccactggcagaggtgggtgtgaaagcgatagttatacatccatcagggactgaggagcttactgtgaattggacttgaataggatacctcagaaattatccactcacagggcatttatacacgacacctacagtgcatacacaccgctgccgacgtgcttacgaggacggctgtacttctataacatccctctcgcagatgtcggtccgtcgatccaatcactcgctctc

SEQ ID NO: 156782 - DNA, 219 bp, Homo Sapiens
gagtccctctgtgggacagaggaactcttctgtgtgggtggggggacaccttgcaaagtgctggtgtgtgagttacacctatggatacttatcctgtgaccctcagcagaaggcaggatagagacttctggttcacagaagagggtctgagagccaggggggtttccagcaagactctgagagcatggagtcacacaagatcacatccgtactggcccg

SEQ ID NO: 156783 - DNA, 382 bp, Homo Sapiens
tctctctgtggggaaccaggttgtgggaggtcctgaaagcgacaagatggggcaggtttgcctggagtagcaaagcctgatcccctcaggcattgcacttgcggcctgatgaatatggacgagagccctggcctgccagtgctgttgcaggagaacgagacgatccagcgagggctcccagggggcagagtggggcggagggctgctgttgggggtgttcacaccagagagccccagtgcgagcagacggaggacacgggtcagtgctttgccaaataccaacaggcattatggcattttgtggccagagtctggggtcttggctgaacaagagccatctcgtctccaaagacgggggggttacaccccacagagagagcgt

SEQ ID NO: 156784 - DNA, 621 bp, Homo Sapiens
acgctctctctgtggggcggggcagctggtactcacattggtggtctcaatgccgcggtacttggcacggacccggggctcctggaccgtcagcaggtgggtcccactcacagtgatggcagtgcttccattgatgatgctccaggtgggctcaaggcgggtgacggtggggtcctgagtgtaggtgtagatgagcccggggctggagatgttagcccggtcaatggcaagtgtgatgggggcctggctggggcccagggtggagagaggtgagatgcacacgatcgccttggcatctctccttacaaactggcactcgctgtccctcacagtcactgtgaccctgctgccagcatccagagagctgcctgagatggtaagccgtgtgcccccggacgccgggcacacggctgggactcacttggtcaaacgttggggtcacaaagctgtagacctgctccgactgcgtgcggaagtcggctgaacagtcacccacacacagctccacgggccccggcggcgggctgggcaccagcgactcctccatctcacacacgatcctagggctcagagagcgtcagggccggccaggccacatacggcccgggcacccacagagga

SEQ ID NO: 156785 - DNA, 516 bp, Homo Sapiens
ttcttctgtggggaggtggtctcgtggggaggtggtctcgtggggaggcggtctcgtggggaggctgtctcaggtcacctggccgccctctcctggggcacgtcagtcctctgttaccctctaggggatccggctgttcttacaaatgcttggaggagagccgccagggaggctgagtgggtagcatttatttccagaagagtaggttttattattttcaagcatattcgcgattcctgccagcttctcaggaaagcccaaccttggagggacccttcctctgcgaggaggcggcgagtgagcgtgggtgtgtgtgcgtgctcaccacacagttggcatcctgtggggcagtttagatacaggcggagcaaggccctgctggaggcacctagccctgcgcgtcacacagcacacccctggaaccaacagccaccggaaacgcacgcgcacaaggtactggagcatcccagaccccgcacccccgaggcccggcctcacagggagacagagagagca

SEQ ID NO: 156786 - DNA, 438 bp, Homo Sapiens
cggtacccgacgctctctctgtggggaggaagtgagtggccacgggctggagagaagcggacccgctcaaggctaatgccctgtgcagtatcagcaagacatggtgggattgggacaagaggggcaggacaagagtgaatgggcactgcctgcctgtctgctatgtgccaggcatggggactaatttctgacctcagggagcccagggtctggtgaggagagaagcctgcactcaaacagctggagatctgtggagactcaaccttggacttcctgcctctgcagtcagaggccctccctgcttctcaaccctagcagctagactatagtgtcagccacataccctgcagaaccagggccagcttcctggctcttcagaggccctcacactgcttctccccacagagcccccacagagagagcgtcggggatcctcta

SEQ ID NO: 156787 - DNA, 302 bp, Homo Sapiens
cctctctctgatggctctgatttccccctttctcactgcaggcaggaaaggatgaaataactttctgcactggcagataggctgtttcaatttcatagaaaccttcccttcatccggctcccacgtggtctgctttttccttcatctgcttccatgtggtctgctttccttgcctgaaaaacaggtacatgttcaggattcacacttgctcgagaaattcttccctcaaactccagttcagaccaagcacaccctctcccacgtctgtccccacagagagagcgtgcggggatactctagag

SEQ ID NO: 156788 - DNA, 292 bp, Homo Sapiens
acgctctctctgtggggttggctggcattagggtcagagaggtctttaggctcctccctgccccactcctcacctctgccagataaggcaggtgcaagtgtgtgggtgtgcccctggggttgtgtctcagagagggtcttggtgttgcagtttttcccgagcccatcctcctcaagcctcttggggcatcggtctcagagtactcctcttcagggcctgcctcggtgcctccttcggcattgctgctctgtcctttgtgcatctgttctcattccccaggatgtggcattgt

SEQ ID NO: 156789 - DNA, 322 bp, Homo Sapiens
acgctctctctgtggggacggactctgcctcattgaactttgagaataagcccaagtcaagtactgttgtctccgtttttcttgataatgatattgaagtttccagaagcttattaatctcagggctagtgagaaaaatttccaagaagataaccctcaaggctataatcactggctataaaaaacagccccaaggaagcaccggtcctactggtggtggacaggagaaggtaaagagaatgcctcccacgccccccacccactgcaccacacacaggccctcccatctacagtctgcacccccacagagagaacgtcggtg

SEQ ID NO: 156790 - DNA, 213 bp, Homo Sapiens
ctctctgtgggggtcccgcttcccctctgcacctgcatctctaggcctttccaggagctgtgttcttggcctgggggtggtcttttctctccttacctggctgacagttacttgtccctaccgccaggggaccatgttcggacccccaggccagcccactgctgctccttgagccactttcacggtccctgagcgtgtccccgtcatagctca

SEQ ID NO: 156791 - DNA, 389 bp, Homo Sapiens
atggaggggataggggctgccaaagtcactttctaccctgagccctacccgctcgtctatggcccccagctccttgccgcctacccttacaacttcagtaacttggccgctctcccggttgctctcaacatggtcctacctgatgagaagggtgcgggggcccttcccttcctaccaggggtctttggctacgcagtgaatcctcaagcagcaccccctgccccaccaacaccacctcccccaactcttcctccacctattccccctaagggagaaggggaaagggcaggggttgagagaacccagaagggcgatgtggggtgaaccctggggctcaatccccctttcaccagatgccaccctccctgaaccccccacagagagagcgt

SEQ ID NO: 156792 - DNA, 427 bp, Homo Sapiens
cgagctcggtaccccaacgatggtcctcagctctactccaggagccagcaggtggagtagagctggggaaaattaagccagagtggggacgaacaaggctttgctgggtcactctaaccagctggtgtttggggactcacctggagagacactcctctctcaaggcctggatggcaatgtgggtgatgttcacggacatcaaacagaaagggaattggctggaatggaggggcacccagtcagcagcaactccagctctcactgtgtttcctgtcatctgcagcctggtgtggctcgcaggcaagcacagccccagaggcaacagctgaggaccatcgttcgatggtcctcagctatgcagcaccccactttatggtcccctccttctccctctccatgtccctatgcatccccatctccagcttca

SEQ ID NO: 156793 - DNA, 638 bp, Homo Sapiens
  misc_feature (76)..(131): n is a, c, g, or t
  misc_feature (177)..(192): n is a, c, g, or t
  misc_feature (349)..(561): n is a, c, g, or t
cacatcgatgtctcagctactaaggggctgaggtgggaggatggcttggtcaggagatcaaggctacagtgagttnnnnnnnnnnnnnnnnnnnnnnnnnnnnnnnnnnnnnnnnnnnnnnnnnnnnnnnnccccaaaacccaaaaaaagacctgtcattcataaatgaaacaacgnnnnnnnnnnnnnnnngatgcctttctctcactgccttaaaaacgctttgtcttcagggttcattagtttgactctgacgtgacttgctgtgaatttatttggatttatcctactcagggttcactcagcttctgaaatttgcagatttacagaagctgaggaccatcgttgnnnnnnnnnnnnnnnnnnnnnnnnnnnnnnnnnnnnnnnnnnnnnnnnnnnnnnnnnnnnnnnnnnnnnnnnnnnnnnnnnnnnnnnnnnnnnnnnnnnnnnnnnnnnnnnnnnnnnnnnnnnnnnnnnnnnnnnnnnnnnnnnnnnnnnnnnnnnnnnnnnnnnnnnnnnnnnnnnnnnnnnnnnnnnnnnnnnnnnnnnnnnnnnnnnnnntacagtggtgtgatctcagctcatgcaacctctgcctcccaggtggatcagctgaggaccatcgttggggatctcta

SEQ ID NO: 156794 - DNA, 430 bp, Homo Sapiens
tgtgcgttctgaggttcccccacgatggtcctcagctcagaccaccgtgcccagccccatgttgtaacttttcatatacttttctagttcttttaggtgctgtgaggtgatctgagatgaggactgtgtagattctgggggctcagcatgctgttatttagctcatgaatgtccctttcttttttagatttgaacatgagctacctgcatattttgtggctcatttgttactttgaatacaaagcacattaattcaaatatttcaattaggaaatattttgcctgttataaggtagcattttgaagaagacttccattggtgaatcctacttgtgacatttataggaagtttactacaaagtatgattgaatttgcccatcggagcaatcagtcataatttcctgactaaatagactgtgccatatccct

SEQ ID NO: 156795 - DNA, 500 bp, Homo Sapiens
caacgatggtcctcagctgggcatttctttaccaccttccacagcaccaggtattcctgggtctataggcagtctggctttctccacaagataaatctttgacttttttgtgaggttgggtaagaacactcatctgcttgcctaggatgaggcatgtatagaactttccactgactttaaaccatttcctgctttcagcttcacatcttgcttgcaccctcagagatacctggcaccttcaattcctgagtcttcctagagataggtgatatgaactggctagaatcatgcaaggaattggtatccgcctctgtagatattttatattccactttctcagctaattaatctactccaaccaccttccatttccctgaagtttttttataccacttatttactgtctcctgttctttctgctcttgcagatttatgctgttttcattctctactcactgtgaatggggcttggggtagagtaattagtgaggaccatcgtt

SEQ ID NO: 156796 - DNA, 409 bp, Homo Sapiens
accactgcactccagcctgggtcagggttgtcttttaagaagtcgtctttaatggctttctcttaggcctggagtaacaaaatgcaaactcttttccatggtctttagtgacccacatgctctgagtctcagtaatccccataaccctaccttgtgcccatctcctccttgctgggcactttgcactgttgcaaggtcggccttctttaagtccctcaacatgccaagcgttcccagccttaggaccttcatgaacgctactccatctagcgaagatggacatctccctgcccatcaaacaccttcagccccacctccctggaggagccttctctgatgacctcacctatgggattcccacctactattgtgtagtaggtgggaatcccatagctgaggaccatcgttg

SEQ ID NO: 156797 - DNA, 403 bp, Homo Sapiens
aacgatggtctcagctgtggtgtttaaaaattcttcagaccaggctgggtgcagtggctcaatggggtaaatgatcaagactgctctggatctgaggtcattagtttggatgctgtatccaaactatattctgcatgaatggccagaggtgtgaggggaccagtatctcaacacatctgtaacgcaccctaacacaatacactggttgagaaattctagtttaaataacttgtggagatcacgacctgaatagtcaaaatccatgcagcaggttgagaaaactatttcacaattcctcttatttcaagagatacgcaatcaccttttgcagctttcaagtatagaccagatgtactaacaggcaaccatttcgtctggaagatcatctatttggaggtcactg

SEQ ID NO: 156798 - DNA, 273 bp, Homo Sapiens
tatggtctcagctgagaccgtgggatctgatgtccagtttgaggatggtgcaactggagacccgggcgggagctgatgttctagttttagggccgtgcagctggagacccggggaggagctgacgttcccgttcgagggctgtgcaggtggagacctggagaggagctgttgttgttctaatttcgaaaaatcattgtgttttagctgtaaatccatttgaagtttcagagattatgacagagtaacccaagaatagctgaggaccatcgttg

SEQ ID NO: 156799 - DNA, 355 bp, Homo Sapiens
ctgccctacctatctaaaacagcagggctagttacacagactaaatcttcgacgatcgtccctaccagtgagcactgctctctggcataaggggtagccatgtgtctgagagtaaaacaaacatacagctcagccactcattaagagagacatctggggccaggcaccgtggctgagctgaggaccatcgttggggagaaattgggaaattttaaataaaaatgggctggcattcccctcgaaggttttctcagaatacttttgctggtacaggcatggatggttcacaccatataatcccagtgctttgagaagttgaggagggaggactgctgagagctgaggaccatcgttg

SEQ ID NO: 156800 - DNA, 400 bp, Homo Sapiens
ctcaaacgggtttcttagttttagcccatcagtctgctgaggtgaaattaagttctctttcaagtttgttatctgaaatgaccctgggtccgtcagtactgcagctgcaccctgacctgggctggtgacagtgctctgcaggaggcgcccactcgttcccggtcctcctccgggaggagcccacagacaccacactggtttcccagtacactgaagctatcgctgacgttaaggagcctcttctaagctgggaaatgtgggcagctggctgcggtcctccctggaggggggtgagggaaggtgttggtgaaacgcctgtggttctcaggggcctgggaaactcttttctttatcatcgactttgtcaagctgggaccatcgatgggggagcctctagagt

SEQ ID NO: 156801 - DNA, 223 bp, Homo Sapiens
aggagtttgacctgtagaggcgccaggtcttcttattcttatccagctgtgctcactgtcctacaaagcacagtgcgtaacttctaactgttcctttctccccaggctctactacgcgaaggatagtgcccgaagttgctgcttggcatagatgagcctcagcttccagggcactgtgggcctgttggtctactagggccctgaagtccatctgacccatctt

SEQ ID NO: 156802 - DNA, 317 bp, Homo Sapiens
ccatccctaggttttttctagcactgcaatccaaccagcatgactacccctgcttaccagcctgcagtagctcccgcatcccttcaggttaagattcagacttcttagcaaggcactgcttatttctccagcctctgtgacagcctcaaaccctgcaatcgagctctgctgatccctggagaagctccctctgagcctttgcacacctgtccctgctacttgagggtgatttccacccggtacctgctggcttacctcccacctggaagcattccgtatctctggggtagggtacagtagtagccgtttttggccat

SEQ ID NO: 156803 - DNA, 485 bp, Homo Sapiens
  misc_feature (137)..(137): n is a, c, g, or t
aagaagggtcagaacaaagccaggcagtgcaaggactcggccaccgaggcagagcgggtatacaggcagagcattgcgcagctggagaaggtccgggctgagtgggagcaggagcaccggaccacctgtgaggcctntcagctgcaagagtttgaccggctgaccattctccgcaacgccctgtgggtgcacagcaaccagctctccatgcagtgtgtcaaggatgatgagctctacgaggaagtgcggctgacgctggaaggctgcagcatagacgccgacatcgacagtttcatccaggccaagagcacgggcacagagccccccgctccggtgccctaccagaactattacgatcgggaggtcaccccgctgaccagcagccctggcaacagccgtcctgcggcatgataaagaggttctctggactgctgcacggaagtcccaagaccacttcgttggcagcttctgctgcgtccatcgac

SEQ ID NO: 156804 - DNA, 248 bp, Homo Sapiens
cgaccatgatggtcagatggacaaaccttcactattagaatgtaaaggtttgtccatggaccttctaaagtcatcgttatcccaccagaagtacatgtatctctctttgggaaccctcaacggggtaaccagtgtctctctgagtcctaggatcttctgattatggctgggtgatgggtttttcagctctcaccaccctggttctcatgtacacccagcaatgggcgtgcgtccatctgacccatctt

SEQ ID NO: 156805 - DNA, 236 bp, Homo Sapiens
tcaaagtggaaagactttgcataggatgccaatatttatctagatgttattgaaaaaaacatagggagatacaattccagaccctcattctgcacccagttataccctcagtctcacaggtgggtggtgggtggaggtgacctcctttccagaggcctgtgctctccagtttgccacagtaccccgcactccctacacggcgcccagctgggaagagtgtccatctgacccatctt

SEQ ID NO: 156806 - DNA, 465 bp, Homo Sapiens
aagatgggttagatggacgacattcctggaagagtgcctgaggcagtgcggtgaacgggtttgaaaacctcgtgaggggctgggctctcatctgtaggagccatggaaagagaaggatatgatcagggccatgaaatctgcaaccagtgtaggggaaggagacaagacaagcctcgaggcagaaggttcaagtcccagtgtggtggtccaggtgggagagcttgcgagctggggatgggggtgggagaggaggaacaggtgtggctaggacacagcagctgctagatgtgagcccaggaggctgtgagaccttccagtgacagggcggtcagaaagaacaggttaggtgggtgggttctgcgttgggttttggatgtacacactcacccactcactcctttctgaatatcagcatcaacagtttatctttcccatcctcataccatctatcattcatgccataat

SEQ ID NO: 156807 - DNA, 336 bp, Homo Sapiens
ttgagattattcagctaggatcaagccactgtgtccggccctacagtatttttaactggtaacttgatgcatgaataggcaagtcagtggaacgaaagtagagaccgtataaatacccccatgtgtgtatgcacatgtttagagattgtcatttctagtaccagtatttcagatatgaccagacaaaatggattgatccttgactgataattatagcacagggcagtaaataatttccaagatatttctcacggactggttccctccttagtctttatacttctcaccactttgctgcatcctcaccaggtccgtgcttttaacatcatcccgtgc

SEQ ID NO: 156808 - DNA, 402 bp, Homo Sapiens
gcagcttcaaatgaaattcaaccctatattttattcatcattaaatttccatcatcgtcagaatctccctcatggctaggcaaatatatactctatcaatatttagcgatttcgaaggtacagcaggctaatcaacctctttagcatagatcagtaagtgttttttataagcttagcactgtgtcagacactatggaggatatacatcaagagaatgcagtccttggccacttggccatcattatcttgttgaaaagatctacccatgtgaaacatttatcaactagtaccagcatctagcacttagccccaaagaaattaaagaaaagagagaaagcgaagtggatgctatagcacaaggaaaacttccaaagaaagggtgagatttcagtagacttcata

SEQ ID NO: 156809 - DNA, 248 bp, Homo Sapiens
ttgagattattcagctagtggggctggatatggtaaacaaggggaagagatgagtatcttttacatggaaaggaaaatatgagaaagctcaactcaaattattgctaggaattgtggtattacacatgggctcttaggctaatattttgattatctgctggcattttttacctatttcatcctgttttactttaataagagtctgggccaggtgcaattcctcacaattcctagctgaataatctcga

SEQ ID NO: 156810 - DNA, 308 bp, Homo Sapiens
ttgagattattcagctagcggacaggtactacaagggccagaccgcactgcacatcgccatcgagagacgcaaacatggccctggtgaccctcctggtggagaacggagcagacgtccaggctgcggcccatggggacttctttaagaaaacccaaggtcggcctggattctacttcggtgaactgctcctgtccctggccgcgtgcaccaactagctgggcatcgtgaagttcctgctgcagaactcctggctaatctggggtatttttttcctagataaggggagtgcgccatgtggccagccata

SEQ ID NO: 156811 - DNA, 555 bp, Homo Sapiens
tagatattcagctagtaaatggcaaagccaggattcagacctggagcctctgtctccaggctcagcatacacaggcacctccaggtgtttgtaggttttccctgtctgccttaggtataggattctttggtttttaaccaaacaaaaaccagagtactcttttttttcccgtggtgacttaaatttcttgtaattgtttttatttcagttctcttgagtacataccaggtcttacaatgttgtaagaaacagcaaagaaggagaagacacgatctttccacaggaagaagaactttccatctgattgtcttctggagttcttatttcttcatagttttctccccttagaagtgattgcaccagaagataaacccacattggtacatgtcctctggtgattcagctcctcctagctgaataatctcaatgagattattcagctagcaggattgccctactggccctacctcactagctgaaacttttattttacaggatgggccacctagcctacctcctccaactaacaacagtttataactgataactcttaga

SEQ ID NO: 156812 - DNA, 519 bp, Homo Sapiens
  misc_feature (69)..(112): n is a, c, g, or t
tgcattatgagtaaccattgatcacaccatgttgctctaggctggatctagaatctccatatactacannnnnnnnnnnnnnnnnnnnnnnnnnnnnnnnnnnnnnnnnnnngtgtgagccaccatgcctggcctgtttttaatttttaaatggaagattctgaaggattttaaagtgcttattgtagagagatgtttagaaaagggagagcttggtgatgctggagttgggaagagaattgcaggagcaccaccatcgagaaggaaggagggagcaggatcagaacccagaggcctggtgtttgagaagaggggaacatgtgtgcaagctgttgaggcagggagaaagagtatgtgtgcagggaggagtttagaaatttttatggaaaatgaagaatcctgccaattggctttcatcttctcaaagaaaagggacaaggctatttagtgaaagaactagaggagagagttaggggaacaagggagagataagaaagtagattcgctggattgtggtac

SEQ ID NO: 156813 - DNA, 585 bp, Homo Sapiens
aaaactggaaacgtttttcctgttccagcggcatggtcctgggcaacgtccacccctctctgggcctaaggcaggtagattctgggacctcctggggtctttgcagcctgtgctccaggggccctagctgtgtgggaggctccccagtgcctgtctacagaatagtgaggaaaatgtagagggagtttgtcatgaaataaaatgtattttaattttagaacttagccttattctgagattgttcatctgacattggtgataaagtagccttgcttttatgaaatgagggccagagtagatggtcattacttttgaatgtctttatttaccgaaacaaaaagttggcatgcgcgggggtgtgtggggaagtgtgaaagtctgtgaatcactgtttagccctgaggcctgagccctgaaggattttgggctttggtagctgtaagccccagaggggtgtggaggaggagagaacatggtcacacaccccatctgtaggaacctatctgtggggatggcctgtgaccgctctgcatccagatgttcaagatgcaaagccttctaagccatggagtaaatgcaggtacc

SEQ ID NO: 156814 - DNA, 397 bp, Homo Sapiens
cttatggctatgattacaggccacagataatttcggaatctaaagcccaagatgccatgtgaccccgatttgtctagcctgacagactgctgctgtcttggctggctctgacctctggggaaatggcccaacctagcaccttaggtcctctcgtccttggcaaggggtgggcggacaactgacaggtgagctgccccttggataacaagaacagcggcttgaattcagaggtccctgcctgatctcttcttgcacccagtctagctgctcctccacatggttctggaagtttccatatccctggccttggaatgtaggttgttatcccagatctcttggctccaggtgagaacttcagagcttgcagcctgggttcaaatccttcctctacctctta

SEQ ID NO: 156815 - DNA, 426 bp, Homo Sapiens
ctaatatgtcctttacggtgtctagtgaattactccttcttatgcccttggaaagtggtgcattatctcttaatggaatcccacctttagcaactaagtctccattctagtatgatttctacttaattgaatatatacaaatgacatatgtccatataactaattctatctaaataaatgacaagatgtttacacatagaattgtttgaggttagttaaactttgcagattaatacttgggagaagggaagtacttgcttttttatcttaaacctttttgtgctatttgaatgttctaatcacataaaacatcaaagagatttatacaggtgaagagattatgagacattgtagctttcttatttttacttttctgtacttaaaaaagtgggctgggtgcagtagctcacacctgtaatctcagca

SEQ ID NO: 156816 - DNA, 542 bp, Homo Sapiens
  misc_feature (78)..(190): n is a, c, g, or t
acctcaaacggtatagaacgaagtctcgctctgtcgcccaggctggagttcagggtgtgatctggctcacgcaacctnnnnnnnnnnnnnnnnnnnnnnnnnnnnnnnnnnnnnnnnnnnnnnnnnnnnnnnnnnnnnnnnnnnnnnnnnnnnnnnnnnnnnnnnnnnnnnnnnnnnnnnnnnnnnnnnnaccgcattggccaggctagtctcgaactcctgacctcatgatccaccgcgcccggcctggacagtgtctttggtaataaagttcagttttttttaatgtaaagtgccacacccaatgacatattttgtacaaatacaaaaagtctgaggtatatgaagtggaaatgatgaacataaaggaaagggaatggaaaggtgtagaggcctttgctgtttgactgggcaggggaactagctctgtctttataatactgaattaaatgtcattggacttttggattaatttctcaaatttttgaattccagaatatagttactcttggcatatatatatagaagtgtgtgtgcgattt

SEQ ID NO: 156817 - DNA, 436 bp, Homo Sapiens
aaaaaacctttttattatttttaaaagtcctatatgaattgctagctagttaatgcatcaataatttgcttttggttagaattctgttatctcagtttgggaaaacaagctttcttgttctgattggaagctctgattagtggctgacatggtaggaattgttggatttgataattggatcaaattctggtaccatagctactgtgatcagccacagtattcatactggacagatgctatatgtgatcttctttggctatggatatgcagtggcagcagacattaggtgataataaacagaaaatacacaggaagggaatacctcacagtgttactaacagcaagcccttggctttccattgacagattcctaggaagaaaatactttgtacaactattgtgaccctgtatgcatacacactgacaccatagtata

SEQ ID NO: 156818 - DNA, 309 bp, Homo Sapiens
tcaaaaccgtatcagaactgaagcatattacactttagtttattcatttttttctttctctcttccagctctgtgtcatctccctgttcctttcttatcttcccacacaagatttctctcatctggtgatgcgaatgaaactacagtcttgtagttacctgggcttgaagctctagaatcatgttagacctatcttcttcgtcttttgtatttaatttcattttactttaagttcctggatgacatgtgtggacacgctggtttgctaccgaggtataatgtgcgccgtcgcctggttttagctgcact

SEQ ID NO: 156819 - DNA, 505 bp, Homo Sapiens
tctcctgcatatctcttttgacaagtactttgaagttaaccattttccaattacgttagaattattctgggtagactttccctttgaccatgcacattcttataattaatttcttgcaggatacaaaaattacatagaaaagcaacattttaaaaagacaaaaggggtctcccacgttctttctgtgccctcaccccagtctcatttcaagagagtagtcgctattacccacaatgtcatgccttttcaaatgccagtaattatatgcttaagaagattaaagctttatttgctcagatcttaagtccatgggacttctattagtaactaatcaaaatgatcattactgttagaaggtgggaaatggtaggacattgcttttgaaaactatatttggcaccattaataccaaggctagggatcgttgtgatgagtgctggtcatgctaaccatgttcccgcctcggctggtgacttatgtcctggcttggcttctacccggtttg

SEQ ID NO: 156820 - DNA, 181 bp, Homo Sapiens
aaaaagtgtaggttagcaaaagtgcctacagttcaatgcttccatgctaaacgttgtatttcttccggtctcatttgtgatgagagtcataagattttgagaaatacaaaaccttttccagctttataggatgataatggctgccacctcagtagctctacccgtttgaggaccgcccgac

SEQ ID NO: 156821 - DNA, 500 bp, Homo Sapiens
gaataatttcgtaaggaagatcttgtaagtagcacctaggtcaggattaacagctgcggagggccttccatatgcgctgttaaaatcataaactccgtcctgcccccaaataaagagtgatccagatttctatagtgtgtatttccttgtttctttaatagttttatagtgcattcctagacactatacattatagtttagtcctgtggtttttctgaccttttaaattaactttattaaggaataatttacatacaataaaatgttattctaagtgtacagtttgatgttgcattcagttcctttaaagttatggaagtattcaggctttctatttcttctcgagtcagttttggaaaaaatctgtgtctttcaagaaatttgtttcatgtaagttgtcagatttttttgacatcaggttgttaataattttgcattattatggttctgatgtgtctgttatgatgacccctctttcagttctgatacggttttgaggg

SEQ ID NO: 156822 - DNA, 155 bp, Homo Sapiens
ctcaaaccgggtcagaagctatcttcttgctcaacaaaatgcaaggcaagtcttcattaactgacggcctggtcatttacaacacacaccaaaaataaatgaggatgctatttaagataagaatacaataatgtttaaagagtattaagccacat

SEQ ID NO: 156823 - DNA, 253 bp, Homo Sapiens
ggaggctgcagtgagacagattaacaccctgtctcaattaaaaaaacaaagaaatgtgcttaatgaaaagcgtagccctcttcagggtgtgctctctgcatctccagagagtggaatgggaattagcttatggtttttgcctgcttcttcccttcgggcaagtaacacgccctttcaagccttggtgtttctttttttgggcacagcagttaatgtgtagaaaccccaggcctgggttctgatacggtttgga

SEQ ID NO: 156824 - DNA, 283 bp, Homo Sapiens
ctgcatcaattctaagacacacatttttcatattttaacatcagaaatggagatccattttacaattgatggcatgtcataatttcatcagcatcttattagatttgtcttagcaacttataaaataccatgtgtcttacaatcaatagcatcttatatatgctgaaatatggtcttacttatttcccattggttgtggtgaatatagtcacacagtgggcaagcccagccgacagtaaccaaggctgctccgcagacagagaaatggcaggaccacgataca

SEQ ID NO: 156825 - DNA, 377 bp, Homo Sapiens
gtctagaatgaaggcgcaaagacatgtctatttgtaactgaaaatatttccttttcttacctaagattgtaatcttagaagttttaaggtacggttttgtggcattacggcggaaaagaattgaaatgtgctctttttggttcccagcttcacaccccgggttcatttccttttttctagtttctgaatttctcttcggggtttagatcctagtctctttaacatagatgttgtcaagctaaataataagacatccttcttatttggagtcagtcattaaaaaaaactatgaaaaccaatggaaatgcttgccatcttttcaaacatgctttaaagtctgatttccaattaccttgctgctacttttactgagtatg

SEQ ID NO: 156826 - DNA, 332 bp, Homo Sapiens
ggactccctacgtatctaggctctaccatatagcctaggtgtatagtaggtgtcccatctaggttcggtaagtacactttatgatgtatgacaagcgaaatcatgtgacatcacatttctcagaacgtatccttgtcgctaagtgacatatgactcgtaatttgttgatatccagattcttagaagtctgcttcacaacctaagacaagctgtgggaaattccaagggtatctaaactgaaaaccatgagcatgagctcagggtaatgcatgccttcctccagccacagtgtctaccacccaaatgtttagatacgtaggagaggtccgacc

SEQ ID NO: 156827 - DNA, 367 bp, Homo Sapiens
cctactgtatcctaaggaaacctgagagtccaatgctgagcacatcaacaacctggctcagactagagttcaaatgcaatgagatcctgcttgcaggtgcaccacctccgtccccaactcccactgagtctatacagcacagctacctacttttttatctgacgctatttccagggtcacaaatgccatttaaaaatctctgaacactgagaggagccaccattcctccctttccaccaccccaatctaccaacactctgaagtcctaaaacgtcccaatccctcaacgtttacattccctgctctcctctatctgaagcccagcctggcttcccctcctgtctctagatacgtagggagaggccgg

SEQ ID NO: 156828 - DNA, 352 bp, Homo Sapiens
tctccctactgtgatcctacctcgaaataaagtacaaacctcaaattgtatgcaaggccctccacactccagctgcagccacactcacaacgtgccattctccaaatcatttttcttcatgacgtcgagcttactgcttctgcttagaacaactaaactgttaaggactatgtcttgccttaactattactgcttctccaagggctccctaaatgtttttcgaatgaataaacatgttctcctagtcactacctgagctttcagtcatcgtgctaattctcttactataaaatatttctgattataggctgggcgcagtggctcatgtagtgactaggatacagtagggaga

SEQ ID NO: 156829 - DNA, 244 bp, Homo Sapiens
cttatcattttcttaataacattttcttttttctagctcactctattgtaagaatacagtatataatacatagaagaaatatgtgttaactgactatttacattattaataaaacttctggtgaacgtgaggctattagtaggtaagtttcagggaagtcaaaagttatacacagattttcaactgcacgagggggttgccctccccctactcccatgtgtccaagtcactagataccgtagga

SEQ ID NO: 156830 - DNA, 277 bp, Homo Sapiens
cacaaacattgttctgagtttggcctcatgcccagaaacgtcaggatagttttgaaattcatggacttgtccccacatattgatgtagctcactttcttgaaggatattgcttgctttccattcaatctgttcctcacggagattgaaccatactgatagactaagtgtgtgatgattcagacatataccaaggtttgccttcatttgttcagttgagccaatatcctgtatgccgtaccatgtataggtactgatcctagcagctcggataccgta

SEQ ID NO: 156831 - DNA, 387 bp, Homo Sapiens
ggctcggtacctctcctacgtatctatgtctaggacaacaagagcatttagaaaatgtagggaagcatgtgaagcatggggtaacatgtgtccctgctacggaaatactcacagggattgttttcagtcagtagacttgtgttaatatttctctagtaagttaccttgttgaaaacaataaaagaaatactcatggtttggctggtagaggacagtcttttgaaagatgtaatttatacatagctttgactgttactctttacatttctattcatttattttttaagagacaaggtcttgctatgttgcccaggctgctcttgaactcctggcctcaagcaatcctcctgcttctgtctcctgagtagctaggatacagtagggaga

SEQ ID NO: 156832 - DNA, 564 bp, Homo Sapiens
ataagtggtgtgatatacgagtgtccgatggatcagaatattttacaaacctctcctgagtggttcagcgttgccaccagtcgctacttcactatacatcctcttaaatgagcattaactccccagcttcagacagtttttcaaagcacagatgtggcaaattttcattattaggcccaaaaactcagccgctttgctttatattgatttacttcaagcacctggaatgaaaaaacataggactcctgaaggttaacatcccaagtaaatgaagggaaagatagtagctataatgattagaccagaggagcactatactcaacccactaagagcataaatgagctatgacttcagtgaactctatattctctaactcccgaacctgcctactacattaaacatttacactggtttatgcaataattataatgagttttcctatcagagagtagattttcggttgaatataatgtttgcactttttatagcttgtattcctccgctcgagggtttggatgagggatacccagacttatattagtacatctcaccgttgaatctct

SEQ ID NO: 156833 - DNA, 747 bp, Homo Sapiens
gcttgaggtacagcttagttcgatagcgcctcttggggtcccaggaaggccaaacagctccacttctacataggtgcgcacgctgcgttctgacaggaactgcccagagatcaccgtaatggaaagggtggtggccaccaccacgtcgatgcggtccactgagaaggggttgaactgcttgtccggccggcgcatgaactcatgcttgaggaggtagccgctctgcccgttgaactcaaatactgccatgttctgctgcatgggcaagtccatcgtctggaagttgagggcaaccatctggcatccagcattccagaacatctggggcatgtagttggaggagtccatgcgggttcccttggggtaaatgcggctcatctggcgcttgttgtagtccaccaactgcaccgaggccttggagagcaggtcatatgccttgagctctgtgaaggacgagatgacataacttcggttcttttgggcagagaactccaaggagacgaacttggtgggctggatgtaattgactaggctggacatctcctcaagcatgagttcatgcgccggccggacaagcagttcaaccccttctcagtggaccgcatcgacgtggtggtggccaccaccctttccattacggtgatctctgggcagttcctgtcagaacgcagcgtgcgcacctatgtagaagtggagctgtatgccttcctgggcacacattatggaggggatcctcgagatcgccac

SEQ ID NO: 156834 - DNA, 439 bp, Homo Sapiens
  misc_feature (41)..(55): n is a, c, g, or t
gccgggtgtactcttggttgccaatgaaactctttttcccnnnnnnnnnnnnnnngagagataaaagacattcataagggtctgtaagtttcttccctggtcattttcataggactgttgtctacagtggatagagcctttcttcaaggatgatgggacctagtagtcccatttatctgtgagacacagttgagagcccaaggatttaggaagagaaaccactcttataccagtcgcatgggcatttccatcatagaaaattaggaatagtatgcattgttgctgtctcccaagccccttgaagtcttataaaagtcatactatgaagcttaagctcccagaaaaccacttgctcttactccctaggtgatgggcgctactcccttttggcccgccattacagtacaacctgccgtggtagatcctctagaacgcctcc

SEQ ID NO: 156835 - DNA, 195 bp, Homo Sapiens
cacggcaggtgtactgggaaaggatggataaaaagacacttaagaggttgcttaaaatttttttctgagtttaggttatcaggtctagactagaacattatttggcttctgtggttcagggtcaacaaaataacccaatattctataacaaaatagcctctatcttaatttcccttatccagtcgggtaccgagc

SEQ ID NO: 156836 - DNA, 312 bp, Homo Sapiens
tagctggcgcggcgtgactgacagtcctgccggcggattggcgtgggcgccgggttgctgcttcgaggccccaggagtgcttgggagaagggagtcattccgctgttgacagtctcctgggtataggctattcttgtctgtcaaaccctctccgcttgtgaactggagtcggcagagccggtccctggtggagaaggtgggccgggtgggccctgttggccaaatgccgcttctgctgcacttatggccacagctgagcctctgcattccgtctcgtcatccatgaatgaagacagtacaacctgccggtgg

SEQ ID NO: 156837 - DNA, 463 bp, Homo Sapiens
cttgtactgtctgccatattcgtaaattatcccactataaccaggaataacctaaaaaggcttctaggcattcttatgggcagagaattatttgtggtatatataaagaaaagagttaaaaaattctaaactctaaaattcaactccataactgagggatttatatactctatagactatatattataaaccaatacatgctgactttaaaaccttgaaatttttatccaaatatactataacataggagttgtaaactcagatacttaccaggaccaaggaaggttgcctgagtaagggaagtactaaggtgggcacagtagccaactggagaatacctgccttctataaaggggccacttctgcacagcagacccaagaatgatagaaactccggggacacccgagtttgattttttaggatcagcctgagtacaacccccgtgggggatcctctagccgc

SEQ ID NO: 156838 - DNA, 668 bp, Homo Sapiens
cttcccaccagcaaagacttggccccggtggagtttgggcctttactttggggtatggtgaaatagaccctgagtgactttgtcttggcggtgtttcaggtttcactttggtatctggtgaggaggacccagaatgactgtatcttggcaacaatctggattccacattggagcagggagatactgatctgcttcgccgtggagttgttctcgacgtcaccctactaggacttggagaagaggagccagaatggcttctttgtcttggtgatattattgccttcactttgggttgtggagatgatgacctagatgggctctgtctgggaggtgtgctagatttcactctaggaggagaggaccctgagcagctatgtctagaaggggtcctagatttcaactcagggtcaggtgatgattcaaaacagctccgtctctgtggcgttacagattgctcattggcctggggacttgttatggacccttgcctcggtggtgttccagatttcactttaggatgaggagatgaactggaatgactttgtcttgatggtgtcttagatttctgtttaggtggcggagaagaactggagcgactgcgtctgggtggcgttctagatttagctttagtttgggaggatccagagcgaatgcgcctgggtggtgtt

SEQ ID NO: 156839 - DNA, 381 bp, Homo Sapiens
ccaccggcaggttgtactgttgcttaaatttttcttttagttatacaaaacatcaaaaagctaattgaggggactctcaaagcttcaatatcccattcatttaactattattactattttgtgatctgcaatgggcaacttacttaataaaacatcagacttttaatctgaagttccagggtttaaatctctggctaaaaatctaagcatgaggcagagcttggtgtttgataaatactgtctataataattaacattttgtctcttgtcttcccagtattaaccaaaaccagatcaagtgagtggtgactggatgccatactgtgaacataggctgattctgggtgcaaccagtctgatacacctgccggtgggaccgcc

SEQ ID NO: 156840 - DNA, 710 bp, Homo Sapiens
ggagaattaggtcctgtctgtgtggtgaccccacccgctgcacaggtgtacagcattgagtggacacgcacccctctctccacccaggcagaggtgagaggctcaatggggaggccctgctcctggatagggagaccttgagagcaccacaccaggtgttgtgactctccagcaggttcttttgggagggggctcatgacagcaactgtggccctttcctaggggtccacagacatggcttctcatccaagcgcagcagccacctactctgcgtgaattattccataccactcatcataacacgccccagcattcccagttcttcatctgagtagcaaccagtgttcagactaccccagggacctcacctcaagctcaagggcaaggaccatccttcccaggaagacagatgtgcacagagggagctgtgatggctgtccagctggcctagctcttgagggtgaacctcaggggctgaatcgttccctgcaggcccaggagccacggtcaacactctacttgacatactcacagagctttgcatcaaccacgtacccatgcccgtacagtggggtaagacagccataagagcactctctctaccctttctgtgggaagagtggatgccacgcccagcactgtctatggggaaaggcacatcatcaaaaccccgacctgatgggcacagtggtaacaggtaccgagctcga

SEQ ID NO: 156841 - DNA, 191 bp, Homo Sapiens
gaacgggtgatgcggttgcctaggcctctaaagtgctgagattacatggcgtgagccacgtgttcccggcctagaagtaggttcttgatgtatccttcatgtctcgtcttccctctcgcaccctgcacccttctcgcccagtgcttactgcttgctgggtgctggtctcctgcttaaagagcagactgagg

SEQ ID NO: 156842 - DNA, 324 bp, Homo Sapiens
ccagctattacttggaatccaccagggcctccaaagctaaccatctacttccccagggatgtgatatcagcagatatttgggtagggaaagctaggaaaatctgagatgccaggatgatccctgtgctattaagagaaaaccctacagcatctgggatgccaggcccagggccccacagaggccttgctgtggttcagcacgggagctggccactatcccctgggggattcattctttaagaagaaaattccatctgttaaaagcagcgttagcctggaagaacgcagacaggcatggctacatgttagtctttgcttctgtta

SEQ ID NO: 156843 - DNA, 288 bp, Homo Sapiens
tgcatattcgaatcgagctcggtaccgaacgggtgttgaaggagagtgaggatggccctgagggaagcccagttggtttggttggggaggcgttggggctatggccctgagagaggtgtgggcggtgttgggaccaggccccttctgcaccctcccctggcaccgccgttaactctccaggcctggtgtggcccaagccaccctgcctacccgtgctaccctacccacacgtgccaccctgacctgcttgtgccatcctgcccgcccgtgccaaccgcatcacccgtt

SEQ ID NO: 156844 - DNA, 726 bp, Homo Sapiens
cgggttatgtgtgcccagaaccagctgtccttagtggctgcactgcacctttactgcactccttggttgcttgagcctccagaactacccctggtctgcaacctctccgcatctctcactttcccactgggtatctcatgctgacgggctggctgtggacaaccccagtgtgcctagtgttcttccctgccagggccctgatgccctgtcacaagtgactggcccagccatcattgcaactccaagccaagatgggctgttattgaatggaaggcaggcctggggcagaagcatcctagtctggtcttgatttccccagcaagggctcctggcactgctggcggagagacccaaggcccaaagcatcccgaccccatcaccccatgtccagccacagctcccttgactgtcacccagggtttgctcaactcccacagccaatgctggcctcagtgccattctgggtcctccgccaagcccagaccctccgcagggagcctgtgggctagagcaacaggcagagctgggactgagcaagtagacgcagttagggcctgggaactttttgcccagaggtccttccctgggctcgctctcatatcacccctcctctgcccacacaggactgcccatgggggcctcaagggcctgaaggctctcctgagccacgagctcatgctcttggggcagatgtgcactgtccagctcctggttaggatgctgtca

SEQ ID NO: 156845 - DNA, 495 bp, Homo Sapiens
tgatttctctcttcttgttacctgcctgcattttcccatccccaggcatagaagataatatattatgccccaactgtgctaagaggaataagaagatgatgaaaagattaatgaccatggagaagcagcagcaacctctttgaataccatgtactagagaaggagggatgtactttcagaccatgtaacctattatgaaggaaaggaagaggagaccatttgaatgaatcttcatgatatgcaacacaaaatcgtagtgactaggactccacagtgaagatggttgaccagtgacacagccccatctgaagagcacctttctgtaagtctgaaaactcattaaaataaagtcactgaaaagagaaaagtatattatccaggtatcccatctgagaaaaatactccagaaagaaccttaagcaaatgcaaaatgaactgaaataggtaactcaagatgggagatgaagagagaacccggtcgcggaaccttatgga

SEQ ID NO: 156846 - DNA, 570 bp, Homo Sapiens
acatttctgaacgcaattgctcttgagcatatgtgaagtttattaaccctggagctagggaattggcaaggggacagaagagtgggttggttccaagatggcttggaaattgttgatttgtatctaccggggggaaagaatgcttgcataagcagctaattaagaagaggcagctaataaggtcaagcttacagtttcatttcacatgatcgttaaaacgtcatttccctatcggctggaaccagcgaggtttgaggcacagtaatcttgggggtgatttctggagaggccaacctttcatccgaaataataagaaacacatccaaggtgcacttcatctgtggctcttaattagaccaagctacacggttttgtgccccacgctgagctggacgagagcccgtcagctccaaggcagcaagcacttgtcaagcacgaggtcacagcaaagcgccaggccagccagggtctgcactggcctctgggctgcctcaagcctccagtctctaagttatatgaatgtcccctctcccaaccctccataccgtgctgtatcgactctatagactc

SEQ ID NO: 156847 - DNA, 394 bp, Homo Sapiens
  misc_feature (223)..(315): n is a, c, g, or t
tcgagccggtacctatgtctcgatcgttatcgtcagcctctggtgagaagcagcagcatccttccagagagtcacttctgatccccaaggtagttagggtgtcgaagtaaaggagggagacacccccctgcctacctacctggactcagtgctagagggtgggggagtaggaataggaagacagcatatttcccatacatattagaaatactggtggctcatnnnnnnnnnnnnnnnnnnnnnnnnnnnnnnnnnnnnnnnnnnnnnnnnnnnnnnnnnnnnnnnnnnnnnnnnnnnnnnnnnnnnnnnnnnnnnattctgaaaaacaaacaaaacccaaaaatgccagggatggtggtgtgtgcctgtaaatttctagctactcgagaggcta

SEQ ID NO: 156848 - DNA, 847 bp, Homo Sapiens
  misc_feature (629)..(791): n is a, c, g, or t
cgagtcggtaccctatgtctcgatcgttacagtaatatttcgcagtaattatgctgttcaaatgtttctcaaaattatcattcttaagaatgtaatacagttgcatgtatctgaataaagacttcatgttcactaagccaactgttttttccacctgacaatttggagttattattgattctatttttttgtaaagatattagaaagactagtgtgaggttcagtaatgagccctttaggaataccaggtcctaaatatattaacaagttaatcagcagattctgatccacaattacaatacaaaagaattctacataccaacttggtattttgaagagacaaaaatgaatgtaaattaataatactgacaaatttgatgaaggattatttactgagaatttggaaaaacaattgctaattaaaaaagagaagacactgacaaatttgcccccaacacaattacacagagattgcaattcaaggtgcatcaaacaggtccaaatgggcctccctaacttcagtttgggacatttatatttataaatcctggcagactgagatatttactcttaatcatttcttcgattctatctttttttcagacagagtttcattctactgcccagannnnnnnnnnnnnnnnnnnnnnnnnnnnnnnnnnnnnnnnnnnnnnnnnnnnnnnnnnnnnnnnnnnnnnnnnnnnnnnnnnnnnnnnnnnnnnnnnnnnnnnnnnnnnnnnnnnnnnnnnnnnnnnnnnnnnnnnnnnnnnnnnnnnnnnnnnnnnnnnnnngtgcccaggatgctcttggagttcagaccgtgtaagtcgtgcccatattcggcttc

SEQ ID NO: 156849 - DNA, 687 bp, Homo Sapiens
agagcacatctgtctgtcttacctatctagcataccctgcccatcgcgggaactcagtaagtcctgttgttgggactcagtaagtcctgttgtttgaatgaaggcataagcgtccccttaaatttacttagagaatcttttcttagtttgaacttatttcatccccttctcagatttaaaatgtgaaaggtcagtgtacttttgtcatctgtctgccaagtaaagccaagaataccaaatatactcaaatggagaaaagtatgttcttatctcttttattttaaaggagatatttgaagtatcagtactcagcatcagtttgtgagaaaattactgtgaccagagattggaatttttggtgtattgtgacccttagaatctagaatacagtgtagtacaacttaggtgcagcccatgttacatgacatgtagctgttgaagatgattttgatgtatgtaaaattaagcatattaatctaagaatctctctccacattcgtaggatgtaatccctgttcattactacttaatacctccaccaacaaagactaagaatggcagcacagataaggaaaaagattcagaaagagagaaagatttaaaagaagagtttacctgaagcattacgagatcttaaatcagtggatgacaagctggattctagtgacattatacgatcgagactcg

SEQ ID NO: 156850 - DNA, 774 bp, Homo Sapiens
tccggtaccctatgtcgtcgagtcgttataatgtgactagaatccagctttgtcatccactgaattttaagatctcgtaatgcttcagtaaactcttcttttaaatctttctctttttctgaatctttttccttatcttggctgccattcttagtctttgttggtggaggtattaagtagtaatgaacagggattacatcctacgaatgtggagagagattcttagattaatatgcttaattttacatacatcaaaatcatcttcaacagctacatgtcatgtaacatgggctgcacctaagttgtactacactgtattctagattctaagggtcacaatacaccaaaaattccaatctctggtcacagtaattttctcacaaactgatgctgagtactgatacttcaaatatctcctttaaaataaaagagataagaacatacttttctccatttgagtatatttggtattcttggctttacttggcagacagatgacaaaagtacactgacctttcacattttaaatctgagaaggggatgaaataagttcaaactaagaaaagattctctaagtaaatttaaggggacgcttatgccttcattcaaccaacaggacttactgagtccaaccaacaggacttactgagtccccgcgatgtgccaggtaatgctagaataggtaaagaacagaccagatgctgacatctgataggaagaaaacagaacagaaaaggatagatgactgtcaggtaacgatcgagacatatggta

SEQ ID NO: 156851 - DNA, 259 bp, Homo Sapiens
agacccctgtctcaaattttgaaaaagcggttaacagaacagaattgtttggctcttttatagttttcttctcccaagtagttggtagaatttggatactttctggcccataacaaatgtcactttatataaaggagcctgtcgttaatgcattccacaagacatacctaccactgattttaggctaatttccgtctgagtcctggtagagaacacctgacacctgtacaattgagaggatttcaccatcgaggacata

SEQ ID NO: 156852 - DNA, 520 bp, Homo Sapiens
gagctcacaccactacactagagcctgggtgacacagcgagaagaaaattcctgacaaaatgcttaaaataaattatcagtggatgaaacttgttttaagaagctggtgctccccccaccatcccacctggtaccccagttgccagcccagaattgtgttacctttaccctgactatcgtctttctggatccgatctcagatctaatggttagataattattctcttctcctataaaatgtccctattagagtgaatcttaattggcccaccagagagcttttttccttgcatgtaagatctgtaatcaaatgttcactcatgctcatagctatgttgtcccacaaagttttctttaagacaccgagaactaatacttcaggtttgtaggcatggaaaggacaggacaccaagtagctcactatgcctcgattgtggatgatgccacttccctgcctctaccccttgatttcctggacctcatgtactctgggtctatggccatatcacgatcgagactg

SEQ ID NO: 156853 - DNA, 710 bp, Homo Sapiens
tgacatgatcgaatcgagctcggaccctatgtctcgagcgttaggagtgtagcatctaaaaacattggcaggttccaatgaaagatacgcaatttctagaagaccccaaatgctaaggtcaaggcacgcctggcactctaagtggacaaaggacaggaatcctcttctcaaatcacaggcaccctgactctggcttttgcaagcttgaaggagaaaccatcaggtgtcagaaacatctcactaaagcacgggtaagaagaggaatatgctattggcaacacaggaaccaaaggagagagagagggtgactccaaatagactcttctttctgggtctttcatggtccttcatcctttccgagaagacatcctttctcaacaagaaaagcttcactacttaccttgctggaccatttgcgagcttcatcatggagctgtctggcagccatcatcattggctggttaatcacctccccggccttctgctcagggaactcttcatccttttcctctggtggtggaggcctaggtggagggacctcaccttcaggcagaggtggtttgcgaggagcaagctcatctgttagtcggagttgttcaaggtctggtggaggcggcgggaaaggccgggatgagactcaatggacactttaagatcatgaagctgtaggtaggaaatggttgtgagctggagagcggtgagaggaccgt

SEQ ID NO: 156854 - DNA, 324 bp, Homo Sapiens
agataagttgccggaagagttaatggacctagatgtctgacagtttcccatcttgctaatagatccgtgttacataatttgatgatttacctttttcttgctagtcttttctagaccagaccgattaaaccgggcttcttagagcatgcccttttcttttttatccatagcttttcactactgcattgctaataagtttagttttagtctgcaaatattttgttaagcatcctctacgagggtgcatgtgccagaagatagaaatacacaaatcactcccagtcctgagggacacagacctgtaatacacatacactcacccct

SEQ ID NO: 156855 - DNA, 660 bp, Homo Sapiens
  misc_feature (390)..(565): n is a, c, g, or t
tactttgctggtgctttgagtgaaaggtcgctcctcatgcagtccttggaagagcatcacaagtaattcaccgcctgtggacccagtactctacatgatgggcccatgaacttagctttagggagcattggggaaaggaaaggtaacaggcgctgacagcctactaggtgctgggcaaattcttccatgctatcgtactcaacctttaaccctacaaggtaggtagaattattctcttattaataaacatgggaagatttcagaaatgttacgcagctccttagcattcaaatccaggaggatatgactgaagtctccttgttcttttcattccaaaagcagtgtgtaagcaaaaagtgtttaaagagaggccaggcatggtggctcatnnnnnnnnnnnnnnnnnnnnnnnnnnnnnnnnnnnnnnnnnnnnnnnnnnnnnnnnnnnnnnnnnnnnnnnnnnnnnnnnnnnnnnnnnnnnnnnnnnnnnnnnnnnnnnnnnnnnnnnnnnnnnnnnnnnnnnnnnnnnnnnnnnnnnnnnnnnnnnnnnnnnnnnnnnnnnnnngcttgaacccgggaggcaaggttgcagtcgcactcgagatggctccactgcaccccccgtgccgagcagacaaccgtcattccactataatgaac

SEQ ID NO: 156856 - DNA, 430 bp, Homo Sapiens
  misc_feature (66)..(105): n is a, c, g, or t
cccctcgttttttaaagatggaatttctctctctttctcaggctggactcagactcctagactgannnnnnnnnnnnnnnnnnnnnnnnnnnnnnnnnnnnnnnntatttataaactttccagttaattgtgactacagttatgcacagattaaacataggtttattctggttggtaatgatcataaagaatgatctgactggctatctttgggaatgattgtttatagactgtagtaaagatgaaaagtcccaactgatttttatctttttgtgctgttaaagtataaggatctagaatttttatttatggacattgatgtcagacacgcatactgtagctagttttaacactgaacatatagccttctttttacctctcatctcacgatcgaggacatagggtaccactcggttctatcatgtcatac

SEQ ID NO: 156857 - DNA, 130 bp, Homo Sapiens
ctatgttctcgatccatacctgaccgtcattctatccttttatttaatgctcttttgtgagataagtttcaccacataatgtgtgagcattttttcctgttaactttatattacacatccgttctaccat

SEQ ID NO: 156858 - DNA, 580 bp, Homo Sapiens
gttaccctatgtctcgatcgttacgtgattttttgcagaaaaggctcggtgggtgtcctgagtgccgtaggaagctgcacaccccttttcctgaaggcctgaaggtgagcagggatggggtcagagggagccctcacctcccctgaggtctgctgttcccatggggaatcccctgcccagcctccacagggtacccacagaagtccctttgtgaagagctattgatacacttggggctcgctaataaccatctaatccgggccccgtgtgatcttggacaagctaaccgacctctccagcctcaggacaatgggaatcaccagacttcccaggcctttggtgaggatgaaataaaataatgtcgaccacacattgggtatatagcaagtgctcaataaatggctgcttctatcgtggccacaagcaccatcacccaaccactgtccctactgacagcagcagtcaggtacatagttaggtgaacccaaaagaaaaactcttgaaaacaagagatttcttccatgcacatttacaatattgaggtatacttaacatgataaagtgtttccttctaacgatc

SEQ ID NO: 156859 - DNA, 448 bp, Homo Sapiens
gatgacagttttcaatgtagtgacacaaaagggcatgaaaaactaactgctagctttcctttcatttcaaaagtcccagaatttctagtatatttggattttagcttctgttccaagccaatccagatgcaactccagtaagtggcctttgctcttttttgtaccaaagagcccagatgattcctacagtccctttcttctctaacatgctgtggttccttaaatatgagtaatttctctaagatataacccaggtgctttgagaagctgcattaaggtgttcaggccctcagatatcacatggtacacttgattagtaataaaacccgagatcatttaaattgctgataggtcctgtctcagtgtgtggcattgactgttttcggaatagatacgattatatgatagcgtgtagtggtacgatcgagactaggccgagctcgatcga

SEQ ID NO: 156860 - DNA, 177 bp, Homo Sapiens
gtggataatgaggaagcattggtgacaggaagaggggtggtgtcacctgtggatgctgagggagtgtcggtgacaggtagaggggtggtgtgacctgtagatgctgacccagtcactggcgatcgtgaaaccgcggtcctgtcccctgcgtgacacgcccgcagctccgttctacga

SEQ ID NO: 156861 - DNA, 183 bp, Homo Sapiens
atgtatggatgagatggatggatgggtgaatagatggtagatgatgggttcacagtattggaagggggaggaccgaatgcctgtttaccagagacccagttacagagctatgttaagtaaatactgtatgtcattctagtaacgatcgagacatagggtaccggctcgattcgtatctgtctg

SEQ ID NO: 156862 - DNA, 414 bp, Homo Sapiens
ttcatcccacttttgtagtacacttttgtgtatctgttctttctagggactcaaaaaagcactttgattctcctgtgatttgataggcaatttgtaaaagctaatatttaattcatttaggagcaaaacctaattatgctttattgctgtataatttcctctagtgtgcaggtatgtgatgcagcttattaaagtaagaaagtaaactatgctgtctatcagaatgggagaatttgtgggttctatacacttggggtcctcaaactgtaaggtgtaaataaatcctaggtctcgttaaaatgcagattctgacccagtagatctggggagcggctgggagtcttatttgaagctgctttctgttggacctatgctgtacatctgcgcatcacccattgatgctagaatagacga

SEQ ID NO: 156863 - DNA, 250 bp, Homo Sapiens
gagtgagaggatccccggtcccatgcacagttgtttaaatggtaccaaagacccagtgagtcctagaacagtgtcctaaatcagacacgtcaccctctctaccccaatactggccccacttcctcaccggtctatcctccccagcagtccatttcatcttcccaggtgaggttccattctctttaggaagataatgcttcaactcctcctttgaattgcccctaacttggatcacagatggtcgtgaaag

SEQ ID NO: 156864 - DNA, 747 bp, Homo Sapiens
cgcgttatagaggatccccggtcccatgcacagttcccagcccctgttacaagagctttacaagggaagaacagaccgtgcctgccttgctggtgtgcttggatcctggcaccttgcacactccctggctctgaatctatgttaaacgtttgctgaatgaacacatgaacagcctgagccggccccctccctgagaccagcaaggcagcctctcttctggtggctgctggggaagaggactctgattgctaggcaagtgggagattcatccaggggccatggaggctcctgagcctgcaaggagggaggcagggtccttggcaggaatcagagcgaataggcgtggtgagactgggcccgcctggcagatgggctgactggagtcaaacaccccagcccaggccaccagccccacggtcactgctgctgccccccagaaaaagtctgcgttgatggaaagcatcctgatgggtcccaggagacctgggtccctgcctctgctctcccaggagacttttcatccctgaccctggcaatcagttgcacctgttagggttcacctgtctggaacttttgagagaggtagatttgcagagtggctaaggacatgagttctggaatcaggcaggctgggatcaagtcagagctcttccactcactagctatgtgactccgagcaacctgcctaactgccggagcccccagtttcctcaacatgtgcatggggccgggtaacagtcgatctaa

SEQ ID NO: 156865 - DNA, 502 bp, Homo Sapiens
gccaaaggaatgcagaaatccctcgtccctagtcgtgcccctggggaggaggcggccacagctgggcccctcccttctgaaaccagcctgcacccaggacagctcctccccagtaaggttcacaaacagattcacagccaagttgcaaaggggcagttccccaaaaccagagtggaaagaggtctggggctgatgccaggaaatggtcagaaggggaggagtgggacagggccagaggaggacttggactatttttaaaaactctctcccaaaaagaccacattcttcctctgatgagtcagaagcatgtggccggcaaaggggacaggatccgcgagcctccgcggctgccaccgtcaccaggcaggcacataccccagcctttcccacggggctggtgtgagaccctggcgtctattcagtttcccagggaaggagcaaggctgggcaccggtgtcccaggttggcaggcacagagagcaaccaggctccctttcaaagc

SEQ ID NO: 156866 - DNA, 600 bp, Homo Sapiens
gtatataatggaaaattccagaaatacacaattgataaattttaatgttgatcaccgttctgagtagcatcataaaatctcatactgtcacacttggtacctccttcatcagaagaagggtgcatacagtacaacatgatattttgggagaccacattcatataactattattacagtgtattgtgataattgttctattattagctattattaatctcttattgtgactaatctataaattaaaatttatcataggcatgtgtatatcggaaaaaacagtatagggttcagtattatccgcagtttcagtcacccatgggaggtcttggaacacagcccctgctgatcaagggggaccactgtacattttgctacaatctccagtgtttttgagaacacccttagccttggacttttctaggtgtgttgcaaatgaagtcagttcctttgggaagagattaggagttgtctgctttgtttcctgtcctggctggctcccctactcccagccccgcccttctgcctctcactcagggcatctctgagccaagttttggagctgggggtgggactatggcatcatttctgtctgatcacac

SEQ ID NO: 156867 - DNA, 958 bp, Homo Sapiens
gatcgagtctgtacccggtcccatgcacagttgaggaggctcaggaagatcataaattgggcaaagtcactaaaacaacatgtggcattcttgtgaatttcaacccacgcctatccaaccccataccccacgttcctccccctctgcttcccggggccacttcagcgggacttccagcctcacctcctcatggttctttttgaggcacatcagctcctccttcaggtactcaacctgggcctccagtgtcagccttgcacagagtgagatcatccaggatcctgcgcaggccattgatgtcggcctccaccagctgccgcatggccagctctgcctcgtacctgcacaaggacagggtcagcaaccaagggtgaaacagaatgcagaactcagggaaggccttaaactgccggcactttccaaccctccgtgaaactaatggaaagttgccccagagcctatgaggacaggtcctccccagctccagccccccgactgaactcacttggccctgaagtcatcggcagccagtttggcattatcaatgttcacaaccatcctggcattctctgccttggtacacagaatctgtaggccaaggcacatggagagggttagttcaggatgagacgaagcaagaagaacccaaatgaagagaagacagcagcaaaggtaggatccagcagccctgcagccatccctgcagaaggtcctcttccctggaactctgggagatatttagcgaattgctagtccttggagaacttgagatgtattttttaagaacctgaagcttcgtaaattcaaattccccattttggatgtgccaagcaatgtggaagggaagaatctcatgtctgaagtcactcatgtgacagttagaagggtctttgacatttactgaaaactgtgcatggaccgaactgtgcatggggccgggtcacgagctcgatttatc

SEQ ID NO: 156868 - DNA, 709 bp, Homo Sapiens
  misc_feature (563)..(640): n is a, c, g, or t
atctaccccgattatagaggacccccggtccccgatgcacagttaaaaagtcacgggtgcactgcttatggaagcagtgagtatacactacagtgggggcctcaggaggtttaattgcagaggattgtggagctgttggaagtccttaacctcaggtgtgaagagccaaatgtgattgagtgattggaaaggaaccacaagttggactagtctctgtcctgggcacagcgcccaggagatgggcttgcttgagcagctcccactgtccctttgaaaagtgaggtgacaagagagccaaccccagcctccagggacacattggagataagtggggtctccagggtgggcctttcacagagagtgccctgtggcgtcaaggggaacccatggttttggccaatcaaggccttaccatgggccacaagtaggagggacagataaaaagggtaaaactgtgggtcttgacctcaagcaactactaatgatgtcgactcacccctaaagcaattaagggctggctgtgggggtgctcatacctgtaaccccagtactttggaaggcgnnnnnnnnnnnnnnnnnnnnnnnnnnnnnnnnnnnnnnnnnnnnnnnnnnnnnnnnnnnnnnnnnnnnnnnnnnnnnntaaagggaaatgtgactttaaagaaatttggcctttgggagcccgtggattggcctggaccccggattc

SEQ ID NO: 156869 - DNA, 445 bp, Homo Sapiens
  misc_feature (75)..(123): n is a, c, g, or t
ttggtttgtagagactgggtcacaaccaattcgcccatgctcttcgtgaattcctgggctcaaagccaatacacnnnnnnnnnnnnnnnnnnnnnnnnnnnnnnnnnnnnnnnnnnnnnnnnnaatgtccagcccccaaaatatgttttaaagtcgcaccagcacctcagatagactggctgtggagcggccaagaagccatgttttcacagtaaaattctttgatgttagtgcggctctggacccttttctcttgaagcctgagcatttgctatcagttttctacaggatgtttgtatctttctagattctattcctgggctatctcattcaatactaggcattggatttcatctcatgagcaagctgaaaggctttcaggaactggggaactgtgtggggaactgtgaagcttagatttcttgtttcttcatcaagccatcca

SEQ ID NO: 156870 - DNA, 693 bp, Homo Sapiens
  misc_feature (57)..(57): n is a, c, g, or t
gtttttgaacccaagcagagcaccccttggactagatctcatcaactctgtgctgtnctacatgcctggccagagatagctgtattcaccctgggctaccaacctaagacaaacagctcagcttctcagcctcttaagcctctgctggctagttttgttctgttggttggatttgcaggacgctggctgactctgcccagtgcttccggcactcacagacctgcttcacaagcctggctttcctgccagtgtgactgcactgccatctcaagtcatctccaaatatgtgcatcttttctcgccatccacattgcaagatgctaaggaacagggcccatgctttgtttgtgtccagtttccccagggtacctagcttgttagtgggtacttataagtggtttaatgccagttagcctggctggggaacacgatagtctctgctgaagaggcagcctactaatagtagataaaaacctgcttttgattggtgtgagcaagcccttatctgtttttagaataaacgtgatttgctttggcaactgtaaagcagatggaaagcatcatctgtagaatctagaaactgatttctgggagagtcttaggggcttggccctattatgcattctatattggcctctttatatcaggcatctctgtgctgcataattcctaaggtgactcttggtcccatta

SEQ ID NO: 156871 - DNA, 549 bp, Homo Sapiens
caagttatgttaaatttttagtagagatagggggtctcacatatgtcacaggctgatttcaagactcgtggcctcaattgatcctcccaccttggctcccagagtgctgggattacatgtcatgagctgtcacaagcagcctgtaattatgttgtaactgattttctgtcagttaattacctttagcctggaataccacgctcaccattgattgctaagccacctggagccatgtctgcacacaaagggtgctcaataaacactccttaaatgaggaatgcaggagggagtgaggaccagggccctggcaggaagcagaggacaggacagtagctggctttggctctggccacccctttgggactagagttctgttgactggataacctccaggctcctccacgtggggccctgggcccgcctggggaaagttgagtctgtgtaattccttggagatctcttggaaggtcttgcctttggtctcaggaaggaacaggccagtgtagatgtgcccacagacacagacaccaaggaaagcgccatagagga

SEQ ID NO: 156872 - DNA, 204 bp, Homo Sapiens
cacagcattctttatccaaatcaagtcaggtggccagcccaggctcaagagatgggagaataggctccaccatttgctatgaggaactgcagagtcacatcacatatggcttggaatgcaggcatgggaagaattagagctatttttgcaaacaaccaaattgcaaggattgcatgaatacattcttccatgtcaaactgtgaa

SEQ ID NO: 156873 - DNA, 363 bp, Homo Sapiens
tgctgggattacaggcgtgagccatctcccctggccaaagtttgcctttttttcacagatgtttcgtaactattgagtccctactatgtgtaggacgccattctaggttctggggacacagcagtgaacaactgggacacaaaatttctgccttttgggcagcggagacagacaaatattgtgttgggcaggggtcactgctacttaaatgtgcagcaggggatgacaatggtagaagcgtttccagcctaagggagtgagggacggcttcttggaaggggagacctctaaggagagacctgaaagtggggagaggctaggcctgaggaagaagcagcacacaggcccgaggcaggaatgtgt

SEQ ID NO: 156874 - DNA, 267 bp, Homo Sapiens
ccctatcttgttcgtttctgctatcccctagcacagttcctcacacataggtaggtgctcaatgagtgcttattacactgagcagggactttgtgatgcaaatgactgtatccccaatacctagcacagagtggtacccagcaaatatttgacaaataaatgtgtatttgaataaagtggaaaaatgttaactgccattggaaatgtcagagccgggtatgccatacttatgattgctctcaagcagcattcagccgggacaccagt

SEQ ID NO: 156875 - DNA, 848 bp, Homo Sapiens
ctggtctgctccttccactgttcagttagtgctcctccccccatgtcatcatgtcacccaagacaaaacctgggagtcatatcccaaccccttgtatcaagccagtcactaagtcctgctgactcttctcctctccatccctatcaccccctcccccactttatcaaaacttttaattttgaaattcttatagattcataggaaattgcaaagatagtatagcgaggcccttcacccagcttcccccagtggttgcatcctatgtaattatagcacagtatcaaaaccaggaaattcacattggttcaatgtgtgtgtgtagttttataccattttatcacatttcctaccagctctttacttacccggactattataacagcctccagctttgtcccctccatcctattccttagaaaaaaatccatggctccatggtactatgtgcttgcctgtgttataggtcaccatgtgtgatctgtaatgtcacctgagctacttgaattgctcaacaaatagtttattcaacattatgggcgcaggcttgttctgggccctagggatgcagtggtaaataaaagagaagtccccaatgttatgtagcttatattctagtttgtaagatagctgatacatacatacacatatatatgtcaggtaataagacaggggaaaggattagaggatctccgggccctagtttcaatagtgcccgaagaagtcctcctggaaaagtcaccattcaattagagactgaaggaagtgaaggagggagttgtgctctgggtggaagtaccccccagggagaagtctgcacctgcagaggcctgaagctctgtgtgagcaat

SEQ ID NO: 156876 - DNA, 554 bp, Homo Sapiens
gaggcacggcacccatggagaatgcgggcctggctccaggtggcacagaggcactgtggaggccccggggaagcctggcgcgatctggctggtcctgcgctctgcttccaggttctggccctgtaacctgggggacagggccggccaaaacagggccactgggtgctagccagcacctgggccaggcgccaaggtggaagggctctggcggatcagcctcgcacccccaagagccccacagggggggcccatccagggccacacattttgcccccaggagcaggatatccctgaggctagagtccagctggaccggtggaagggtctcaccctttgccctttgactcctcttgtaggcaccctctccgcttctgacccttagtttcgtctgtgcacaactcactcaaaatgggcaactcgctaagcgtattttgttcctggttctgccgcaggtcctggccatgccatcggcaacctgctcgtcttgtccgtgaggccttcccagctgccgggctcacctgcagctcctgcacctgtatctgctccgcgagcac

SEQ ID NO: 156877 - DNA, 648 bp, Homo Sapiens
aaatcgagctcggtaccgtgctcgcggagcagatacctgtggtggatgtgatgggacaaaaatgtacttgcaaaaacaggagtgtgggggccttactaccccagtggctcggtccttttgcctgaagaaatgggaggggtctgtcctgtctgtgggcgaggcctggagccacaaagcccgaatcacttggacttgaatcacccctgcggagaagaaaagaaggcgtgagccttgccgacctggaggcggggttttgtcagagctggggcggtgcttaatagaggagggcggggttttaggggcccgaaccgaggttgctcggtttggggggcgctacactttgagggtgagggggcctggagcgactgagggtccggcgtttggccgggatcccggaaagcgggcgtccctgggggtgtgggttttggagggggttcctgaggaacttggatttcgagcttgctcgcaaggcgagacgttccgtggaggcggagtttacggaatgtatctcagtctgacgggcccagaaacgggtgttcagggcgcccattgggtccgcggtatgactgcagaaagagcctgggagatcgaggggtgcagagtggggccggaccaggggcgtttttagggatcccagtagttctcgtg

SEQ ID NO: 156878 - DNA, 664 bp, Homo Sapiens
gagcgtctgaaccggctcgcggggcagatactgtagaaatgtcagttgtagagtcagtgtagtggtctcaggggaatgtggctgtagagctgggaaaggtggtctgacctctgcctgtagttgatacagtggatgaaggtggttccatcattgtggatgtggtaaatgaggtggtggtagtgggtgatggggtggattcaactgttgtgtggagtgtactggtggtgcctcgaggtgaggagatactctctgtgtgagtggtcccagcactactttcagacatagaagaagagaatgaatgtgtcattggaaagcttgtcaggagggcccttgttggagtgttctcagtacttgtaaaagttggtcctccactgggagtggtagcagacgtcatgctaacagagattgagatttctgtattctggacagtgggagatgagggaatgacagttgttggccttgcagacatgctagagactgtgtacactgaggtgaggtctgtcatcataggtaatgaaccactgatgcccacggatgagggagtgatggttgttggttgtgaggtagggatacctgtactcacagtagatgagatcatggatgtagaagttcccttggtccccaccgtagtgggaactgaggtgatggcagttgtgtatcatcc

SEQ ID NO: 156879 - DNA, 624 bp, Homo Sapiens
atgcttaagatgtactctctatagcaaatttcaagtatacagaacaatatttttaagtataattctcacactgtacattagaacctcaaattgtattcatcttattactgaaggtttgcaccctttgcccaccatctctttatttcccacagctccagtccatggcaaccaccattctactctgtttctatgagatcacaatggcagtatttccttcattttatgactcaataatattctatggtacatacataacacattttttatccattgataaaatccaatccaatgttcatccatccaatgaacatgagagtgtagatatctctttaagatactgatttccgtgacttcagagctatactcagacttgggattgctggattatatagaagttttatttttagttttgtaaggaacctccatactgttttctatagtagctataccaatttacattcccaccaaaaatttgagacagttttcatttatccacatttttgccaacgcttggtatcttttgatattttttattagagacatcctaacagatgtgagattatctctcattgtggttttgatttgcatttccctgatggttagtgatgtttagtaccctttcct

SEQ ID NO: 156880 - DNA, 173 bp, Homo Sapiens
  misc_feature (1)..(1): n is a, c, g, or t
ntgagccaccatgcctggccaaaaaagcctattttacacaaaagtactgggacatgaagttaagggcagaacaccagtttatctcttttggaaaaagtgccaggcctcacctccctgtcttctgtctaggttttccgtgtgtatctgccccgcgagccggtcagacgctcgac

SEQ ID NO: 156881 - DNA, 489 bp, Homo Sapiens
tctgattttcgcagcctggctgacacatgctccctcccggtacacgcacctccattgcggcactaacccaccaccttctagaacacgaagcctcatgggctctggtggtggcacctacccatggggccagctctacctcatgtctttgagtcccaacatctgtcccctctgcttcgcatttgtggctcacagcactgcctcccaccctacccagactagcttccggagacttgggggacagccgggccacttctgcagggaccccaggttgtcaacggtgtcctgccagctggggaggactagaaggcagggcgccccgcagccgacgctgtctccatggctgccagcagagggcgctgcctgctgctctgtttcgggcctctccgctcccttcccagcccggcttcagacttattctcctggagggcatccgactggggtcccccacggagtgcagcggcttcccctcagaatgcgaggtgtctgggg

SEQ ID NO: 156882 - DNA, 400 bp, Homo Sapiens
taaggcccacaaggactgcccccaggtttctttcacaggccttgtgttattagagttctgggggcagttcttgagggcatgtgtcttttctgccaatatttaaaatagttgttggctttaggcttgttttacacttcaggtgatctacaaaggaaatgattaatttgaggggaaaagagatgcaatgaagagataaatatataaagatacggaggctcatctacactctggttcacagctcctggccagccctgtccataggagctatatggacccggcatgtggcttaatcctcgtaagcctgggtccctcagacaactgtgaagggggatattgctacctgcttgctaacatgctgagctgtgaagatatgaggtcatggataatgaagtacttgtgg

SEQ ID NO: 156883 - DNA, 287 bp, Homo Sapiens
gcatgaacacgtgccaggcacctgccacgccttcttgagtgggaaagtgttttcctattcttgagttttaagagttctttatatatttttgttaacagtcctttatcaaatgtgtcttttgcaaatattttttccttgtttgtgacttttcattctcttgacagtatcttttgcaaagcagtttattaattttaatgaagtctggcctatcaattatttctttcatggatcatgcttagaatgctgtatactaaaagtaatcaggctgggcgcggtggcttatgcca

SEQ ID NO: 156884 - DNA, 462 bp, Homo Sapiens
ccacaaggactcatgtatcaactgccttacaagactgaaatctggggttgtggagtggagtcttagtcacctcatgtgcctagcacatatcagtgactcagtaaatctgtttcactgaatcaatcaacgaatgggtgaataaatgccaggaatacgaaaatttaactaacttgccacactcaaatgcttcctggttagcacactggatgacaatgaacagaaggtacatgaatgctgacagtatacatccaacaggtgacagaggctcatcacactatgagacatccactggcttccggtttccagcaccaaagcagtgtggcaaagaatgcaaaccaatgttgctttctttggaaaacataaaaagaagcgagccattcatagtctttttttccatcttttgccaaccagaggagtgaaagtaaatctgtcactccatgctggagcagtccatgtggcgtg

SEQ ID NO: 156885 - DNA, 478 bp, Homo Sapiens
gccccgagttacccacaaggactggatgactgtgggctttagtgaacactcacactagtgactggacaactgtgggcttttagtgtgaacacccacactagtgactggacgactgtgggctgttagtgtgaacacccacactaggactggccgactgtgggctgttagcgtgaacacccacactaggtctggatgactgtgggctgttacaccgacactaggattggaagactgtgggctgatagtgtgaacaccagcactaagactggacaactgtgggctgttaatgtgaacaccagtactaggactggatgactgtgggctgttagcgtgatcaccagcaccaggactggatgactgtgggctgttagcatgatcaccggcactaggagtggagggctgtgggctgttagcatgatcaccggcactaggactggaggactgtgggctgttagcatgtaccgcagatagactggag

SEQ ID NO: 156886 - DNA, 532 bp, Homo Sapiens
ctttgtggaactcttttcagaagcaaaaaagagagaaagtggggaccatacttggcactagtaacgatgcatatgcacttctgaaacagaggtttcaatggaatgtggctcagactagatgtttactggatgggctctctcctccttccttccttagcccttctggtgggatcttgacatgttacagaggaaatgctaattgaagccccagccacaaccacttctgtgctctgcttctgcctgaaggaatgaataaatagaaaaacgggaacgttactttccagtaattttttaaatggatctcagtggcgaaaagtacgttaagttagccaacgtgcctcacatactgtggatgcctgtaagactcttacattcgtctgcctagatgtatttcagaagccaataaaagataatctgtgtttgttgaatgaatgaagaaacccagtctacccgtgggtttaccatgtgccaaatgcagagctacagaaggaaaaatgacaagtagacctacgagatctcacgatcctgtggc

SEQ ID NO: 156887 - DNA, 684 bp, Homo Sapiens
cattctgtccttggttaagcagcagctgttggcgggtgctctgtccaggcctccgctaccatgacgagccttggcaaagcctgccccactgccagtttgctttgccacgtctgtgtcaggaaagctcaatcaatctctcccgattacagatcagaaagggccaaataaactctcaacccaagccagattctgtccctgaagatgcagtaagggggtctcggtacccacagaacatcccaccacagaaagccaggctccagcctgaaagtccatcttccctgctctagcccacccgtgcgatgaagagcacagaagaggcgggtgaaggcattgcatcttcagcatcggcttggagaatgacaccctgcaggttccacttcttcccaggccacctgcctgcttctggaaagcagggaacaggcaatccggggagagaggagccagccacacaaggactgggaagcccagacctgtgccatcagcctgcgatgacttaggctggggatccgaaaaggtttctatgaacagccagctggtaagtaatttagactttgaggcccataccgtccttgatcaccgccattcaactctgttgttatagcacaaaagccacgtgggtttggccttaccagtgggcgtggctgtgttccaataaaactttatttgcactaggccaggcaccgt

SEQ ID NO: 156888 - DNA, 507 bp, Homo Sapiens
  misc_feature (297)..(434): n is a, c, g, or t
ccgggcgcggaaaatcgagttcggtttcgcgcggtcatccctggcagcctggtgctctttgagatgtttatctcacattctctccacccctgggcctttcagtgcccccagcccaactccgtgggagagtatgagtgactgacaggccctgctgcagctgcagcctcctcactgtgggtacagatgtgctcagcagcagctgtgacacggagcccacacctgttccctagatcagctgctgtaactgtactcctgggaaagcaggccaggtgctcaggccttgccaaagccaggtcnnnnnnnnnnnnnnnnnnnnnnnnnnnnnnnnnnnnnnnnnnnnnnnnnnnnnnnnnnnnnnnnnnnnnnnnnnnnnnnnnnnnnnnnnnnnnnnnnnnnnnnnnnnnnnnnnnnnnnnnnnnnnnnnnnnnnnnnnnaagtagagggcacagaatttcttggttttaaacagaaacagaaggacagtatagcgattcgagtgagaaacag

SEQ ID NO: 156889 - DNA, 795 bp, Homo Sapiens
  misc_feature (49)..(49): n is a, c, g, or t
cctccacttatgcgtgggctggcatcctgcacctgccgccccttccttnagccacctggcgcaggcaatgaggactgtgtgggtgccaagcaggctgctgtagtgcaggtgttgaagaagttggccacccgcaagctcacagggccaaaggttgtagagctgtgtcactgtgtggatgagacacaggagcctgagctggccagtctcaccgcacaaagcctcccctatcaactgcccttccacaatttcccactgacctgcaccgacctggccaccctgaccaacatcctagagcacagggaggcccccatccacctggattttgatggctgtcccctggagccccactgccctgaggctctggtaggctagtgggcagatagagaatctcagctttaagagcaggaagtgtggggatgcctttgcagaagccctctccaggagcttgccgacaatggggaggctgcagatgctggggtgagccaggccttggagctgagaagggtcttcagctggggatgcctggtactctcctccctctccttaaatcctacacaaggcagattcctggccccgcccttttccccacctcgtacctccccaccatctttgcttactctgtaggtaagcaggaagtaaaatcactgcccgaggcgtcagccacctggtgaaagcttagcctctctagtccacagctgacagacgtcagttttcgggacaaccagctcagtgaccaggtaggtgctagaacattgtggaggttctccctcacctaccacggctccaggaagccgc

SEQ ID NO: 156890 - DNA, 401 bp, Homo Sapiens
atacatcctgtgactcaacgcaatcctcccgtgctcagcgtcccagattgctgtgattacagtgttatcaaggatttgaatgtagacgtctccaaattccagacacagcccctcatttgcccagttagctactacaggccggcgataggcacagtgcggggaacctgcccagaagcccagtggcagatcagggaacgggggtgtaagcaggcaggaaaagccaaggcaaggggggggcgcgagaaaacctaggcagaagcatttcttgcacagctttggacgcaccacacacacaagagacaccactcggtcggccagtcacctggttctaggtggacgaataggaaagcgatgatagaaatatggctctctgagtgctctgcatctctgcaacagagagg

SEQ ID NO: 156891 - DNA, 537 bp, Homo Sapiens
aagatcggtctccactggttgccagaatggtctcaaactcctggactcaagcaatctccgctcagcctcccagattgctgggattacagtgttttaagatttgaatgtgacgtctccaaattccagacacagcccctcatttgcccagtttgctactacaggccggcgataggcacagtgcggggaacctgcccagaagcccaggggcagatcagggaacgggggtgtaagcaggcaggaaaagccaaggcaaggggggggcgcgagaaaacctaggcagaagcatttcttgcacagctttggacgcaccacacacacaagagacaccactcgggcggccagtcacctggttctaggtggagaataggaaagcgatgatagaaataggctctctgagtgctctgcatctctgcaacagagaggttaaagcaaaaccccaggccaggccacggagaaacccaacagaccgacttccccgaaccactcaaagcaaccagcctacccaggagtagaggcgggcatgccacatggccccgg

SEQ ID NO: 156892 - DNA, 197 bp, Homo Sapiens
actctacaggagcttatctcccaaagtgctgggattacaggtgtgagccaccacgcctggccccaagggtgtgtattgaagttaggtcaggattaaggggaatcaagaggctgaactacctcctaatgcaggcttgtccaacccacggcctgtagggtgcatgcagcccatggcaaccaatgtgggaggccgggtac

SEQ ID NO: 156893 - DNA, 486 bp, Homo Sapiens
gctcccacttggtgctgtgggcagcgctagataggtgagggtccagtagcgcaggaagttgtttctcaggctccgcttcatggagctgctgcccatcttcttggtgatctccaggtagccgctgttttccgtagtgtagggttcccagtgtgtgggcacagccgagtcgcccatgttggggtcccctgttttggcaaggttggtccagtaggcgatcatggccttagagactgtcctgtcttggggccggtagcccgtgggggtggcgaagggcttcccgaaaacgtactgaatgtcatctgcatggtcggcccccacccatttggggtagacgggcatccgagagggatgggaaaacaggtaaggcgtaggtcttggcactcttggcattggctctgtgctgggctagggcaatcttcgagtgggcaccaggaagaggacatcggtctcaaagtccaccagagtcttctacttatgctcctggga

SEQ ID NO: 156894 - DNA, 558 bp, Homo Sapiens
acaggatcctgactccactggtggctgggctacagcgtaagcagcaataaacatcagggggctttctggctcaactcccatcctgatgcatggggaccggttcaggaatgggtgtgactacagcacacggataggctgaaccacaggcaacctaaggcaggcactggctagcgtcttgcccttacctttaatattattatttgggggacaatggctcttatttatgatagagtcctattccttctatggagcagctgtgggccttttttctgcctgcactggtcaggtgactctgtctaaccccagggcatggagccatacctgtttactctggacaggtgggtatggagcctttccccctggagtgtctgattagaccccagtgctcaagctcgcagctactgtctagggacttatcatcaggcaatatcaagccttctgttgtgttccctggaacttcaggctcatcagaagtggttgcgttctggggaatctgacaatgtccctgttgtctatacatgatggttcaggtcacccagaagcaagatcctgtatgat

SEQ ID NO: 156895 - DNA, 514 bp, Homo Sapiens
ggttgtcatcacttttgttctgtccccatctgggctgaggccccgtgacttggggtggctccagctcccgttcctcggatgggatgagtggcccccacctgcagtcctgtgtctggggctgacatcaggtctgcatagccccattgctgaagtgacagaaagcagaagcactcctgagtgaggggggtctaactgggctctgctttaaagcactcccgggggaaaacaacagcaactactgagtaggtggaccgcgtggatgccgagaagctgagctcgtggcactgctctctccacttttgtgtttgttccatagagggtttggaacagtacgttgatatgggaatgagttctgcgatgtgctgagttgacaccggaagctgcgaaggtatacggtgggtgcgaaatgtgctcctgacaggcacggcacggtagcattggccgcaggttgcgtggccagcgctgactcagaatgcatccgcccagcgcttgtcccgcaccaagtggaggccag

SEQ ID NO: 156896 - DNA, 340 bp, Homo Sapiens
  misc_feature (108)..(116): n is a, c, g, or t
cctcccacgttggttgccccttttcaactcaaacccttagagctgggatcgccactgctcccccacttatttgaaatgggttggatggtaaattgtttttggatttgnnnnnnnnntgaaacacttgagatcctggagctatctgtttgcagacacagtgtggaggcagcagcccctgtgctggggtgttgcggtccccctgctgcacataggacctacataggattagggtcctcctgccagtcccaagtgagccacaaggcatggtcctgtttgttgtggaggtgaattttgtggagccaagctcctgcagctgctctctttgcctcccacggcagca

SEQ ID NO: 156897 - DNA, 340 bp, Homo Sapiens
ctacaggagcttatctccacttggttgcggctggtcgatcgttcccacctccacagtgggccgagctgccaaacaaggggtacacatgtgccccctgacataggccaggtggtctctgccctctgtagctcccatgagagagggctcctcggaccgaaacaggaggccactgcccttgcgcacacaccgtggccgggctcctcctgggctggagcgctttccgtgtgtgggaaagtcaagggcagccccgagcctcgaagcccaggctcccagccccgtgccatgttgcatacccgcctctactccttggtaggctgattgctttgaatggaccaaccca

SEQ ID NO: 156898 - DNA, 541 bp, Homo Sapiens
attagaggatctctggctccacttggtttgcagcgatcaggtagaggtggagagcacccaggcgacagcgtgaacatcaccagctccagtgccatcacgacaaccgtgtcctccacactgacgcgggctgtgaccaccgtgacgcagtccacaccggtcccgggcccctctgtgccgcccccagaggaactccaggtgtcgccaggtcctcgccagcagctgccgccacggcagcttctgcagtcggtttccacagccctgatgggggagtccgccgaggtcctgtcagcctcccagacccttgagctcccggccgccgtggatctgagcagcacaggggagccatcttcgggccaggagtctgcgggctctgcggtgctggccaattgtggtggtccagccaccccaacccacacagtccgaagtagaccagttatcacttccccaagagctaatggccgaggcccaagctggcaccaccaccctcatggtaccgggcctcacccccgaggagctggcagtgacggctgctgccaaagca

SEQ ID NO: 156899 - DNA, 493 bp, Homo Sapiens
  misc_feature (460)..(460): n is a, c, g, or t
ccagagcactgggtttacggcgtgagccaatgcgcccggcctccactggtttttgtatgagattctctgatcagtggtgcccatgcagggctgtgaaacgctggccgacagcgagacagcaggatgggctggcctggcagtatgcacttggtgaattcagtctcttgtctgacactgctgagacccaacaaactcctgggccttgccgcccctcctgcttccagccttaccttctgcagcgccgtggccttgtgacccgtgacaaggcggcacatgatgatgtgctccagcaggatcacttggaaggatgacaggatggggctgcagtccagcatcttgagcttctccagctgcatgagggccttgtccgtgtacttttgcgccttctccaggtagccggcctgcatggagtgcatcacagtcaccaggtagacaagcaccacacatgtgctccttggcnaccaagtgggagcccagatcctctagatcacca

SEQ ID NO: 156900 - DNA, 669 bp, Homo Sapiens
tggtctagaggatcccggctcccacttggttgcacaaccaacttgtgctacaagtgaacagactatgagtaaaggctcttcttccacttgcagctgttcatatcattgacaaacgagcatattagagcatgcatgctggctgatcattctgattaaggcaacaagcttcacaactcactcaatgaggtcgtccgtgagaacttcactgattttacgaggacaggagctacttctttgctgaaatgcatcacggtttcaactgctgaggttttccgcaaccttttgcattgtttggaatgtgagcagcacggccgagacaaactttggggttcccactgcattgttaaacctcccccttcacttcaaggccaggtgagcaagggaaaggagcgcggcctgggcgttcccgcagggccccgctaaggaccgctcccgccttgagcgcagccacaggccctctctggccacaaggatggggtcgccccgcagacactggtgaccagcggaagcatgaccaggaggcgattaccttctaatcacaaataactttatttttaggtaacaccacggaggacgccatgagagctaaggccgttgggtaaccgccctttccgctccgcgctgcgtcgtctcctgccccgaaccaccgcaaccaagtggagaaagatc

SEQ ID NO: 156901 - DNA, 423 bp, Homo Sapiens
gtggactcagtatcactttctgttgagtttataacagtgcttcttccccattctaccttcgacgtgggtaagtagattcctactcagggccccagaccttaaacagacctgctctaggcttgtttaagcccagtctcttcccatggaggagggagtcacacgggcgaagagaatatgtccactggagcctgttccctctctcctagaccattctgggtgctcgcaggacatccaaatttcttgcacagaagggtcaagtctacctaccgggcatacacagctttttcgcagggtcacttctccagactgggccatgaccctggggtggcccacgtggggtcatggaagtgtccaatgtaagatggagcttagatgtgtgcctatgctaatttttgcaacccagtgggagccaagccctctaat

SEQ ID NO: 156902 - DNA, 361 bp, Homo Sapiens
atagtgaagatgtccttgatgactgtgtatacaaatacacacacatacacactttttaataaaaggtaaattgcagaccttatggacagtgtgcagattctttattatatcacagtgttatttttcttgcctgcatttccccccaccttctatggctttgcctgtattaccacatatttattacagaatcctctgacaccagtgttctggctgatttcctgtcaaccctctgttgtctccctctgttccccacctaactctctctaagtgggcaggcttgtttttggttatgatttgcccccaaagttaataaagtacatttggatcatagttgcctttgatgtttctgcgcaaccagtgg

SEQ ID NO: 156903 - DNA, 581 bp, Homo Sapiens
gatctacggagctgatctcccacgtgtttgcccctggagtgctgctcctccttttgatctaactgggttcaccaccacatccatgctggagccagtagggaggggaagatgcacctttccttttaaggatatgacccagaagttgcactgccacatcactaccactgctatcgcattggccagagttagccatgacggtacctagctgcaagggatgctggtaaatgtagtctttactttgggtatccatgaacctagttaaaagttgaggttctattaccatgagagggaagagagaacagatactgggaagtcaccagccattgtttcacaaagggctgaggcatagccaaacacatttccagttggcaggtgaaggttcagcctgggacagggaagcgaacagacagaactaaagaaatagatttgtgagtaccaatctgctgaaaccataagcctaagcttttctctggggaaaaggactgtgttgatctgagtcaacagataggagtagtcatgcttgagacttatagcggcaatgagtacaagggacaatgggaaggcgctcacgagacagtggg

SEQ ID NO: 156904 - DNA, 528 bp, Homo Sapiens
actgtatgggcgcccttccggttttcctccctcttgcatttcccatttgatgtaatatggcccaaagaggtgggaaatgagaggaaaggaacctggggtctggtcctggttttggtaagactcacagatgaataaggcagataggaaactaggagggtggacatgcgggcgtcatagatgtacaggcaaaggggttcctccggacctgtgacctcctgtgaactcctgcatatgaattcctgtcctgggtctctggggggctgctgtgaggagcattgaggttctgtgtgcctgtaaggactgggtcctcatgctagggatgcacaggctctgtgtgcaagatgccagagacagacatgagacaatgggagggagaccaggtgcaggggcgttgtgagtggcccaggctctagttctggccctgcttctcacaagctctgtgatcttggataattcacttaataactcaggcctcagtttcctcatctatgatgaacagggctggacacaagaatacttgctgaggac

SEQ ID NO: 156905 - DNA, 418 bp, Homo Sapiens
ggcttttcctttttccagcatcagatcaaataatcagataagtgaagtttctagatgatgacttgctgcacagatgaggtttcccttaggttacaagaaatgtgaatagacacattttttcttatgcaagatagagattaaagaaaacttgaagatgacttaataccaatatatttttaggtcttgaatattggaaaccctacccttaatacacagaatattataagcttttaccactggattccatgggaaaagggagcaaaccacctaaaatatacatgatttttcagggaattaaacttagagaatgacaggaaattcaaaggaagatataactcttttacatcctgatatggtttggctgtgtccccaccccaatctcaattttgatttcctagtgttgtgcacccagtgggag

SEQ ID NO: 156906 - DNA, 345 bp, Homo Sapiens
gctcccacttggtggcggggggtctggatgaattggtctggggctgggcctaaagagcccagttgttccctgcaccagactggagctaagaggagcaggtgttgcatttagctggccccatctgccagggaggtgctgagtggggagtgacaatcactgctttccccacgaggggtccaagcacttgaagttaccttcatcttggggagaaatgtttctcagagaagattctagcctccctgatgattttttatagaattctggaagtttcagagaatagaacatttgggtctgaaatgtgcactcttttgtggcagccatgagctcttcaaggctgctgtggat

SEQ ID NO: 156907 - DNA, 492 bp, Homo Sapiens
atgagccaccatacccggcctaagtctaggttgttaatcctgttgggtgagataatagcaatcaccagaaaagaatctgctgaagagcctaagtcccaaagaatcttttctataggttataaatttaacctataattatagcgagggagacctccttgcgatctctgtttccttgagtgttctctattccattattctgaattatttgagagcaggactttgccttgcatatctccgtccccagcatccagcccatctagtacctggaatataggcactagatccaatgcatggattttccccccatcttatttacactcctttgttcatctttggagtatagattcatatctcacttggatttcagtcttagcatttgattcctaaactaacccatttgtctttgatgcttgtactcccttccctttttgccagtagttagaggaggagaaccagtctgtgtccaccatggagccgggatcctctagatca

SEQ ID NO: 156908 - DNA, 340 bp, Homo Sapiens
  misc_feature (119)..(295): n is a, c, g, or t
tctcctcccgacatccaagaatttgcatatttgcataagtggcttcatattgttttactttcaacatcttcatatatttcagatgtctctcttatagctggatttttattttatttcannnnnnnnnnnnnnnnnnnnnnnnnnnnnnnnnnnnnnnnnnnnnnnnnnnnnnnnnnnnnnnnnnnnnnnnnnnnnnnnnnnnnnnnnnnnnnnnnnnnnnnnnnnnnnnnnnnnnnnnnnnnnnnnnnnnnnnnnnnnnnnnnnnnnnnnnnnnnnnnnnnnnnnnnnnnnnnnntatatcctcacttgcccaggctgttacgactcctggcaccagtgg

SEQ ID NO: 156909 - DNA, 509 bp, Homo Sapiens
tagaggatctggctccacttggtgcttagtggatcgggctggctgtcacagtgtaagcttatcaagcctaaatacttagttggtcttgactttttcacctcgagcatgactcagtgtcatgtgctcctagtcattctgtctgtggtccaacgttagcctgggaagcacctgggactgagggaagaaccctcagctagttattcagcgatccaggttctcctcctgcctttgatatcacctcattatataaccttgggaaacactttggtgtgactggaatgtggatactcccaggggaagggtaggagcatggtagggcatttggactttatcatgaaggtggtaggaaatacttgaagggttttaagcagggatgacacatcatcaaatgtgtgttttgaaaacttttttctgcagaggacagggccacagcccaagcaggatcaaaccagttaggagattgatgtaacagtcccgtcagaaagtgatgaggtagctgggtgcggtgg

SEQ ID NO: 156910 - DNA, 577 bp, Homo Sapiens
gtcccggcctcgcacttgcttcatcccttcctggtccaataagaatatgagagtcaaatgcagcttctacttctcacaggcatttcaaattagtgccttgctgtgttatagtgagttctttgctctacccctctggactctcaccatttcatcccattccttattccccagacccactccaggctgataggaaaaaagatgaaaacagattcttctaaagcatggataaaaatgacatgaagagctgtaagtgagaaatgatggttggttgcttctgccatttggggtaagtgagaaaaggggaaggattgtgtctctatgattacatggaggccagatataagtgaatgccgattcctcagcccattgagagaacaggcatatggttgttttattattttaaactcaggtaactcaccaaacagtcactgatcccaaactttgaagtattcagaagtaatagaaaattaccaatgtatttcttcactcctagagacagggaggggaaagtgggaccagaaggaggcagctccacctcctgtagtatttactgcccctgcaggcaaccagtgggagc

SEQ ID NO: 156911 - DNA, 290 bp, Homo Sapiens
  misc_feature (125)..(234): n is a, c, g, or t
aagtttcctgaggccctcaccagaagcagatgctagcacacacttcttatagtctgtccaactgtgagccacataaattatttttcttttaaaattatgcacttggctgggcacggtggctcatnnnnnnnnnnnnnnnnnnnnnnnnnnnnnnnnnnnnnnnnnnnnnnnnnnnnnnnnnnnnnnnnnnnnnnnnnnnnnnnnnnnnnnnnnnnnnnnnnnnnnnnnnnnnnncggccggcgtgctggagggcacctgtatctcagctacttgggagtaaggatcgtct

SEQ ID NO: 156912 - DNA, 590 bp, Homo Sapiens
  misc_feature (151)..(245): n is a, c, g, or t
tagagccaccttatttcctctacttgcctggggaccgttctggtgtatgcctgttgtcctcgcattaacatggacatcacctgctttcattctcagatgtcctggtcagatgataaaccatgtcaccctgaaatgttctggtttggatagnnnnnnnnnnnnnnnnnnnnnnnnnnnnnnnnnnnnnnnnnnnnnnnnnnnnnnnnnnnnnnnnnnnnnnnnnnnnnnnnnnnnnnnnnnnnnnnattccaggtcatgttgtctgatcactaagttctggtgcttcacagtttaagccaagggagagataatataggaaaaccactctttatgtttttcagcttcagtattttagtaaaaatcactgccaagttagcatctgaagtaggttaatgtgactcagggcagtgggaatgtgcttaggtaaagactctattgaaacctctaagtgtgtgttctattagtaaacttggccaactactaccctagaatgataatagcattcacatgtgcatggtgctttatagtttacaaaacctcttctcccatattattgtgttgaagcttcttgtgctaccatagtgggagcc

SEQ ID NO: 156913 - DNA, 569 bp, Homo Sapiens
cgtgcctggccccatcatgtgttctggtatcctgttgcttcgcttcagggcacctgccacactctccattattctctgattctctagactgctactggatgagggcaggggaccagagctcatctggtccgtgctgggatccccagtattgttcagcaaatagggcacccagagccgagcatagcatgccatgacagcttgtttacacggtgaagagagacggcctaagggaggaggagtcctctcctgcttctcatccctccaagtctcagctcagatagctccctactccagatagccctccaggaccttccttgctgagtcaggagtcccctaccccttgcactccattgtctcagccctgatcactctggggccttactgtctgaagactgctctgtgttcccccactggactgtaagtctaggtcactgctgggtcctcagtagtagatgggcacagagcaggtgctctggggaatgagtgattcaggaccccagaaggtaggcactgtccttactccaactttatggaggagcatggggagttcccgcaaccagtgggagcag

SEQ ID NO: 156914 - DNA, 522 bp, Homo Sapiens
ggcttcctcaactcctgtcgcaaggtgatggaggtcaagtctctgctgctgtctctgtgcttgttccatgggtacgccctggggcgccgtaagtttgggccgctgggcttcgacatcccctatgagttcacggatggagatctgcgcatctgcatcagccagctcaagatgttcctggacgaatatgatgacatcccctacaaggtcctcaagtacacggcaggggagatcaattacgggggccgtgtcactgatgactgggaccggcgctgcatcatgaacatcttggaggacttctactaccctgacgtgctctcccctgagcacatgctacagctcctcgggcatctaccaccagatcccgcctacctacgacctccacggctacctctcctacatcaagagcctcccactccatgatatgcctgagatctttgcctgcatgactatgccaacatcacctttgcccaggacgagacgttcgcctcctggcaccatcatccagctcaccagtggagccag

SEQ ID NO: 156915 - DNA, 202 bp, Homo Sapiens
ctccactggtgccatcaatgcctcaatttctaactggatggttccctagaggtgcactgtccccaggtgtgagtggatctttctagacccttggctgtgccattattctacattcattatgtctgggaggttgctgtatgtttaacagataaatctatttgcatcttcttacatactaacatcagaattctaaggctggggc

SEQ ID NO: 156916 - DNA, 448 bp, Homo Sapiens
cctgccacttggttgcagtggcttggatgagcccttgatcctccttggagcccctacttccttgtctggagggcactagatatgagcctgtttctcccattagtcttgacgctccctggggcccagacagtgtcactatgactcaatccaccatttttaatgagcacctactatgtaccccatgctgctcagtacacagcagttaacagggagacaaggagaggacccctgtataaccaagctgggtctatatttattccaataatgatgtcaccagcagggtgatgagacagatcagtgatcagccaaatttctttttgttgagatagagtctcactctgtttccccagccagagtgcaagtggccatcctggctcatgccagcctaaacctcctggctcagcactcctcctggcaaccagtgggagccaggatcctctagatcacc

SEQ ID NO: 156917 - DNA, 375 bp, Homo Sapiens
ttgctgggacaccaccgttcactgtggtggcagtgggggtgacactcagacaagggccatcgagggcccctggaccagaaagcgaagagggcgttgggggcaggaggcctgtggggccatgtgtgggggccgtctgggtggcgggagctgttggggcggggctgagcgccctcagcagcccactggagaaagcgctgctggggtcctcgtgtggggcccagggcccgacgtggaagcaatggagggctgcagggggtggcagtggggatgaatgagtacggacagagtgcagcctgggtctcagacagggggtgggggacaggccacagagattccctatctcagcatcgagtagacaggctcaggctgccacgc

SEQ ID NO: 156918 - DNA, 472 bp, Homo Sapiens
cccacttggttgacaggctggtctcatgctcctgggctcagaaatctcctgctcagcctccaaagtgctgagatcacaggcatgagccactgcagccaggctcagtaaatttttatattaaatcgggcaccagaacaaattttggagtaaaatacaaaattcataccatttcctatataagataggagcctacagacatgttgatccctggacatactgtgttcttcatctaacattagaagtctggtgtcaaagtgtattaagtacaccaccctcaaggaagaaagatcgggatccttgcaaaaaatccctttgtaacagcttcagtgacactaggactaccttctctgcttacaggccatgggcaagattactggctgcacctaaggtaaggcctagttatccctcacctgggttttcacaactacctaactgcttcctcgacagcagtctttcccctccaaagcactgg

SEQ ID NO: 156919 - DNA, 284 bp, Homo Sapiens
tgccaagggatggatcttgactggactaggttcacatagcacccctaactcccttggccagctgcctattggcccaggctcctttgcagccctgtcctagctctgcccagggagacatcaggaaatgttgtctggagagcttagaaagatgcctcctgaattaaagatcaaagccttgtaaagagaaagcctttgattctttcttctcgtttgggagtcaggtgtgaggatgtgcaagctgagctatagcactcattctcaaccaagtggagtagcatcggtag

SEQ ID NO: 156920 - DNA, 502 bp, Homo Sapiens
ggctcccacttggtgccaccttccagaccagcctgcggcctcacatgaggacctgcgtgacaaccagcaacccctgctttactggggggcttactaggttcaatttcacgtaacagaaaaccttaaaataacagtagcttcaacaagactcacgtttatttctctctcatgaaaagaagtccaggtggacaccgccctgggctggtgtggtcctaccaatgaggaaactgaggttagagaggtgtaggttcttggtctcggttatcagctcaattgctcatcgtcggatttgcacatagttcctaatgatcccaggttgcagttgttggcatcaagtcaagctctgtgctatttggacattgtcatcccaagctcatgtggtctaactttttccctgtttctgactttgctgcagatacagccttttcctccctctccatgaactctggaaaaggggcgcatggcgaccgagccatgggcaagcaagtgggaggccgggtac

SEQ ID NO: 156921 - DNA, 190 bp, Homo Sapiens
caggtccattgttagccctaaattaccaatagatccggtgatgtcaaagacaaatcttccgtaggagatcactggccccatgggatgctctgcctgccccaagcccagattgtggctactgttgccacagtccccagtacagcacaggggctgaggtctgcaacgctgaatggtcattgcaaccagtgga

SEQ ID NO: 156922 - DNA, 545 bp, Homo Sapiens
aagtgactctagcaggagcttagtctcccactggttgcattcaaatgtgtatctttctcaaaagcaggaccctttcttgccaccttccactggaccacccacctccaggggccctgtctggtctgctctctttccccccacttctgtggtcctttcctgggccagatctccctccaagctgcacaacagccttccagggtgtgaaccctctgtggctccctattgccatcggcctaatgttcagggctgttccacaaactggacactgctggcttctcccacctcatctcttggggctccttcacacacaaggtatgccccaagctacaatatacctctcaggcacgacataaactttccaacctctgagctttcacttgcatagttcccttggcctagtatgtcgtgcacacacctccttgcatggccaactcctatttgttcttcaaagcccagctcaaatcttccctacttcaagaagtaccccctgatccccataggctgttattccttccttcctctaggtctcatctacctggactgcg

SEQ ID NO: 156923 - DNA, 142 bp, Homo Sapiens
tcaggtattgtggtgcatgcctgtagtcccacctgctcatgaggctggggcgggagaatggcttgaacctgggaaatggcttgaaagtttgtgtgagccgggatcacacccagtgcactctagcctggcaaccaagtggagc

SEQ ID NO: 156924 - DNA, 361 bp, Homo Sapiens
cctgcccacgtgtggttgcaaaaaaggttccttctggagaggagagcgcttttggaagaacttatgtgaaggatttggggtcttgaaatccagcagaaggacaaagaaatgagacatttttcacagtgtttactatagaggagaatcgcaagagacctaaatatcccacaagaggggaaggtctgtgagctcgttttggcattccccactaggggaagtgatgcagccgctcacactaacgtgaggaagaagataggaaacagagcagagggtttaggatggagcttgagggaccatcgttccactgtgtgtcgctcacagcagggaagcagtctacctgcaccaagtggagtaaggatcc

SEQ ID NO: 156925 - DNA, 370 bp, Homo Sapiens
tggtagtgggtagggtcactgacggtatagaggtaacagcctacatgggagcttaggaggtcaaatattcacaggctcagaagatcatgaggaggtcacagggtcaggaagccatgatggtcttaggagtcacaaagattgttcctctcagggccacagagatcatgaaggtcatggaatcatatcttcacagggctatggagctatagaggggatcacaggagtaagggactcagggtaatgggggtcacaaggggttcacagggccatggtggcctgccgtcctgggcagagacatcaccttaatagacagaaattccgggagtagagggagaaagatggtttcttcactacccacacctgcgggtac

SEQ ID NO: 156926 - DNA, 240 bp, Homo Sapiens
cactatgcatttagaattctacaactccaaacactgcaatagctcccattttcacacaaagtaagagccaaagtccttactagccataagagcccaccctagaggaaccagcttcctctgacttcccctactcccctcaatattcccagcttcctctactcccgtcaatattcattctgctccagccagctctggtctccctgcctctctccccacaaccacctgcgggatcctctagat

SEQ ID NO: 156927 - DNA, 559 bp, Homo Sapiens
tcagaagcccacccatcactacaagtcagcatccgaccccatccacacctttgacctgtacggcagcgaggtggtcactggcaccgtgtccaacaagattggcgtctgctccctgcttgagccaccctcgcaggccaccacgaagctcagctctgagaacttccgcggcacgctcaccagcctggccttgctgcccactaaacgccacctcctgctgggctcagacaacggggttatccgcctcctggcatagactgaggcaggagctggccgggcaagggtgggaagacatctgcgggcgcgtgtccactcaccctgttccctgagcagcagctccctccagggaggccctgggtcccacgccctgggtgcccacatggcctgccaactagggcctgccaaatggagtgggggagtcctggcccctgaatcaccagagccaccaagcctgccagaggggtctcattcatggcttggggacacagggctcctagcaagcaggaagttaagagcaggaggaagcgttgctaccttcacttctccccacaaccaactacac

SEQ ID NO: 156928 - DNA, 391 bp, Homo Sapiens
ggtggttgtgggtagggagcctgtgtgttagacatgagctgaggtccaggctaggcacagggagctgacagctgcatggacatgctaattggtctgggaaggcctttggaatctagggaattggctttctgagctgaggcggggtccaggcaaggaggcaacaggctgcaggaatcacaaagggaccggggacctccatgtacccaatatctaggtctcatcagtcagagaaacattctcagctcttggtgaccttgtcctccctcaacacggtactcactgcatatggactcatttgacaattgccacaaaggctttggcctcagaggcactttaaggatataacagtaggaaagggaggcttggggagccagagagtcacccacaaccg

SEQ ID NO: 156929 - DNA, 413 bp, Homo Sapiens
  misc_feature (97)..(106): n is a, c, g, or t
ttaattaattaacaattttaagaaagaaaaagggccattgcttatttttccatacaaaagtaaaataaatcataatggccaataagccaatgtaacnnnnnnnnnnaagggaaagcaaaacttgtaaaacctaaaatctcttagagttttggcatttacccaaatgttttcagtgattctgagaattggtggatataaaacacatttctcagcaaacactttcttcatttgcatcctactgtacttctgtactgatcttgctgaccaggaaccacctagccacaagacaccattctactctggactcacttattgcctttccccattcctataagatacctcaaccatgacatctcgacagctattcctgcaccactgacctgaagttcactcagtcacacccacaacataca

SEQ ID NO: 156930 - DNA, 262 bp, Homo Sapiens
ggaatgtaagtgttactaaatggtacatacagaaattgtgtgcagttttctgtttaagtgttataaaacttgtctcaactttgactgctagagataaggaagttcatttatatctatgacactaggtgcttgggaggatatatacaaggtattagcagtggtcatctctgaatggaaggaacaatgggtgttctctatgttctttttgctgaattgatagatgtggccactatctacttcctcttccctttccccttttcca

SEQ ID NO: 156931 - DNA, 164 bp, Homo Sapiens
agggctttgctgtccctgagactgaggcaggttccttttccaggtcagaggtggaggtagatctttctctcaaccacatctgcctccacacacagctcctccgcagggaaggagaagctgctctgtaactcattctggctatcgtcccccttttccagagcgtt

SEQ ID NO: 156932 - DNA, 465 bp, Homo Sapiens
catgtctgtagacccttcaaatgaagacagccgtagatccagggatcccgggaaagaaggaaggaaagggctggtggatagcgtcgttacctgcgtgcttcatcacctcttggtacaagttcacaacagcctccatcctggctaaggactctggggaggtacagagggcggatgtcagacagatcccactgcacacccccatcccacagagataagacacagaaccagacaagacacctgcaatgcctcattgcagaaaggacagaacagtgaaaggaaggaattacctgggaactagggggaggaggcagtttggttgaggcatctgctccccacacatcctgcttgcctgggaagagctgttccacccttcctctccacaccttactctcctctcctctccacagttttacttcctgcctcccttccccttttccagagcttgggatcctctagatcacctca

SEQ ID NO: 156933 - DNA, 235 bp, Homo Sapiens
  misc_feature (114)..(114): n is a, c, g, or t
  misc_feature (137)..(137): n is a, c, g, or t
  misc_feature (147)..(147): n is a, c, g, or t
  misc_feature (162)..(162): n is a, c, g, or t
  misc_feature (175)..(175): n is a, c, g, or t
  misc_feature (189)..(189): n is a, c, g, or t
  misc_feature (225)..(225): n is a, c, g, or t
ggcaggtccccatcgccaggtctgcccttgctaactgtgagacctctccgatcatgtcatgcacacatcatgaagccgcacattttcatgcctgctgcgaagtgcctactgtgncggggctgctagtgctacacacntgctcacacntccacccggggacancagtgcagccctngtattctccacacntgcattgaattgcgaacgaagggtgtaccgaggccntcgaattccg

SEQ ID NO: 156934 - DNA, 452 bp, Homo Sapiens
  misc_feature (108)..(143): n is a, c, g, or t
gttaaaccaggattaagtgctttctcagagacgtagtagtcaaagtatacacttggatgtcagacacagttgtttttccatttattagctaggtatcttcaggcaagnnnnnnnnnnnnnnnnnnnnnnnnnnnnnnnnnnnntgacttctcaagggtggttgtaagcactgaataaagtagctgttttgttgctaatacttttattattgctattttgaatattaatattctggttggaagaatccgtgtatttcagaaatgcaaaaataaaattggaatggactagaattcatgccctaggatttggcttctttttttgtcccagtcagcagataatcagaagcccaagaaatgaatagtgcaagaggaggcccagagtgagggccatccaggctgatttcatctcctctcttccctgcgcctgccgtgtgtgggtgtcacagcccccac

SEQ ID NO: 156935 - DNA, 252 bp, Homo Sapiens
gagttaacgaaaaagggaaaggaaaacctttatcacaggtatcagtcacttaaaaaattagaaccccttggtccccggaattcaatgacctcaatgtttctggacttcccctgtggccgcaaggctgtgcttgtacaggggttaagtgtccaattaggaaatgtgagcagggcagccatggccagcagggagcttcctcatgtggcattgcctgcgagactgttcctgggagacaggggggcacaatctctt

SEQ ID NO: 156936 - DNA, 605 bp, Homo Sapiens
agtaatatcgattgacaacctcaagctaaaaagaaacaaactcttcccaagtgatgtttaatgccaatttttcacattttatctgtcttacaactcattagaggaaaacaactgcaaaaatgtacctatgtggggaaatcagtatctaaaaagtacaagatgggattatgttatggaatccaagaataggaaagcgaatgtgaatccagacagcatggtttagacggggacccaaataaccttcaggcataacttctccaaacttcatcaactatttttagcttttttagtgggtctaaaatgcagttaaataccaaatttcagatggtgaaccaccttttcctgttaacttgagttctttgtctaaattcaacgaaaaaagaagccctaaaatcatttgcttcttgagggttatccttttattaatccacttgtatgcgttcaactcatagacagctccagaatcaaggacttcagcctggctcaagcttcaactttgcatttcctattgtctggtgattatctttccatcttggatcggcccgtctggcatctcaaaactctactaaccatactcctcctttcacatcatactccatgtccgt

SEQ ID NO: 156937 - DNA, 494 bp, Homo Sapiens
ggggagtacggaatcttggctgggaccctagcatcgtctagggaacagagaggttgtgattaagaggtatctggatgaaatcttggtgaaaggaagcacttgtttttaatcccaccatggtttttcatatgcatacaaccatcctcaaccatctgcccatcagcagagctcctagaaaggcaggacataccactggatatccccttctggcagttctaaaccagccttgcccggaagtgggagccttatctatgtggcccagactcaaataaggcctcttggaaatactctcacccttcccctttgtttaccctccaacccctgtgaatcttgtgaacagagggttgaagaaacatgttctgcacatgtgctagtacctgtgaatcttgatgtcccctggaccctctgtgtaagtacatcatggcagaattgctctagatccttcggagctgcagggtgagttaccagccactcaaggtggaggcaaacatgcc

SEQ ID NO: 156938 - DNA, 560 bp, Homo Sapiens
tagtgcagcttgccagccacgcttaaggtttgtgccgctcctttccaaaagcattcaaggtggatttcaatgtttaaaagttgcagtgtttgactcttaaggaataaaacctgagagattcatccagaaattcaaaatgagtaattacaatgacattgaatttggccacgaagttcctgagcagacaagacagcgatgggccacgcaggttttattttctgtcccagcagagcatgtggccacttgagccgttctctgtgtcatgctgtttagatagccctgaggacagcgctgttcactctccagtctcagggcccttctcaagggaggaggtgctgggtgtgggtatcacagtggcctgaggactgggggttgcttggcgtgattggtggcccgttagactaagttattgtgaacggcctgtcactgctcagctactgccaatctaattactttttctcttttcttcttgtattctcgtttttgtttgttctccacctggattctgtagtataagtctgtgtttaggtcctactcccaggattccgactccccacccc

SEQ ID NO: 156939 - DNA, 488 bp, Homo Sapiens
gaggaaatgcaaaaatattctgaagaaatgcagaagcggattgactggcatacaacaaggtttctgtccaccaagactgcttgagaagcactcactgcggaagacctaaggaccaggacaagaacagggccccccacgagccaacacagaaagggccccacagcttctcatatgcatcactttttctgtctgacaaacattaattatcaggtaaatgaaattaatatcaaattaatggcaccaagacaacatcgtacataagttaagtacatggcctctggaattagcctgatcttagttcttattctgttattagctgtgtttcatctggagatgtttttcttagcttcttgccttccctattctccatcaaccggctatgggcacgacagcgcatcatagtgtctgattagccgtctcaaagcccacatcctgcgctcggttgctcacacctgtatctatgcgctttgggaatctgggagtagaga

SEQ ID NO: 156940 - DNA, 453 bp, Homo Sapiens
gacctacctcagggcctttgtatgtgctatcctcaaagaaagagaagctgcctggaaggttctgcctcaccttttgacagctggctcattctcattctttggcctcgttctaaatgtcacctcgttcagatgtctgtccttgataatctgtctcgacagttaaattctccttgtatccactgtcctctctatgccactatattaattttttcaataccgcttaccacaactcctaaagttcttaggtatcttttgtctccccacttagaatataagcttcacaagggcatgaactttgaatatgccaagttcactgctatatcgtcattgccttggttcataataaatgttcggtaaatattatgaacatataattcatcaagactcagaagcagcaagggctatacagtagggtatctgattccaactcgttgttgaatctgggagcagaga

SEQ ID NO: 156941 - DNA, 575 bp, Homo Sapiens
atcctaacagctcactgagtactttcttatatgccttcctccatattcctgtgaaccaaatgagttgttttgtagggaaagagagaggaatgttcttttcttaccactggcaccaggaagccaaatggtgggccctgacccaaatgtacgataaggtcctgggatttatagatttcttttctggttcagtcagaactagtaagatattttaaacttgaagattaggctacataaatgtgagattgtagtaataatactttcatcacttagaaattggtacatgctttctctttttgttcatttacagtcatatatcttggccagggatgttgtggatatttgagaaaactgtttggaagcaaatatttgcatctttattcgtaaaagaaagtttatcagaaataggcaagatgaggtatatctgtagatttcatagtggcaagtactggggctgccttgttctcagctttaccttagcatgtagcacaatgccttagaactgaatagtaagtctaaaggcgggttctgatctatttaggaagtacatatgatacagtaatgttttgatctggagg

SEQ ID NO: 156942 - DNA, 520 bp, Homo Sapiens
ccctggctgcaggagctgacattgcggagttctctgttgggggaatggatttcagtctttttaaagaggtctttgagtcttccaaaatggatttcattttgtctcatgccgtgtactgcagggatgttctgaagctgaagaagggacagagggcagtgatcagcaatggaaggatcattgggccactggaggatagtgagctctttaatcaagacgatttccacctcctcgaaaatatcatcttaaaaacctcaggacagaaaataaaatctcatattcaacagcttcgggtagaagaagatgtggcaagcgacttggtaatgaaggtggatgctcttctgtcagcgcaaccaaaaggagatccaagaatcgagtaccagttttttgaagacagacacagtgcaatcaaactgaggccgaaggaaggggagacatactttgatgttgtggctgtcgttgaccctgtcaccagagaagcacagagacttgctcctttgctcttgttttggctcagctataa

SEQ ID NO: 156943 - DNA, 451 bp, Homo Sapiens
ggtagcagtctttcctagaatgtggatgccttggaaaacaggggctctgccttgtttccctagaacctagaatggcatctggcacacagcagatgctacatgtattgtaaatgaatgaatgaaagaagtgtccttgcagccactctggcagccgtaacatagtggttataaatctagactctggagtctcaagtgcatatgtcattggcctctcctccagcctcctcaaggggcactcaatgaaagaacctggaagtgccctgatatgactgtggttggactgacatgactgccagatggtgggacttggtctggagcagagactacttggaatggtagaggcaaactcaacagccctggagctgcgcttgtggtggagctggaccctgattttagctggaccttgtttttagagacacggtttccttctgcagttctctctcctgcacag

SEQ ID NO: 156944 - DNA, 556 bp, Homo Sapiens
ccgcccggggagccgagatgaagcgggagggctctgcgggcgggtgcttcaccatgacctccagctgcacatgcatgaagctctcggcctcatcctggagggtgctgtgggcgcgcaatggcactggcaagaatccgtactcctccttgttgcacacatacatctgaacctctgcctgcttgcaggagaaggcaaggacgatgatgtcgtcaaaggaccaggtgtagtcagggtgaggtgggtagaagaccaggttcctggacgccgccttccgcaggtcgatcaggaaggtcgagtgcaccatgggaactgcaaagcagccccggcggtctcgcttgcggatagggatgtaggcaggtgtgcgcttgtagtagccctgggaagtcattccacaccagaagttggagtacgcagcccgggaatccagcatgggggcgaccaccgtcttgttctcagcgatgagcaggctcagtgtgtcagggttgaggatcaggttgtccgcatctacaaacaggatgtaatcagcccacatgtctcgagctgatttcaggcctgc

SEQ ID NO: 156945 - DNA, 617 bp, Homo Sapiens
agttttataaacgcagagtgaaccccaggtctagcgccagtgtgcccattctgtcctgagatcatttatttctagtcaccgaagcgttcccgcctcgttcctttattcactcactcattcagcaaccctgaacaccgccagtgcactgagccccaagctggatgcgggaactcagcggtgaaacatgattcccttgccttgcggcagccccgtgctcacagagaggacttgagtttcgggtgccagttgtctctgccaagttaggagtcagggactgacctctgtgacccccacaagctgcagccctggctgtgttttccacactggcctggggcccatgttcattggctgaggaacctcttggacctcatctctgaggagcaccgcctggggccctgggtgtgtgtcccgcagcatggcgcggggtgtgcacgtgcgtgtgtgcgctcacacgagcaccggctgccgcctccccgcctgtctccaggtgccatgtgtggaggggagaggctgggcgtcgctgcctgcagcactggctctgagccgttggccaagcctctccattttccttccccatcactctgtagaccctcctcactctttctgaacctgcctgg

SEQ ID NO: 156946 - DNA, 584 bp, Homo Sapiens
agtgagagagaaggaaggaaggaaaaatgtaggtctgcttaacgcagcatttcccaaacttgctggagtcagttaagagtctttttcagcacaacattcacgagcttctctcactgggaaatgccatttgactaacactatctctcccttttatagagagggaaacaaagacttcctaatgagtcctcggcagaagcaagttagaaacctccatttccctagaactctagtcttcatgctctgccttgctggggcaggggggaaggctgcggtgggagttgcgggcaggccgtcacctggggcatggcaggcaggaagtagctggagggctgctgaaaggagcccaggagggggttgctcagggtccgcatggtggagaggcgctgcatgtactggttggtcaagatggccttccgctcctctttgcgctgggccagtgccacgtagagtggcttggtgcccacgatgcgcccgttcatctctgtcacggcctttgtcgcctcttcttcgcactggtaattactccatagggagagaactctttcctcagtttgtcgtcatcaatggagtcgtccagattcttc

SEQ ID NO: 156947 - DNA, 308 bp, Homo Sapiens
catcctatgtacggcccgattgcctgcccaggaaaagtcaatatgcagaggcaaggggtagcttccggctttctggaggaggcacgtggtgggccagcttcatgacagcagcgtgggcaggcgggcaggatttacagtctacctggctcccacagccagcaagctccacatgcaggtttcagaaacggacccagatggaggcatgacccaggaacactccttggcaatccaggatagactgtattctgcatcatctgttcctgcctcatgatctgacatgggatcctgtatgagatcaccagcaaggc

SEQ ID NO: 156948 - DNA, 294 bp, Homo Sapiens
cctggagctgcacccacaccctcaggtgagtctctgacagcctggaacagcaccctgcacacccaggtgagcatctgactgcctggagcagcgcccacacccccagttgagcatctgatggtctggagcagcgcccacacaccagaggtgagcatctgagagtctggagcagcgcccacacccccaggtgagcatctgacagcgtggagcagcgcccacacccccaggtgggcatctgacagcctggagcaggcgcccacaatcccaggttagcatctgccagctgctcagccc

SEQ ID NO: 156949 - DNA, 745 bp, Homo Sapiens
cactgacgacactgagccctttgactaacaccaccaccagccaggcacaacccgctgtcaaccgaagtgtgagtggacatgagtggtttgactgtggacttcccaacctcaggggttgcaggcggggacatggaaacttttgaaaacatcagggctgctgggggcaagatgtgctgggcaccaaagagcatagagtgccgggcggagaactaccccgaggtaagcttcgaccagttcgttcagtgtgctgacctgcagcctggaggcgggtctgacctgcaagaacgtagaccagacaggcaggttcaacatgtgcttcaactacaacgtgcgtgtgctttgctgtgacgactacagccactgccccagtaccccagccaccagctctacggccacgccctcctccactccggggacgacctggatcctcacagagccgaccacagcagccactacgactgcgtccactggatccacggccatcccgtcctccaccctgggaacagctccccctcccaaagtgctgaccagcacggccaccacacccacagtcaccagctccaaagccactccctcctccagtccaggactgcaaccgcccttcccgcaaagagttgcacagtcaccacacctctacagctacacagcgttacaccaatcccctctgcctgccgtgggcactacacgtggaaccgcctactacacagaccaccacactccacggatataggatggggcgagtcct

SEQ ID NO: 156950 - DNA, 335 bp, Homo Sapiens
tatcagctcggtcccccacttatgccgtgggcaccacctggacccgcctatcacagaccaccacacccacggccaccatgtccacagccacaccctcctccactccagagactgtccacacctccacagtgcttaccgccacggccaccacaaccggggccaccggctctgtggccaccccctcctccaccccaggaacagctcacactaccaaagtgccgactaccacaaccacgggcttcacagccaccccctcctccagcccagggacggcactcacgcctccagtgtggatcagcacaaccaccacacccacaaccagaggctcaaggtgg

SEQ ID NO: 156951 - DNA, 551 bp, Homo Sapiens
cgtgatgagcatgttgtatttattggcacttctcacagccgggggagctgatgttggatgcccagagcacatactggggttgccccgatgtagccaggtacagagcagtcatggcccagtaggcaatgcagatgaggaggaggacaaaggtgaccagtgggtagaacatggtagacatcatctgtcccacagccttgctggcctccttcaggagggcgatggcaatacgaatccgcttccgtcaggaagatgagcatcagcagcaggatggcttcaagcaccgctcaacacgatcagggcggccagccaggtctcctgcacgctctggtaggcactgaggttggtggtgaaacccagctgggagatggaggcgcccttgtcccgcagcactcggtactcctcccagcagtagtagatgccatatgccagcacgcaccagcactcccaggatcagcaccagcaccacggggcccagccaccatggcgcagaagcaagataacagtagctcaagaccagagcacccccacgcataagtggggtaccgagctca

SEQ ID NO: 156952 - DNA, 421 bp, Homo Sapiens
gggtgaagcagaagggagggaagaagagaatgttcattttacctaagttgattttgaggaagggcattggagacccagcagtcaatgacagtatacaatactgacatcgcagatgggggcttgagatggatgtgggaagcattagcatataggtggatgttgacatcaggaaggatatgagatcttccctctccacaaggggcagtaggtggatgatgaaatctggagaatactattagaattttcttttttggagtctttgtctgttggtattactattacaaacagagcaatccgtaagtatgagtgtgtgtatatgtgtgtgcgtacttttagaagaactctactgcaacatgtttttcgtaacctccatttctgttcccctaacgacaagccccggcataagtggggtaccgagctc

SEQ ID NO: 156953 - DNA, 721 bp, Homo Sapiens
tgaagtgcagagactgactcgtccggaaaaaaagagagctcaaggtttcaatctctcactaagcagttgccaaccttttcaatcacttcttggatacattgccaccattaatccaggaaccctagaaacatcttacaaacatcaattaagtctgccaacatgcgctatttacaaatagagaaacttgggtgtttagggacagagaagccctacaattgagtcagggctgctgtgggcactggacccaggactctgggatttccatctctggcagggagatgtgatctacctctcaaggggataaaatgtccacataatgaaacaggtggcagagaaggaacgtgaatacacacatgttgggatggcgcaagacaacggatggccaacagcatcccatttgaagctgaagggaagccaacccaccagccccagtgtcatttaatcagactgtgaagatcagcattgctgcatcccctccttagcaaaaacactgctcaccttatggcttgtaaattgatgctgtgagataccccatccatcctcacatcaaggctagttttatctgatgtgagttcagaaatgcctattcatctctggccaggtaagtttgcatcatcaaatattccatttgcaagcctacatgctgaaatggaacccaccccacagtaaagggagcctccagaggacaaaccctctggcttttcctgtctcccacagaagg

SEQ ID NO: 156954 - DNA, 209 bp, Homo Sapiens
  misc_feature (43)..(51): n is a, c, g, or t
gttactgacatggaaaagttaccaaaatatactgttaagtggnnnnnnnnngcaagttgcagaataaataaataaggccctgttatctaaacatagagactagaaatacatacaaactgctcacagtaattatccttgaaaaggacaatggaactgaggacacattgatctattttgtattgtttgcatcttccccacggcatagatgg

SEQ ID NO: 156955 - DNA, 457 bp, Homo Sapiens
acatgatgaaaggtcgttacccaacgggctcacagtcattgccgcttccgtcatgctgaatgccaaaactgtgcccgagctcgtgggctacatgtgaagtgccagcggcaggcccgtgtcctcgttgatgctgcagctgcggtgcggctggcacatgcccgccacatgggacagtcccagggtctcacagtgccggttcatggctgcacacaggtcctttctggtgagcaggatggcagtgtcatggtgcaggtgatgggcatcccccttcatgttgatgcttttctgccacttgcagaagctcttcagggtgttgtctgcatggtgcatgatctttaggtcctcctcctcatcttccagcatgaccaggcgcacaatggtgatgtggatggggttcccaatgctgggtgtcatgaaacaggccagccaccatgttcatgattgtcagccccacggc

SEQ ID NO: 156956 - DNA, 311 bp, Homo Sapiens
cccccctggggattggacaaagtggcattcacaggctccactgagattggccgcgtaatccaggttgctgctgggagcagcaacctcaagagagtgaccttggagctgggggggaagagccccaacatcatcatgtcagatgccgatatggattgggccgtggaacaggcccacttcgccctgttcttcaaccagggccagtgctgctgtgccggctcccggaccttcgtgcaggaggacatctatgatgagtttgtggagcggagcgttgcccgggccaagtctcgggtggtcgggaacccctttgatag

SEQ ID NO: 156957 - DNA, 513 bp, Homo Sapiens
ttgctgggcggaggggagcacttgcgtttctgtgttggaaaaacccggcccgtgtgtggacttgaaagtcggagcgggtctcaggccagctgcagccgtgcggtcgtgactgtggccccctgggggaggtcaccagcgccctggacgcagagggccggcggcggacagacagaggccgcccacgcagggtcacggagaggccccacaggacgccatccaggctcacgccctttgatccgcttgacgcttaagccacataaacgtgagtcactaaccaccaatttccaggaggaacacagggagagaccttctatcttctctccagcctggtctaattacagatggggtctctgtccacagcacagtcaagagggcgtttcgtgccaggaacttggaactttgaatatcgacttactggatagaccacaataacccagtgtagtatgggaacaaagagcagacgcgcaatgaaagcagaccaatccccaggggaccggtaccgagctcgatcga

SEQ ID NO: 156958 - DNA, 429 bp, Homo Sapiens
ggccccctggggatgcagcactttttaacccgtagataagctggcagcttgacaggctgaagagtcctctgccatttacacctgaaaatggctgccccagctactctagataaaataaatatgacatatataccccaaatagtcaatggccacctcggaggcctatgaaaggaactgaaatacaacaacacttggtagcagcctttgtgttttgctcttgttgagttgacctgttactaaagaagaaatggaaaccaaagggtcatcttgaagcatagtcttttggccatgaactccccgcttgggctgggaagagactgcatcacttggaactcagctggggcacttcccagttccgtcctgccaagaggcatcccagctttcttcccctctgtcctcccaatccccaggggccggtaccgagctcga

SEQ ID NO: 156959 - DNA, 544 bp, Homo Sapiens
agagtataagtacagtaactattaacatttattcagcttattaacatacatactttatgtaaatattaattcacttgttcttgcagtaatttggtgacttctcaggcatctgaaacacacagattgaaaaacactgctggattcagtaggaactgggacaaagggtatcttcagaaagaataatggagacctgtgttgttgctgaaggagatggagcttgggacttggaagactggcagagctgcttctccttaggagctctggctgctactggagcagccccaggaaggctctgtcactaggaacaagagctaccactaactgagttagtccctgggagctggacactgctgctgacaagtactgccaagatggtccgtggtggtctgcctctgggaccctgctgactacacacaacaatggaggcttacaaaagaggaactaagaaaatccaaagatttggaagtgtctgaccctttcttccctttatggcttctcacttgcacagaagatttcagcccaactctccatcaattccacagga

SEQ ID NO: 156960 - DNA, 441 bp, Homo Sapiens
ggccccctgtggaattgtcagaggaagtgtggcaatgccccacagcccgacgaaggggacagggaggaaggagggtcctgtctctccagctcctggctgtgtggtgcagttgggtaggcgagctggccagcatggctgagccggcccttagaagcacgccttcatgtcctgggaaaacaccgattgatgaaacccaatccttcccgtgctcttctgaacatgcacaaacacgcacgccgccagcctcctgggagtgcgcagcgcccctggagccaagctttagaaggcaacgccaccttcacaatcaacttggccgcccaccacctgagtcaggagttaccaattctggggcagtcactgtcaagtgcaggaccaggaggcggcaggtgcaggggcctaacgtgtgagcccccaattccacagggcccaattccaaagggg

SEQ ID NO: 156961 - DNA, 338 bp, Homo Sapiens
gggccccctggggaattgggtctgctactgatggatatgactgtctgagaggcttgcatatgcatgggcaatgaactccaggttggagggcactgtactgagatttagcaggagctgactccaaatcaatgacatctcccacactgatccctttccaattttagcttgctgccagttgaaccagtgggcccacctagaattacctggagcttccatctttctccgggtgtcatgacgccccttctagccatgccagccctgggccctccatggtgtctttgtccctgcaactctctcatccaggggaccacaggcaagaagctcccttctctactctg

SEQ ID NO: 156962 - DNA, 433 bp, Homo Sapiens
  misc_feature (68)..(156): n is a, c, g, or t
aatcgagctcggtaccggccccctgtggaattgattacacgctggttttccataagacatcaagaccnnnnnnnnnnnnnnnnnnnnnnnnnnnnnnnnnnnnnnnnnnnnnnnnnnnnnnnnnnnnnnnnnnnnnnnnnnnnnnnnnnnnnnnnngcacggaggggcaaggaggtggggacttagctactaggcagctctccttcccaccctctcatttgagagctcgttctagtccaagccattcctgagacagatgttagagcctgatggtggggacagagcacctcagtcggagctcagagtcctggactcagacctgattccttctttgctgtgtgcccttggccaagtcacttcacctctctgagttcctgctttctctctgtgacatgggaatgggcaatccacggagggccggtaccgagctgat

SEQ ID NO: 156963 - DNA, 388 bp, Homo Sapiens
aagggtctgagatgttgtccttgcctgggcaaaggacaattcagagctcggggaataaggggtttgctcagcacgactggttggacgggccctttcttgtgaatcgtacaggaatccaggagcgggtgcctgaggctttccatacaggctttgtgaaggtggccagagtgagatgcctgttttccggggcaggaaatggagggagcgcccaggctggagaggttcagccaggctgtcacaaggctttgaagcttcccatctgagagcctggctattggagagtgtgggtttggaacattgaggctaggaggttcatgttctgtcctgtgccagccacaccttcggatgggcagacaattccccagggggccggtaccgagctcgatca

SEQ ID NO: 156964 - DNA, 764 bp, Homo Sapiens
cacagcgagactgaaaatgatgcacagtgaatgtttctatctttgcaatccacgcgtcctcttcgtttactctccagatcccttccagcaaattggtattgccactctccctccatcgctgggttctcggggctaattctgttccagctcgctctgtttagctctttcttcgagcagaacccaagctaggatcttgccttccagagaatgctttaaaaagccttgtttcccaatatactgcgtttcagttttccacgagtgcggccatgctcgggagaggcgtacgagctgcttttacatgtgagaggtgaacaaatcaaaggtgagcccgttctgcctcagtgaggccttttgtgtaaaaagggccttctggagtaaagcaatcaggttgactgacaactgccgaggctaccagtgacagtcctgctccgtgggataacttggagaaaaatcagggccaaaagcagacaaaaggatgtccagaaactggaggtggggaagcctgagtgagatcaaacaacctgaaaatgtgtcttccatccatttagggctttatgtgcagcgagtttggtgtggctggctgaggatgtctacattttatatttgtcactgctttgacttccttgtatctttatctcccttcaagatcataagcggggagagtaggagtagtcacgatctggatatggtttcacgactatgttggtgtacccttgccttatgacttggggtgtcctgtctttgcatgtgaagggcatcatcta

SEQ ID NO: 156965 - DNA, 425 bp, Homo Sapiens
cttcccacagcaaagactatggtcagataggtctatggcacgcttgggaagcatgaaggtgcacatagcagttctcccatctccagtgcccatgggagagatacctaatcgaatcgtggcactcttcagagcccatctcagacccacagtccttcaaacagtactctaggtagagccacttcatatcctcaacaaagttggtagtcacaacaaaacctcttcagtgtgtcattctatgtggttcagactcttattctgtttctagaataaataacaatccctttacgctctcaaacaaacaacaaaccagacataatttcactgatgtcttattaaaagcaatttcattaagtctgacaaagcggctctcccatgtgcagacaagggagtgtctcgccttaaggtcttatagtcagaggagatca

SEQ ID NO: 156966 - DNA, 553 bp, Homo Sapiens
ttcgggaccagcccccttctctgcgcagccctggccctctcttgtgtgctgagtatcctcattgcacatgtgtgtggatgggaaataccacagcctgcatgtccagactgcctatttgttcacagctcaccacgaacagccatccctctggactagaattgcacatattggttgacttttgtaggatggcttacttttgatagagttctggatacccacagtggaacttagaaggtggagggcacactgtggcatgctcctgggccctgaggacttcttatcccatgaggaggagcatgttgaaaaaagctgagctgaaaaagattgaggagggtccagggaagcagtctccttgctcaggcctgagagtatattgctggtgatacagaaatgcactgggaagctaaaggttcatggctccaaatttaaggacaagccccatacttcctgaattataagcccaaagatcaccttagatttagaccagtgttcatagtaatccagtggtctcatttcagtgtaagaatgtcttgctggtggaagggtaccgagc

SEQ ID NO: 156967 - DNA, 552 bp, Homo Sapiens
caccattggtatagagagtggaatgatagacaatggaaacttgaacgagtaatgggctaagaggagagggaatgaggaaaaaatacttaatgagtacactgtacattattcaggtgatggataccctgaaagtcttgaattgaccacgatgcatgtaacaaaattgcgcttgtaccccataaatgtatataaattttagaagtacattatccattgcacaaaaaatagcaaatatgtaagacgtacaagtggaaagatttaaaatacaacctgagaaactataattaataatcctgtattatattcaggaattttgctaaatgagtagattatagctagttcttgccaagggcatcgggcagagggtaactatgtgagatgatgtatacgttcatctgttacattttagtaaccattttaatatgcatgtgtgtcttataatatcatgctatatatcataaacatacacaatgaaatttatttttttaaaaagagagataggaacagggattttagagacagaaattatagataccctctcatgtctgctgt

SEQ ID NO: 156968 - DNA, 597 bp, Homo Sapiens
  misc_feature (482)..(482): n is a, c, g, or t
gggaagagagtgctttaggaaggggatgggacccagtactgttgatgggtctcagaagttaagagcagattacccgtggaggttatcagttgtcacttccacgagagcagtcttggtggctggatggggtcagaggcctgattgaagtcaggggagaatagaaagaagatggagatggtatggccatctcagtgatttttcctgtggagcaaagaagtgggtggtagttgaaggatgcagtggggtcggggaacatgtcattttcccaaggaaaatactggatgtttctgtgcattgggaatggtccaggaaaggggaaatttatggtgcaggcaagagggaattgttgctagggggctattgaggagtgacttggaaagcaggtttctctagggaggaggaaggggcaggaagtggcagtgaggagggcagacacctagctcactgcctgtccaagtggtacaggattcacaggggagagnccctggtcctggagactaatttcaaacctagccggaaggtgagaggatcatcagagaagagggtgagacatagggaggtttgctgttgtcttgctggaaggaaggaccgagctcc

SEQ ID NO: 156969 - DNA, 554 bp, Homo Sapiens
  misc_feature (533)..(533): n is a, c, g, or t
tgatttatatcttatgtggaaaagccccaaacaactatttccccagttgctggaaaaggagctcttttgagttatgaaggtattttatgttctttctccattattcttaacttgtgcttacaggtgaattgtaagcatgtgctttgtgtttagtattttcctcaagaaaactcttgctggtaaatctagttaccatagaacttgaaaggatattgaaagaatagttgaggactatcctgattggttttcatctacttagtctgtatttgtgtcatttcagtgtctgagtaggtggtttgtgattaacatttcacatgttatttttattgatttggcaagtaccagaaaacttgaaggatgaactagaggttatttttcttagcatttgtggtattagtactaaaaggggagtaagagagtagaaagaattctggacaactgttaagaattgttacattttgtctacctaggctcgagttcctcacttttaaaattaggactgtactttttggaagaatattgcttgtgtcttngctgtagaaggtaccgagctg

SEQ ID NO: 156970 - DNA, 815 bp, Homo Sapiens
cttcccagtcatagacccatggctggaccgtagcattcgtgatgacgtggggctggctagttaggggaacatgtatttagcccaatgctcaggcattgcagtgcacagagcaacattggtgtaacaggatgtgtacctgtcacggcctgtgcaatacattacatgtgtcaccacactgaaggtattgtggaacaagtggcctcaccaaggtcggaaccctagtggactttttgcctcttgggagcttatgggtctatgaggacacagtagcctttcctatcagcaaactggagtggatgttttatctgggggtggccttatgtacctgctactgttctccccacattgcccagatgcctgtataactgggaggcactgtgctctcagtttttgcgaatgtgatgagccccctggtgtttctaccctttggcaatgactatccctggagcaggtgtcaaaactgtagaagcacaatttactgctcttgcggagcacaccgctcaggctctgaattacacctgagtgtccctcctcctgttaatgaatgaggttgatcagatcaaaaagtggtgttgcaaaaccaagtggccttagacataactgctgcccaaggagccacctgtgcccttttaggaacacatttcactggacaacaggtacaatgatgggcacagcaaatggacataaagtggggattccatgtgccatacagcccacaagctgaggtattattgaatgatataatgggatcttgaagaatggattacgcttgcatgtcaaactcctgtctttgctggtaggaagggtaccgagct

SEQ ID NO: 156971 - DNA, 455 bp, Homo Sapiens
tcagctcggtccttcccaccagcaagacttcacagcagactagttacctgtacagcatcaaagctgcaatcaccaccaaaatcagcagaatactgaggagtccaccaatggcgtagctgatatgatgtccttcccctggagcagcaggaacagcgtcattggaacgtgcacagaggcccagcctggcatccctttcagagcatcttccttccacctcctccagagacgtgcgggtccgggtggttgaagaatacaaggtggtaggtggtgtgttgggtagcactgggctcttttcactcatgccagtagccctaggagctggtggtaccaggccaggcacaagggagcagggctggctatcaggttcgtcaggacaggcacatacgaagtccgaggctctggcaaagcagaggtgggtgcagccaccattgttcacaccacaggcattggtccct

SEQ ID NO: 156972 - DNA, 168 bp, Homo Sapiens
ctggtgagtcactcctcctttcctctccctctactcccaggagtgaattgttccctccaaactagaaactggtgactggcacttcctagttctacctggaactaggaaacgagtggcagtggaatttcagtgtcctttagtctttgctggtggaaggtaccgactcca

SEQ ID NO: 156973 - DNA, 310 bp, Homo Sapiens
gtgtgagccacaaaacctgacctgtggctgttttcttactgtagcgatagacgaggagtcgctgcattgcatagagatgctatattgcacgcaaaggctttactgacttcacaaaaaagtatttgtcccaggtgtagtgtactagatcccttccaatctgtaattttaatttaaaaatgtccaaatacccctgttttgaaggataaactctgtatgcttgtgcttattttggagaagccataaacttactttgttttgtacatgatcagatgtgggcgctatctccaactgtcttgtacttctgagtatg

SEQ ID NO: 156974 - DNA, 449 bp, Homo Sapiens
  misc_feature (280)..(280): n is a, c, g, or t
  misc_feature (304)..(305): n is a, c, g, or t
ggagtgttggaagtgcctggaactagatagaggggtacactggtaatgtactaagtgccactgaattgctggctttaggatggttaatgttatatgaatttcacttcaataaattatttgtaaaaatcaggcaatagacccaatttggcccacaagccatagtttgctgaccccagcaagctatcccttgtcccaaactaagttagatgtagatatctgagagaagttagagatcaagtctttatcagctgccagcaccttaagttgattgcttccgaanatagacagaggcgtcttgagtcannggcaagaggggatttctacagttctgggtgttcagtgccagcccaactgggtttgcaccgtggctgtgccaagtggtagcggagtcatcccaggcaaatcattcagtatctctggtttcgtttcggaggtctttgctggtggaa

SEQ ID NO: 156975 - DNA, 451 bp, Homo Sapiens
  misc_feature (69)..(69): n is a, c, g, or t
  misc_feature (99)..(99): n is a, c, g, or t
  misc_feature (115)..(115): n is a, c, g, or t
  misc_feature (176)..(176): n is a, c, g, or t
cacacacacacccagacttgctggggtcatcatttgtgtcatttccaggtctcttccctccgggctccntggcaagcacacaggccaatgcaacgagcntgatgtcatgctgaangtgaccacgtggcaccgcgacgtgggagcccctgagaacccgtgccaaccgcttggcacanctcccgttcccccgactggcccaatggtggacacacagcacaagttagaaacaatgccgtgccgcttccagccacctagaatgcgtggtcgctggtgactgtggcagcacctggcctgccctgctctcagactggcttccatgcagcgtgtactcccccaccaggaacattctgctgtcacccccttctctccgctgcccgctggactcctacttacacttcaggtccctcctgaaatgccacttctccagaatgactgtctttgctggtggaag

SEQ ID NO: 156976 - DNA, 498 bp, Homo Sapiens
ctttgtttgttctttaaatggaaatgaggaaaatagtgattaatttactcaaatttgtagtgaccaatgattagcaagttttcattcagtcagtaaatactgtgagccattccatacccatgtgagtcaaagtatttccccacaattacgttttcccttttttcccctctctgtttcttttaaataaccatttcaaagctaaattcagggctatagaaagaaagggatttaaaattacttgaacctattttctaactcttggggcaagtccaatttgaaggttttcttatgattcgttactcaaagtgtggtccccagaccagcagaaatgttattgcctgggtgcttactagacttgcatgctcaggacttaacctatacctgctaaatccgaatctgtattttaacagcatgtcacagctgattcatcagctaatgaaggatattgagaaccaatagctctagagcattaagttacttatctgtctttgctgggaa

SEQ ID NO: 156977 - DNA, 617 bp, Homo Sapiens
  misc_feature (41)..(41): n is a, c, g, or t
agaaatgtggaagatatccctgctgtggagtcaggacagcnccccagggagaacactctggccttaccatgccactgtgactttatgaggacgttggcctctgatcagtacaaggggaaggagagccttccctcccctgagggcgcagccacccacaagcctgggctggagcgagccctctgaggtcgtgggtgagtcccactccctgaggtctggaaagtggtcggtggaggtattcttagtgtgctgtgtgggtgctgggtttggccctgtagtccttggagtgggattggcaagtgccaagaggctgaagaaagcccactgggagttgaagactttgctcttaggggctggggaccccatgtttctaagaatataagttttggccaagagcagattctctactctccctgtccccctgtcggtgccctagatgcaataagggatgtttctgtggttctagccctgctctgggttcagcttagggttttctacccagaccaggcaggaaggagatgccaccttggcagttctctgctaggcaagagaaccagcgggaatttgtcccaagtttgtccatcaggctctgtcttgctggtggaaggtacgagctgata

SEQ ID NO: 156978 - DNA, 701 bp, Homo Sapiens
gggaacacatctccacttagctcacctactcagcctgtgcagaagacagatggatcttggagaatgacaattggattaattgtaaacttaattaactagtgattccaagtgcaggtgctgtttccacatgtggtttcagtgctgagcaaacgatacgtctgacaactggtttgcagttgttactgagccaggcccaggtttgttctgttctcacacagtaaatcaatcactgtgacatgggttttgcaaaagagagaagaattattcacaaggctgtccagtgaggagatgggagaatggctctcaaattcacctccccaaagatgaggcttagagagatttataggttagagaagtagggtggtctgaggcatggggaaaggtgattggcagtggggaaaaatgcagtcataattggggttcatatgacatatgtgcagaaaatggtggcgttaacatgatctgagggtggagtttttggccctctgatgtcaaaaggccacctcttgggcatgtgtacaggcccagttgaagggttggcagtctcaactggtttgaacaggacaggatctgccccaagttcctgaaaaataagtggttgttatggtgacttataaatgtatctataaggtagcacgtaaaagttgagttacagtgttcaatagcatagccttcagctatcgtggtcttgctggtgggaa

SEQ ID NO: 156979 - DNA, 435 bp, Homo Sapiens
tggatcgaggcctcaggagaggctagagcactaggaggaaaaccaagggatgtggagccctggaagccacatggagaaggtgtccaagatgatgcggctagtcaagtgcaaagatgaagagacttgacctttgtacttagctacatggaggccaccagtggccttgactagagctgtttcagtggaggagttgtggggacgcaaacctgtttcgaatgggttcaaatgagaatggtagatgttaaatgggaacagctcttttgagggactttgctttgaatggggggaaagaaattggaggttagagggttccaaaaaggtttgtaaaagatgggagagatcgcaggctgtgtgaagatgacccagtggaggggagtaacaggttgcagcagagagggagagacttactggagcacatcctgaagcaggtgggaa

SEQ ID NO: 156980 - DNA, 748 bp, Homo Sapiens
ttcccagcaaagactcaactggaagagacagggcagaggagggcggttggcacagtccttcgagtgagcctggggcatgcagcagggtgggtgcaggtgcagagtgcgtctggagggacagaaggagaacatctagcccacctcccaaggctgtgaccccggaaccctgtgcttgcctggtatgtaatgctgtattgtgattggctgtttccttgtctgtatctcctccaagactcaactctcctggagggcaggggctgtgctttgttcacacatactccaataaactccattgggtaaaataaataacaaggctgctcagattcaccgtaacatcacatttctctgcttgggatgcaattaaatcatctccatgtggaagcagcggttatcttctgccatcagcagcttcggattaccaggtctgtaggcccaactaataaaacacaagccagcaaagttaattagtcatttaatgaattcaatttgtctagcagacaaaaatccttcaacacaagtcatgaggcgagagtgagaacaataaaaggagtcctccctgctgaaaatctctgaaaacaccccctcagccatgagggctgggctatttcgagggtgttcacatttcttgtgtaactcagagcaggccaaagtatggttctcccaggccaaccaagccctcaatttcaaatacatctttgcggaggagcccctatgggtctgcctgcctctctcggtctttgctggtgta

SEQ ID NO: 156981 - DNA, 570 bp, Homo Sapiens
ggtacctttcaccagcaagacccagagctggggcgacagcatcccggtcacctcgggctgccccagccaaactcctctgtcctgttctgagaaagcaggcaaagtccctgcctacagggttcccccacgtacctgcaggacaccgtctgtcttacggcacgaagcccagggcctccgtagggctcacaggcggcttctagagaagatgcccgccacaggtgctctctgctccatctcaggtgaccactggccatctcggaagaaacctgctttgatggttttcaagcctgaagctccttcctctccagcccctgccacccggggcggggaatggggacgggatgcagacagaggtgggcccagccctccaggagttctaggggctagggacagattcccatcacttggatgcccagggaaggccccaccccagattgaaatgttcatgggtccaagaaggttctgggagtcaccccaggaagaggccggcatgggaggtgcctctcggtggagagaatcagaggcgcctgccctagggggagcccaggccccccttcgtcttgccgggaa

SEQ ID NO: 156982 - DNA, 459 bp, Homo Sapiens
ttggaggggaagacgaacttcttctggggtagcaatacgtctcctcatgacatcaccactaccagaagcagtgagtccttctccagtgatctcttccacgtcagcagtggtttctagaaagctgctgacatccttatttgctggggaggctgttggaaaggcagctgctggggaagttacgggagaggcttttggggatgtcactgaagccgtcaacgggacttctaaggagactgctgggaggactgctgaggaagctggagagaccactgagaagactgctggagagacaactgtagaagctgcgggacaaacttctggagagatttctggggaggctgctggagaaaccactagggagactgctggggaggttgttggcgagactgctggtgaggttgctggatgtagctgaatagtggatgactgatcaggagctggctgggtctttgctgggaa

SEQ ID NO: 156983 - DNA, 446 bp, Homo Sapiens
tttccaggtccagctcagatgtcccctccaagaaacctcacctgaaacgtgcctgaaacatgtgctagacatggagtgtatgaagaggggtaagccagacagccaggtgcccagagcccacttcaccagaccagcaactgggaaagaccacaatattataaagtgaaacaaaaagtactatgaattaaaaacaagtcacttagtatatgaggggaatgatggcttgactcttaactaggcaagcagcatgagcttcaccattctgtcctggtctcatagttctttacttcatgtgtcagggaaccgcccacaatcagactctgctgagttccctgtgtaacagactacaagcctcttcaaggtacagtccatgtctttcacatcttggtatcccatacacttaaagtgtagatgagatttaatggaggccaggcatggtggctcat

SEQ ID NO: 156984 - DNA, 251 bp, Homo Sapiens
aacaagactggccaccctgagactccatgctatgaggaagcccaagctacccaggtagaggggccacttggagagagttgcttgattagcacccaaccgacccagcctgcccggtccgctcaccagacaggtcagcaacaaagccttcagattactaaccactgctcatctgagcccagtcaacctacagaactgtgagaaatattaacaagttgttatttggagccactgaggtcagggtagttagttat

SEQ ID NO: 156985 - DNA, 348 bp, Homo Sapiens
atcggagatccggaggaggatagcaaacttctcctgctagcaagtggtagagctaggactgaaaacctctgtctgggactcccaggtccccacaccaggctgcctgtccggtggtgcctgtctggaggtttatgggtttctcgttagagaggagtcagataagaaacttgtttgatgaggtcttcttgataataagagggcaatttcctgagtaggtaaaagaatagagggctgaagaatacttgataagtacaacagcttctaggggcccaccagggaggagctcagtcagtgctaacacgataggcgggccttggaaacaagggaacccggccttatgtagacttg

SEQ ID NO: 156986 - DNA, 282 bp, Homo Sapiens
cctgaggggatcggagggatatagggagaggaaggcgatatttacatcccactgtgcacaactcagtaccgcctattcattttcttgaacttctcataatgatagtcatcagttgccttctcgttagcaggacgcttgcggttaggaggggaccctgagaaggaaaagaacaggaaaggtggtttgccatgctggaacccactgctagactttactccatgcaggcaaagacaactgcctgtttccttcccgcgacaggagcccccgtattacacggtgaat

SEQ ID NO: 156987 - DNA, 473 bp, Homo Sapiens
atgtaagatcagactgtctcaaagggagaagctgctactttttcatgtaaagctgagatgccctaggggccagactggctgcattcttgaatattaccagttccatgtggtgacagaggcttgttgggcctttcccaccttattagtcattgcatttgagttgactcattcccaaatgggaatcttttcaaaagaggcatacctagtagctacgtcagggaggcattgaatccaaacccaagagtcacctgaagaggttgttcctcttgccagatggtctagtcaggaaagtcatctgtgcacagacttgtactcaaacaggtcataaggattgtggggccccaaacctactaatgcctttctacatgggctattcgcagtgagcataatctgctctggagcttatgatccgtcaacagttcaggcatgtaaaatatctataccagctatacactcagcagtggatgatacca

SEQ ID NO: 156988 - DNA, 327 bp, Homo Sapiens
tcggacggacattgaccagatcatcaatgcctaaatataaggtggctagctcagaatttattcattttcacggtaaatccaaaggtgtcctaagaaagtcatcactgcagcatacctatttttgagtggaacatgaggaactgttggatcacaactatgaatcgcataccttaaagtgaacacgaagattggaacctcttgatttgcatgctaggaaataaaacgttttggttaatttttggtatcttatgccaagccccaagtaggaaatgggtatctacctcctgtccacttacatttcgtggggtcctctgggatcagatgttg

SEQ ID NO: 156989 - DNA, 296 bp, Homo Sapiens
aaatagaacaaaaagagattaaaaaacaactgggcagtccctgcagaggtcaccctggctggcgcggctcaggatggagggcgggagctgtgtgcctggaggggggatctgaggcacgtcagggtgtgtctccagactgcaagggccacagagtacgaaaaagaccacccagagcaatgtggtcaccacgaccatgccttaaaaggttttaggaaacagaatgggtcccacgggagggtgggatgtgaacgcaccagcctggtggctctggtgccagtctgggtcaactgtgctcg

SEQ ID NO: 156990 - DNA, 300 bp, Homo Sapiens
gcggagcggaacagttgaccagatgtgtacctttaataaatcattcatcggggcccacgcgcctcattcattcattcgctcattcatcaaatatttattagagtacctataaaccagacaccattctaggccctgggaataccgaagcaaacaaaacagacagattctctgccctcgtaaagctgacatctgccaaacacacctaacgctacatgttctagaagctacaggagaggagccaaccagaagaagggaaaatactttgaaaactgatgtctttttctctatcaatcagaatgc

SEQ ID NO: 156991 - DNA, 437 bp, Homo Sapiens
  misc_feature (273)..(391): n is a, c, g, or t
catgacctccagacaagggtcctcatttttagagactttcgtactgggatgccttatctagctgctcctacagaacaagtcattttcctggatttgaagacaatgacactagactaaggataatggggaaaaaatgctatctataagtagaagtcagaagtgtggcatagcacaaaagggatccttaattagaaattcactggtctcagttccagacccaggtatcactgacttgttataagatcttaggaaacttaccatttaggcaggtannnnnnnnnnnnnnnnnnnnnnnnnnnnnnnnnnnnnnnnnnnnnnnnnnnnnnnnnnnnnnnnnnnnnnnnnnnnnnnnnnnnnnnnnnnnnnnnnnnnnnnnnnnnnnnnnnnnnnnctagttgtggtgtgcacacctataattccagctatctcaggatgct

SEQ ID NO: 156992 - DNA, 569 bp, Homo Sapiens
actgtgacagaacagctctcacattaccttagatctttccaacattaagtgtaagctctccctggacttaggccaagtcagtactaacctgggtgatgagcagtctgaatttttaggcaatattcgaatgtgtccatttgttttctcggggaagggttcccagtgttcattagactctcaaagaggcagtggctccaaaaatattaagaattactgtccaggccaaagagctgagacttggagacacctccttaatccagtcttgtttgaatcctagctggacacacgcagaggagactagcactcaggggacagtgatgactacattgctgtggcttcttactggtgtttgctggaaggtttgattttatcaacaccccttcttagcctgagggtttctacgtgctggcaatgcctgaatgccctgtggttgaaaaagtgcctctgacatgaggcctgggttctgtattaaggggaaaaaggctcaagaaataaggacacaggccctaatggaagagattggggaacggacgtcatggtatccatggaggttggctttattttctctg

SEQ ID NO: 156993 - DNA, 515 bp, Homo Sapiens
gagaaagagatttccatttctgctgccagagctggtatttgcctgcctgattctctgtgtttcctgtttcaccgccaccctttcaggagagaactacaccagttcatcatgagggtcaggggagcaaaagctctcagatgtgtccagggcgttacttaagaaatgagtatgcagattctggaaggggtgtggaaaaggtgatcctttacccccacccaggaaaacctgcattgtgctagcatggaagaatcatgggctttggaattatacccatttggtggaattaaacccatttggtttcaaatcccagttatgacatctgttaacttcgcaaactcacaaaaattatttgaaattatctgagttttcattttctcaccttccagaatggggataatgcctcctgcatcggttgttgtgaggtttcaatgagatgaaatatgggaaagaagaggtactcacctgatggtacctgctttcctctgctagcctctggagttgtctgggtcaactgt

SEQ ID NO: 156994 - DNA, 714 bp, Homo Sapiens
taccgttttgggctgtcgtgcagacagtgtggtaggctatacatgaccgctgtcccagccaacagggcgaagagcgtgaagaacatgacctggtaggaatccaggaagtgctggaagaggctggctccataaggaccgggcccacggcgatccatcacaaaagccactgtcactgggatggcaatggcttggttggtcacggggctggagaaggtcagggtagtggacagaggcccttggctgccagccgcggggtccgagacgccgaccgtgtatgtgatgaagctgggccacccaaaagacttctcctttgcgaatgccagcacggctggggacccggatttcacctccaagttctccagaacctccggggcaccaaagaccctgatctcggaactggtgtagtggttgctcaaaaggatttcagcctggtcggcgaagagacctgggctgaggggcacctcggcccccacctgctctgtggagaagtggctgctggagagggaggcactgaccaccagagctgtcttcttcatgctcaggtgcttccgctgcttgtccgtcagcctgtgcattgtgattgagcagaagtaccgcccgagagcagtgtctaatctgtgtcttcacggtgaacacatcttgagatgggaaatcaaagacggtcggcttgtactgggatctggcagctgatgaggtctcagggtgcaggcctgt

SEQ ID NO: 156995 - DNA, 214 bp, Homo Sapiens
ctattttggatgtaaaagttttgggtcagaatcttaagggtgaattttgaggggtagatacatacccattttctatccctatacaacacttagggatagaaggcattcagtgtaggaatgacctgggaatacctacatcttcatgtccaatcttcagtcccccacgtcctctgttgcagtcctccatgcactcgtcccatatctggatcaagtt

SEQ ID NO: 156996 - DNA, 469 bp, Homo Sapiens
ttgacaagtggcttccaatgttaggtttgctacaagatggttactggagctctagctgcctattttgtgtttagggaagggaaaatggaggaaaggggagaagagcaaagggcgcttttaaagagctttcccaaaagctccacccaatgacttctgcttccatctcactaaccacccacccctacctggaatggaggctgggagatgtggcttatttgctgggtacgtgactatccctaataacaaaggggttctgactctaagacattaggggagaatgttgggtaggcagccagcactcttttacccgagggcctcctggtgtttggattttgatctccatgtgtataatgacagagatgtaacaagctcatagggtatcaatatctcttattgttctatgttgatgatatttgtctttgttgtgggtaatactgacattgttattggtctgtcaatgtgctgtcga

SEQ ID NO: 156997 - DNA, 198 bp, Homo Sapiens
acggatagatgatgacagtggagcctggagggcaatcagaaaagacttccagggggatgacatctaagctagaacagcatatgccaggtcagacatggaggagaggcagaggcaaagccagaggacagagattgctgcgcagggcctattcccaggcactgagtggactcatggctgggcctgggggcagagggcccc

SEQ ID NO: 156998 - DNA, 242 bp, Homo Sapiens
ttttaaaataaagaacaaaagcaatctgtgcagaataaacagattcctcagaaatattaaacaaacaaacgaaaaatgccagaatatttctcacttaaattccactggggaacatgagggtgaaatgccactggccactgggaacccttatcttgcatgccatgcaatccaacccccaacctaaatgcctccttcgctacaagcacacactactttctatttatttccctctgggtcagaga

SEQ ID NO: 156999 - DNA, 338 bp, Homo Sapiens
tctgagcccactggctcaactcctgagatcttatagggaaactactgctcaccagtttcgagtgttttctatctattaggagccggcttttccctgttgccgggtgtgaccaattattactttagaaagacagtcaacaaccgccagaccatcacctgatggtcacctgacactcctggtgtgtggggtatggggagccctctcctgccctgctctttctgactagctacccactataacactctccagagggacctgcacattttgtgctctttgcaagacagtgcctgcccagcacctgtaggcctgctcacccttctgggtcaatgtgtccggtt

SEQ ID NO: 157000 - DNA, 181 bp, Homo Sapiens
acccagagaacgaaaggaatgaggcacgaaactgaaaataggaagatatcttaaatgaaagtctgcacaatctcgtgcaaccccagccccagagcactggcagccaggtttaggtgagtaagatctgactaccctagagaaaagatccatagatactgactacatctggtcaatgtaccgt

SEQ ID NO: 157001 - DNA, 152 bp, Homo Sapiens
ggcttgtggcttagaatggctgagtaactggctccatgtcaccagctgctaagtggcacagctaggtttgcaaaccaggtctggctgctctagaccaggtattcatacattgcgcatttgctgcctgttctttatgtaaactttcatcagca

SEQ ID NO: 157002 - DNA, 267 bp, Homo Sapiens
tgcagccccttggccttggacttctcggcctccacagatgtatgaaatacattccttttctttataaattacccagtttcaggtattctgctatcagtaacagaaaatgtactaagacactgctagaggaaacttttgtaagcacagcatggaccatgtacctctgacccaaagcctgtctatgacctttggaataaagtcctaactaagttcatggcattctgcagtttggggacagtgtcctctgcgtgtctgattttctggtca

SEQ ID NO: 157003 - DNA, 146 bp, Homo Sapiens
ttaccggtacattgacccagacaactctagaggctggtttcctgtccaccagcacacggaaattccccagatcttatcatcaaagaataacaatgtaactcaaccacagtatgggggcttagagggaacgcatctcagcttgagct

SEQ ID NO: 157004 - DNA, 381 bp, Homo Sapiens
tcacattgacccagaccaactccagaggctgagactcctgtaacgctgaaagactttttgagtgtgacagattaagcagctttctcccatggatgttgtgtctgggattacagcttctatgaggttgtttttgtctaggtgttgtaaggcctgggcacaggtcacacccaggtgttcctgcagcttgggtaaccagtactcaacatccaggcccacttctctcagcatctcttggaggtcttgcctccttttgcctctgagcagagggtcatcaggggtgtgctctcctgtggccatggctgtcctgaggccaagatcctgtcttcagattgctccagagagacgtgcatggagagtaggttccttttctgggtcagatgt

SEQ ID NO: 157005 - DNA, 249 bp, Homo Sapiens
caacatctcagaagtttggccagtgggctgatagccgggcaaacaccgcttatggattgggattctcctctgagcatcatctttcgaaatttgcagaaaagtttcaggaatttaaagaagctgctcggctagcaacggaaaaatcacacgagaagatggaacttaccagtacaccttcacaggaatccgcaggcggggatcttcagtctcctttaacaccggaaagtatctggtcaatgtgccggtccg

SEQ ID NO: 157006 - DNA, 447 bp, Homo Sapiens
gaggatggtcgaggccagattttgaaaggtcttgcctgtcgtgctgcagtttaggctttatcttctaggcacttttaagctcaatgtgcttcaagggccatgctgcgatttctttttggatggtggctgaaactggggtgagggatggactgggaagaggaagagagggaggagtgtccgtgttctttgtaacaagagtgagtccctttcagccctctgtgggaaggggagggcactgaagagttcatttgctttatgtcttgttcagtgaatgctgaaatcttttcaatgctcattaagagactttgtaattgagtacacgtacccgtggtgattggaaatcatttgcatttactgcgtccatacatgtaaatcatagtaattttaggaagaaagaattgcaacatctatgaaaactcatatgaattcatttctcatagttccatg

SEQ ID NO: 157007 - DNA, 353 bp, Homo Sapiens
gagcaacagttgacccagacaactccagagggctgtcgaacatagacggtaacaggtatgaaagtggggactatattattggaacgtacactcaacaaaatgtgtgaatcgattagaaacaatggatattacgagatgggcgaggaaagataaaggagggatcaagtttgtatgcggcattttggtgtgagcaacaacgtggaaggtggtgtcctttattgagcacaggagtaggcatcattaacaaggtttgagtaaacacaaaatgatcattatatgtttgtgtgggcactttctatcagatcactcatacctataagtcaggcaactctgggtcagcatgttgccgggac

SEQ ID NO: 157008 - DNA, 258 bp, Homo Sapiens
  misc_feature (90)..(133): n is a, c, g, or t
ggacggcacagttgaccagatattttgtattttgagtaaagatggggtttggcatgtgggccaggcaggtcttgagctcctggcctcaannnnnnnnnnnnnnnnnnnnnnnnnnnnnnnnnnnnnnnnnnnntgagccgccatgcccagacacctatgtatgtcttgatgcttagtcacaatgttctgattagttgaggcggtctttttctttcaggaaaggtatgtttaacattccacactgaagatgtaattgtc

SEQ ID NO: 157009 - DNA, 187 bp, Homo Sapiens
agcaaagatatatctggcaacaatctggatccacatcggagcagggagatactgatctgcttcgccgtggagttgttctcgacgtcaccctactaggactggagaagaggagccagaatggcttcttgtctggtgatattattgccttcactttgggttgtggagatgatgacctagatgggctctg

SEQ ID NO: 157010 - DNA, 317 bp, Homo Sapiens
gaagaatctcttcccactgctccaagctgggaatgcctaagggaagatgggattgagaagcagaggggatgcagaaaaggctgcccaggagaaccattagcgatccattttggttttttagtcttgtaccaaatggaaaagttacttttaatgaaatatctgaaatccagtcataccctatcttatacatatttgggactacattctttagacgccaggggtcacccacccccacaaaccagtacagtccatggcctgttaggaaacaggtgcacagcagtgtatggcagcctctagagttgtcttgtcaacgtgcc

SEQ ID NO: 157011 - DNA, 494 bp, Homo Sapiens
cccctataactgcacattctgtttccaggtcctaattctctatagtctgtggtcccactgcagcgaaggaaactgtcctcttacaggataaagagtgttatatgaagaaaggaaacaggaccaaaagcaagtaaataggggtggcataaacttagagatagacatatgttcaggtttgcacaaattcgaggaacaataaatgagacttctctcaacgtgtatttgacccagagacacaaacgatgcagcagcctactgggtgtacgtttagtcacgcagtgatctattactgcaatgattacttagagtacaccaagctcctccacctcagttttacttgtgtctttttgcagaggagagtagggagaggtagtaggcagcggataggagagcacgtccttagcacgagcaaagagaagcccaagtgcggagcacataattatattctaactagtttccctactctgattacttgcatcccacgtgttctgggt

SEQ ID NO: 157012 - DNA, 137 bp, Homo Sapiens
gtgtgagctaccgcgttttgctttgtgtctgtttttaaagttcccttgcagcttgcctttttccagcctatccgacgatgctcatgtgttggagatctctccgttgattcctgaatatctatgttcatttcttttga

SEQ ID NO: 157013 - DNA, 164 bp, Homo Sapiens
cagtgtgtcactgcacctggctgactgcatcttttattatttttgcttgtagaatcttgctttccctttggttggagatcggtcttatttatgtattattatcagggctaatcttttgaaaatcacttggctttatgggtgatggagacatttagaggccccag

SEQ ID NO: 157014 - DNA, 445 bp, Homo Sapiens
agttgttccacacattatgaaatatcagtctaacccacaaagtggaatcggttaattctttccatgaactgtcagaatcaactcttgaaaaactaagactatggattcctctgtgctcttccatagaagaagaaagattgttgtaatgagcatcaaatgacttagtagtacataaagacacaggtgatcctaaagcacttaggatggtggcacatgtggtgagcactgggaatgaactgtaaacaagctagctgaaactattactgtgatctaaaatgcctagaatataaatcattggttctccaaaagagaggtaagagagggcagtcataacagagatgaactgaccaaaactaatgggttgggcaaccctgtagacgtgcaggaagccactactggggaacatggcgaaagccggggatccgtgctagagacgaccacagcg

SEQ ID NO: 157015 - DNA, 365 bp, Homo Sapiens
gttttccccccacaaagtgaggtctgttaacccctgctgcacagggtggtggtggggacagctgtgagcaacagctggacatggggtgtggtcactagccagggctgcaccctacagttcaaccagtcctagcactggcgctgagccctacccctttcctccagcccagagtccttcctctgcggccggcacacagaatcagtttccccacagacatactgaccatatttcccaagccaaaagctggcatgacaacatgatagaatatttggaactgagattgcccaaaaaggcagaggcagccagccacatagtatctggaggtacatgtggctattggaagggcctctagactgcgtcaatct

SEQ ID NO: 157016 - DNA, 395 bp, Homo Sapiens
ggaaggggaacaaaagaaatgtgaagtagagaagggaatagaggaaactaggaagctctgatggtccgaagcagaaggaaaggcattctgaaaaacagttcagaggagcttcagactgcataacctcaatatgcaacaatggaaatacagggaaatggtgaagtcctgggtacagaaattatgaaactaaaataaaggctgttcaaggtagaaactgggaaaagacttattatgtgctgcagatggaggtcaagatccaaatggtcaggtcttaagaatatatcagactagcttaatctgagctgttcttattcaagggctttggtgtaagatgacaaggcatggtctcacttttcctagccacatggaaaggaataccatcaaactcaaagcaa

SEQ ID NO: 157017 - DNA, 283 bp, Homo Sapiens
ctgactcagttctttagtagtgtaattttgctttatgccatgcatttgactttgaaaaaaatcccaaaactcccagcatattttaggggtcaggggatagcacaaggaaactaaatttctgtgttcacttctaaataataggtggttgagggtgaaactttaaaaagatctaatagcagatgttaagaatttcgtaagttaactaaccctgtaactggtgaacagggatatacaaaatataaggcacggacgtaagtggttgatgatctgaatgacaaggaag

SEQ ID NO: 157018 - DNA, 186 bp, Homo Sapiens
gagatcaagtgcgtggtgtcaacgcatcattcatccgttccgatgatccgtcgcgtcacctggcccctggtcccacagcggctcccacagtgggcaacagacttggaaactcagcaaacagggagccatggtcagagaaacctcagcccccacgtggatactgctgtgtctagatgcctagggaat

SEQ ID NO: 157019 - DNA, 247 bp, Homo Sapiens
tcagctaagtatgtttttagtatttttctcagaaactatgtaaaaaacccaaaacgtaggaagtcctagagaattttttaccttgaagacagtatagtatcataatcagtatagaaataaaaataacaattcttcccccgcctcattcccccaagtgggattagggaaactgaagagagacaaaaagaaaaggccaataacattacaaaaatagtggaatgggcctggcaacagagcggactcacat

SEQ ID NO: 157020 - DNA, 329 bp, Homo Sapiens
ttccaagcaacaaatctccttaatttgctctaatagattggtatggtttaagtctttccattgtgtcttttcatttaattttcctgaagcttgcaggatagattgaaatgttataggtttgtttggagtaaccaaacagtatgcaaattaagaaaaagccagagtaacctagaaaacatccagtggattacagaatttcttccccatattcactcctcacttttactattttcccacaatcctctacttcagtgggatgctgtgtctagtgattaaacaaaaatattgagctgtgcaatttgattttggcttccacaacgaatatctga

SEQ ID NO: 157021 - DNA, 313 bp, Homo Sapiens
tgtatgagcatgcctgaagactgttatttgaaatccttctgatgtgtcactgtttaggacgacagtgattcactacatgctactatttgttaaattgccaggcattccttcagacactattagagaacgggccaggaagattctcgagggcttatcaagctcttagagaattcagttagtagtgaccatttgcgatactgccattgcaatactgtgctctccagtgagctgacaaggccagccaaggcaaagtggcgaggcagtggtgctttgtggcagaggacctagaatcagtaccttgtgtctctacctc

SEQ ID NO: 157022 - DNA, 350 bp, Homo Sapiens
ttatctcacccgcgagtgcatgctgctgtctgtcagagaggatcttccacaatctggggaaaagctggacccacgtcttctctgccagcgtcgtggaaatgtggcacagctgaacagaaagcgctgagcacgcgctccagtcgttcacctctcggagagtgtccagaaacttgtcgtgcctgttggttagcatgtgcagctggtttccaatgtccttttctgaaagttctttggttttgggcgtgctggtctgatccccaggagctagttcgatgtctatctctacatcctcctctttggactcgctgttctcccgctcccggggctcctgcttgacatgtgtgaccatg

SEQ ID NO: 157023 - DNA, 432 bp, Homo Sapiens
  misc_feature (40)..(40): n is a, c, g, or t
ggtgtgtgagcatggggaagttatttgcactttctctgangagcaattttgggattccggtttaacaagatcttgctttacatctctgagttattgatgtaatttgatctgtaggagtggccagaagaatatcatccataaaatgaatgatatcgcagtgggaaacatattttgagactcctttaatgctcttcctacaaaatggtgacataatgtaggactgttaagcatgccttcaagtaaaacttgtcattgatagcaagaaacaggttctctatgattaatagaaggcatagagaaggcaaattgaggcttatgcttctcgtgtaatggtataataaagaaacaatccttaaaatctattaccacaagaggccagtctcttggaatggccgccggggaaggtaaaccttgctgtaatgcacccattgg

SEQ ID NO: 157024 - DNA, 434 bp, Homo Sapiens
  misc_feature (21)..(21): n is a, c, g, or t
  misc_feature (58)..(58): n is a, c, g, or t
ttttgggctgtcgtgctccanatgccattagttgaaacagcatttaagaaataccatnagatataaggaattttatttccagacagttctccttccagaatgaaaaagcatccacttaaggtgttcaggatcaacctccaacctgcatctccaacatagaacttgttaaggcgaaagcacattccttgatcatgctcacaagagagctctagcatttaagaacttatacataaaaataatcactacactacccaaagcaacataaagctagaagctacctagaaacaccagcattcatttatcttagtgataggacaaggggcttcaaaacatgatcgaaagggggcttctgtaattcgtgagacaatgaccaaaaatgagtcggaatagtctcctgctcctggtcagtgatctccccatcacgacagctcaaa

SEQ ID NO: 157025 - DNA, 395 bp, Homo Sapiens
gcgtgcgtctgggctggcttgtctctttgtgcctcagttctcgggctggctggtaatgccctgcgaatattggtcggtcggccttgatctctttctgggtcagctgtggctctgccatgtgcgtgctttactgtgacgttcgccgggcagtcccactttgcggatgtctgtttgtgtgcgtgctcgctatgtgcctgtcagcggaccgtgccggtggacgtgtacctgcctgtgtgcacgtccacgtacgttagtgtgcatgtctgtgtgcacatactatgcatgtcttacatgttagtgtgtctgcacgcatttgcacattgtgactgcatgcctgtttgtacatgatagtgtatgcacttgtgtattagtgtgactatgcctggatgtgggta

SEQ ID NO: 157026 - DNA, 296 bp, Homo Sapiens
tacgggtgaggtagctgtggattgtggctgtgcttgtcagcactggaagggtggttgcagtccttggactggaggaggaagtggctttggagctggtggctgcgggtgtggtggccatgctggtcagcactggggggatgggtgttgtccctggagttgaggaggggttggtggtggagccggtggccgtgatcgtagtggccgtggtggtcagtgatgggggagtaccactggtctgtgtgctagaggagggtgttgccatagaaccagtggccacagttgtggggtaccagcta

SEQ ID NO: 157027 - DNA, 442 bp, Homo Sapiens
gcggtcggcctctggcataggcaggatagcatgtggtcagtgctatgacagaggtcaccgagccctagggcaacacagaggacagagggccccctcggcctagccagagcggagagtcggggctggtgttagccctcttccagcacagagggacagtcccacgctctgcttctcttccctttcccctgctgtgccctgccaatactctcagtgccctggccctgccgccaccaaggcactgaccttcccagctcctactccagggctgctgagcccacatcgttgatatccaatctcagctctgtcctcaggatgcaccgtgacctcagatggccctcagtcagacatctcctctccacccctctgggtgccaccttcctcaagccccttcccccaccactgctctccactgtcagcagacgccctgtgccagagggccggc

SEQ ID NO: 157028 - DNA, 423 bp, Homo Sapiens
cgcctctgggcataggctgctttgctgccggcacttcaatgacagtggagcctgtgtacctcgctgtccacagcctcttgtctacaacaagctaactttccagctggaacccaatccccacaccaagtatcagtatggaggagtttgtgtagccagctgtccccataactttgtggtggatcaaacatcctgtgtcagggcctgtcctcctgacaagatggaagtagataaaaatgggctcaagatgtgtgagccttgtgggggactatgtcccaaagcctgtgagggaacaggctctgggagccgcttccagactgtggactcgagcaacattgatggatttgtgaactgcaccaagatcctgggcaacctggactttctgatcaccggcctcaatggagacccctggcacaagatccctgc

SEQ ID NO: 157029 - DNA, 156 bp, Homo Sapiens
atgagccactgggccggtcagtgcccttttctctgaagtccttaaacctgggcatgacttccaggggctgagttcttctctttattcaccctaccctaaaatatcatccagtctcagggctcccatccattcactgctgaccatcccaaacttccc

SEQ ID NO: 157030 - DNA, 455 bp, Homo Sapiens
cggtccggccctctgggcactggcacggtgtggttcctggcgtggtgtggttgctgggaggccaaaagcagtgtttcgggtctggtctggggcccagaggacactggggcctctcccagtcccagcttacacaataggcaggggaagtgagacatggtcgctgccaggctggtcctggcagtggtgcagttgggagcgggtggtctgagtgctagaggcagggagtagggtccccagcatgggggctacaccacattgtctatctgggctcccaggggtctctgagggtcccccgcacccatccagcacccacacacagccatgtgtgtgcttgactcttgggtcagcctctcctgtctctctctggccctgtgcgtccccctccagggtgccctcaccccgtccccatctctcccccatccctcattcatctcgctgtgcactgtttctccata

SEQ ID NO: 157031 - DNA, 703 bp, Homo Sapiens
cgcagctgcgagcatctgagagcctgggtcggcacccacacccccaggtgagcatctgatggtttgcagcaacaccgacacccacaggtgagcatctgacagcctggaacagaacccacacgcccaggtgagcatctgacagcctggaacaacagcctgcaccaccaggtgcgcatgtgacagcctggaacggcaccaacacccccaggcgagcatctgacggcctggaacagcacccacacccccaggtgagcatcagacagcctggaacaacacccatacccacaggtgagcatctgacatcgtggagcagcaccccacacccacaggtgagcatctgacagcctggagcagcacccacacccccaggtgagcatctgacagcctggaacagcacccacacccccaggtgagaatctgattgtctggagcatcacacacaaccacaggtgagcatcggagagtctggagcagcacccacatcccaaggtgagcatctgacaacctggagcagcacccacacctcgaggtgagcatctgtcctcccggagcaggacccatacctccaggcgagcatctgaacccatggagcagcacacacgcccccaggcgagcatctgaccgaacggagcagcacccacaaccccaggcgagcatctgacagcctttaacagcacccacaatcccaggtgagcatctgaca

SEQ ID NO: 157032 - DNA, 523 bp, Homo Sapiens
tgagaggatcccttgcggtacattttacacaaagatattacaaaatgacaaggtatgaattatcggaatgatggaactatcttctaaaagggtagtaaactcaggttaactcccaaacagaatacacacctattaccttactagtaagagtaataaccaccaattattgagcaccagccacagtgctaagtgttctacctatattgtcttgtctaatcctgaaaacacgatcttcctttaatggtagttgtctttatttttaaaatgagaaacctgagctctgcagaggttaataacttgccaagctgttcccagtacccaatctcacatacagatctctgctaagcccatgaggccacaaaacagaagctaatgttttgggtctggagaaatattctccacctggaaagacaacccttaaccacaaaaaggcagtagcccaagggctgtcaacgaagtgccaagcgactttccaatgactattacaagtacacgaatacagcccgggattcagaagacccgg

SEQ ID NO: 157033 - DNA, 413 bp, Homo Sapiens
ccgcacattttacacatgaaggcacaggtccatgcatgttttccgactactacttccaagttctagcaattggctgagagcgagtttggccacaggggcaacagacgcaccagactgggggagccgtgggcattgctgggagggctgagggtggcacacttgcgaacatgtatggttaccgcatttcaagttcttgccacatatctttaaacagctgaaatccccaaatccatcagactttcctacatcggttccacataacacatctcgggaggtgctgccgcaatagcatacttgaagagaaaatttcaaaaacaaaacgttagtaacatgtatgggttcttaaaatgtcacaaataatctataagaaaatacaaaatgcgggcctggcacaagtcgctcatgcctgtaac

SEQ ID NO: 157034 - DNA, 430 bp, Homo Sapiens
taggaaccgttaacgaaatggcaaccctagcacccaaagatgggactagtcctgcatctgctgccatcagcctttcttcctatcaacgcctcttacaagtcatgtctgtcatccttgtcactatgtctatagctacgaatataccacattttctttattttaaaatctctccatttaagatcctttccaccaaagatgttgtcttcgtatttacctcactgccaatgcttaaaccatattttgtgtataacaaaggtcaataagtggttgaagttaatgatgaattatcctatcactagttattgtcaaaagcaactgttttaataagtgataaacactctctttaaaaagtacctttagcctgtgttctagtctcagtattgtcactaattggctgtggatttaagcaagtcactaacctctcttactt

SEQ ID NO: 157035 - DNA, 342 bp, Homo Sapiens
  misc_feature (64)..(64): n is a, c, g, or t
  misc_feature (102)..(131): n is a, c, g, or t
ggccgacatttacacccagcaattttttttggtattttagtagagacaggcttcaccatactgnccaggtggtcttgaactcctgacctcatgatctaccannnnnnnnnnnnnnnnnnnnnnnnnnnnnngcatgagccaccatgtccggcccaagtaaacattatttttacagaaacgtatggctagcggtatcatcatagagcatctgagtacctcacatgtgaaaagtatgggctgaaagagagcacggctaggtgagagtacctattcttatcacttattaggctctatgaccttgaccaaatcacatacctgcttcaggcctaagatggttctttc

SEQ ID NO: 157036 - DNA, 529 bp, Homo Sapiens
  misc_feature (300)..(315): n is a, c, g, or t
tagaggatctccggcgacattttacactaagtctcaagatccagacattctaatttaagtcacaccagtaccccatcaaccacacaataagtagtaatgaaaaataaagttaaaaagacaaaccagggtaaaagtcaggctgagaaatgaaagctttactagggacaaaaagtaacagaagtgacatcaattaaaatgatgattctgaactccatattgtactttcaaacagttcctttatgcaaaataactaccatgtagtttatcaatcattttgaattgtgtccctcaacagagtannnnnnnnnnnnnnnntgtgtgtgtgtattttttttcttggaaacactctgagacttttttattgacaattatacttgtcccggctatgggtattaatatcactttaatcttatcctggatcctgggaatctataaaggaagaacccaggtttcttgctgggaaacgataagcactgctcagttatttgtgactttctttttattaatatattttcccaaatagaacaga

SEQ ID NO: 157037 - DNA, 373 bp, Homo Sapiens
gctgcctgaggatcctgtgccgacattttacagggatactttggagtaagtcattgttaggtactttcatcattgtggaagcagagtggctgacgcacacctagacagtggagcagcttgggctgtgtggtgtagacatacggtggagcagctgggctgtgtggtgtagacagactgtggagcagctgggctgtgtggtgtagacagtggagcagctgggctgtgtggtgtagacagtggagcagctgggctgtgtggtgtagacagtggagcagctgggctgtgtggtgtagacagtggagcagctgggctgtgtggtgtagacaatgggcagctgggcggtgtggtgtaaatgtgcgcacggatcctcaag

SEQ ID NO: 157038 - DNA, 313 bp, Homo Sapiens
tagaggatcctgtgaggcaggacacttgccacagagagcattgggcagccaggttgggcactgaattggagcccctgccgtgccctggactgggagcccagccactctgcctggcctcattcctgccctctctcaggaaaacgaggggctgccctcctgcccaccagcgctgaccaacagcagctgtatctttgctacttaaaccttcttgaggcgagagccctttgtccccgggctgcgatccctgcctggctgcaatgctgcccacttctatgtctcgggctccccactcatcactcccagggttctgggc

SEQ ID NO: 157039 - DNA, 531 bp, Homo Sapiens
ctggcggtcgacatggtggtccatggccaacctctgggtggcaggtaagtcgtcaggatgtctgactcgtagctgttgttgttcagcacgccgtccagacccttgtcattccggttgagctctgccgagatgaaggggcaatgttacctgtttatgatgatgtcgcaggaaagcactgtctgcccgaccctgaggataaacatatttcttttcattccagattctagaaagaataagaagttcaatgataaaactcaattttaaacagaggacaagcagaaatgattgccattccactccctcctttaaaagatcagctctccgagtctccccagcacctggtcttggtatcgtaacagcagaaccccgctgcaaggattctgtcctgggagtatctcccctaataattctgttaaggcttgattttgagctaacacgaatttgacacacctctcagtcccaccaggaatagtatcatttgatgaccacagttcctgctcccgggatcctctagatcacctcagcatcact

SEQ ID NO: 157040 - DNA, 220 bp, Homo Sapiens
atctagaggatccttggaggcaggacactggtcccacctccgctcattgacagacactggccccgcctctgttcattgagactgtccctgcctctgctcgttgacagacactaaccccgcctctgctcattgacagacactaactccgcctctgctcattgacagacgctggccccgcctctgctcattgacagacactggtcccgcctccgctcattga

SEQ ID NO: 157041 - DNA, 558 bp, Homo Sapiens
cgcattgttaatggtgcctacaagcatgaggacctgcagacggatgagtccagcatggatgacaggcatcctcggcggcagctctgcgggggcaaccaggctgccacagaaaggatcattctgtttggccgcgagttgcaggcattgagtgagcagttgggccgggagtacggcaagaatttggcccacacagagatgctgcaggatgccttcagcctgctggcatactcagacccctggagctgcccagttggccagcagcttgaccccatccagagggaacctgtgtgtgctgccctcaacagcgccattttagagtcccagaacctgccaaagcagccccctctgatgctcgccctgggccaggcatctgagtgtctccggctcatggcccgagcaggcctgggttcttgctcctttgccagagttgatgactacttgcactagctgactgtgctgctggctctggctggccctccactggccccagggctggagctgcctgccctccataggcaactgctgcaggactaggaaccataacagtgtcctgcctcc

SEQ ID NO: 157042 - DNA, 229 bp, Homo Sapiens
tgtgatctaccgatccttaggaggcaggacactggcgtctgaattttaatgtaatctgcccctccaccctgttctccagacgtctccagtttatctcctgatgcagtcagggcgaccccatgtcctctgtgctaccactaatgtgtgccagggacgataaattgtgccttgtaataacactccccgatgggttaattgaccctgctctgacgggcagtccctgctggcc

SEQ ID NO: 157043 - DNA, 443 bp, Homo Sapiens
acacagtgagagttgattactgcaccaccagctgaggacccaatccaagacactgagttcgctccactcagtgagggacggagcccagtgtcctagcgcccaggccctggcacattcagttgagtgcagcaccctgctaccaggaggtctgtgcaacaggtgcaccaaaggcatgagatggcagccgcgagggggtctgcaggcacacaggaatcacgcccaggatgtattgagctcctggggccttccgagacggaagcagcaacttgaggcctgagggcaggaggggccttctgctgggaagagagttgtgtgtgagacccagagagcactggtggcacaagcaggtggaaccatcagcaacaaggacacccgcgggacacccagtgcaggcagcccccacacggtgttgtcccactcagtgtactgggctcccagggtac

SEQ ID NO: 157044 - DNA, 286 bp, Homo Sapiens
  misc_feature (63)..(63): n is a, c, g, or t
tggaggctgggagcggattttcagagtcggcacagcctccctgtgtcagcagagggcgcaggnacctggctgagtaagcatgccgtgcgtctttgaaagagccggtggcaaccttattctgagacaagatatttgcccggtggccttcctggtcagttaacttccacttttgccctggccttttccagtgtgggaagccccatgctccccctcactgggaattatttctgggtggtgtgcatccaatcctgaaagtgtcggggaggagggagggcaacagacggga

SEQ ID NO: 157045 - DNA, 229 bp, Homo Sapiens
gattgtctcattctttcgtcagctgactgaccagagacaggctcttagctgcacctcccagttcagcctccctgcctcccagtcatcctccagctgctgtttgggtaccctctaccactagagtactagtgccctactgccaactgcctccagtagaatatcaagttccaccaaagcaaggatttttgtttgctttatccccaatctcaagatcctgctagatcaccca

SEQ ID NO: 157046 - DNA, 334 bp, Homo Sapiens
gcagggcaattacgttcggacccaggcctgtctctgaagggtggattgtcccagcaaggcctgaagccctccctcaaggtggagtcgcagaaccacttcagctccttcaagtacagcggcaacgcggtggtggagagctactcggtgctgggcaactgccggccctccgacccttacagcatgaacagcgtgtactcctaccactcctactatgcacagcccagcctgacctccgtcaatggcttccactccaagtacgctctcccgtcttttagctactatggctttccatccagcaatcccgtcttggcctctcagtgtcctgctcccacgg

SEQ ID NO: 157047 - DNA, 493 bp, Homo Sapiens
cacgactccccccccagagctcctgttaagccccgagggcaggatgtcacaccccggctgcccggagctggggtcgctctggggatgagccccagctggtgttaatgaggcccaggcccggcgggccagctaagagagccagatgccagcaaggagcaggcgcttcatgccctcaagtctggggctggtgagccaccccagccctgcaaggccaagccagtgaccctccccactgaccgagcccagaccagagaggaccatggctcctagagaccaccaagcctttgtgggactgggccagtgtcgtttgtttgacaccaacctagtggccatttctctccatttccacagccactatctggtcccaagacaccataatcgctcacgtgggcagctgcagccacctcctccccacttcctctgttgctttcctgaaatccatccacccaccctgcattctggcaacctcacccagatcctctaatcaccaaat

SEQ ID NO: 157048 - DNA, 349 bp, Homo Sapiens
gacttccagggccagaccctgggttggtctggttctgccctagagtgacatgtttaataagtgacgactgtaagtgggtgacccagacctacagaagggagcagacaggcagaagatgaagacaggtggcactgatacagcagcgtgtctatattatatggaatttccctaggaaaaaatgaagttggcccccaatccctgtttctccatcacctccattgccccatgaactcctgtctgctctttaattacacattgtggatgtttggcctgggatacttcattgcccaggacagatctttgagtacagagtgagctgaccctaccacaccgagtcagcttagatact

SEQ ID NO: 157049 - DNA, 547 bp, Homo Sapiens
gccaggcctctcacacttacgccattgaggctggccagggccttcacgcagtgctcgtccctgtcctggtcgtagttgatgacggcatgctgcttgtccacgctgcgggactggagagacacacaggccagccctcaggtgctccaggggaggaggtgacacccaagaggcagaggcacccctgctccatcccctgccccagcacaacaccagcagtggcccccaggcctctgaccacagagctgtgcccaccctgtctccagagcaggattcgccaagacgccagggccacgtcccccaccctctgctgctgccccaggcctcccctcatgaccgccctccccagagatgctccccgctgggccgtgggagtgctgggagccctctggtcatctggcacacgctgctccctcccaaggtcaggtggcggcagccaggctggcggtgagggggcttgtctcaagggagccctcccccactcctggcccagccccacacggacacacacaactctcagccagtgtcctgcctcccgggatcctctaga

SEQ ID NO: 157050 - DNA, 510 bp, Homo Sapiens
ttgacactgtgggaggcaggacactgtgcggaagtggagacgactgatctctaggaacttctccttggatgacgctatgaagggcaccatggcctctcctctgagctggcagacatctgtcagagagatctctggcccagggtctggaatgccagggacacgggtgctctgaaactcaggctcgcttaggtcctcggtctctatgctggattcagaagctaggatagctcgttcccgaggttcagcaccctcctccatgctgctgctgaagggcccagggctgagaggaccaggacttgggggtgcatgaggcaaaccccaagtgtggccacacaatgcaaggagaaatggggtgatgtctatttcttgtagtagctcctcacaggcatctaccgctgtcagcaaatcctgggaggtcacactctgtgcttgctgcaaggttgcggaatagcccacggacatagcaccgctgtgcatgctcctgcagcaggggacagtggttagctgtct

SEQ ID NO: 157051 - DNA, 171 bp, Homo Sapiens
ggccagacacctgccgtatattactgtgcgaaatattttgggggccacaagcactggggccaggcaccctggtcagtcgtctcctcagcatccccgaccagccccaagtcttcccgctgaggagacagtgaccaggtgccacgccccagtgcctatggtgtatacctctgc

SEQ ID NO: 157052 - DNA, 199 bp, Homo Sapiens
  misc_feature (24)..(24): n is a, c, g, or t
tacgaaattcgaagcgtcaggtanccctgggaaaggcacaggacacatggccggcaaaagcttcagaaaacaaaactgctttccacctaaggagcctcatttcatccagtagtgctggaaggagcctcccgcgccatttctgcagtgtcctgcctcccacagtgtcctgcctccaaaggcatcctctagagtcacagca

SEQ ID NO: 157053 - DNA, 527 bp, Homo Sapiens
gccgagagaagagttttcagagggttggggtgggggaagtgagcacaggactgttgctcagttcggtgactgatttccgtctccacttagcagtcacttcccaccgagttaatcatactgccagtctggaaggaagggaggagtgcaactggccaaggaggtgagtaatcttgcctctaaaggaggaactccgaatttgagcacccaaagtacctcgcagctttacccagaccctagcatgggaatttatgaagagcgcagggggtgaggagacctcctcctggtatggagtgagggatatatacatatactcactctccacttgttccccttacacacacacggagacacgcaacggctgcttttacggagtagcttagaccgcaccgacctgtccccttcctgctccggtggcgccaccccagctcgattcccgcgtgcgtcccctgcccgcgcccggctgccgcatgactctgccgccttgctcccgacactaggctcagtgccagcctccgagatcctctaga

SEQ ID NO: 157054 - DNA, 287 bp, Homo Sapiens
  misc_feature (68)..(68): n is a, c, g, or t
ctagaggatctgcgggaggcaggactggagtctgggggattctaccttttctgctcattccaggctgngtcttgctttcatctcactgctcccttccataaatatttgtttctcttcagggtaaaggatttagaggataaacttcactctgtgcagctaaccaggaagaaggaagaggaaacatttaagaggaagcatgaggagctcgaccgtctggccagggagaaggatgcagtgctggtggcggtgaagggagcccacgtggagcagctgcaggagctgcagac

SEQ ID NO: 157055 - DNA, 445 bp, Homo Sapiens
  misc_feature (53)..(53): n is a, c, g, or t
tccctgtgaggcaggacactgggatcgttaccactacagtgctagagtcaggnacccccgcacctatgaccggagtgtattggtgtgatgcagagtatgacgcatacaggagagagcactctgccttcggggacaggcccgagaaacgtgacaacaactggaggtacgatcctcgcttcacggggagttttgacgatgaccccgatccgcacagagacccttatggggaagaggaggaccggcgcagcgtccacagcgagcactcggcacggagcctgcacagcgcacacagcctggccagccgccgcagcagcctcagctcccactcgcaccagagtcagatttacagaagccacaatgtggctgccggttcctacgaggccccgcttcctccaggctcctttcacggcgattttgcctacggcacctaccgcagcaatttcag

SEQ ID NO: 157056 - DNA, 160 bp, Homo Sapiens
gctttgaggcaggacactgtgggcggcaggtatgctcacagtggaccctccagacccagattgtgtctcactgtggcatccttagttgaagctcctgcctttcggcagcctctccaggcccaggtcctcctgcctcccagtggcctctttcggcccagcc

SEQ ID NO: 157057 - DNA, 159 bp, Homo Sapiens
cggtagacagaacaccacagatgctaacatactgctatctcgtcagatgcaggcagcgcccagctcacccctgcggagccgctgacctgcaccagtcctgagaattctagtgccgggtacgttgccgggaacatacgagcaacttaggacgtgaacaag

SEQ ID NO: 157058 - DNA, 222 bp, Homo Sapiens
ctttatcccttccttacctccccagagtcataggaaaagagatcacagggcatgtgtgctccagtcagacactgggaatgggaagggaatggaggccactctgagaccaagctcacaacagggtagagctgaaaggggaagcactctaggccttcttgaatagatagtgccttcccagtttagagcacaccagtcccagtgtcctgcctcataagggatcct

SEQ ID NO: 157059 - DNA, 358 bp, Homo Sapiens
caatcactatggagaacgtttctagggttaccagcccaatttcgacagatggaatggcagaggagcttacgatggacggtgttgcaggcgagcattcccaaatcccaaatggctccagaagtcatgaacctctgtctgtggattctgtgagcaacaaccttgcagcagacgctgtagtacatggtggtgtgatacctatgcatgggaatggcctggagctccctgtggtcatggagacagaccacattgcaagtcgggtcaacggcatgtctgacagtgccactcagtgactccattcacactgtgtccatgagcaccaactctgtaagcgtgcctctctacctcacacagcctgccg

SEQ ID NO: 157060 - DNA, 288 bp, Homo Sapiens
tagggcaggacactggacctggagttataagctcccaggatatacaagatgtgctggatgcaaacaagtcattgcctgaatcctcactgagcgacctgcccagtgacaatttcacagattccttggtgtctttctccgctgagattttgtcacggacactatgtgaaccccttgtggcgtctctctggatgaaactggggaacacgggggccatgagaaggtgtgtgaagctaacagtcgctcttgagactttttgaatgtgaattcccccctcaccttctcatggcc

SEQ ID NO: 157061 - DNA, 418 bp, Homo Sapiens
ctgcttccggagcctgtggatggccctggcattggcctgggtctgggagacgcacaccgtcaggacaaggcttgggtgggaaggggattcgtggtcagttgcccctggggccacaggcgcctctccctgacttcctctctccccacctcaatctctacaatacgcggtactggggtcttctcactgcacactgctgtatctgaggatgggaccctcctctccttcctcgcagagcccctcatcccctcccctctggcacagcaataccaatagctcagcagctgcagccacccagacacggtgcttccccagtgatcctgcaatccccatggcagccccagagggtgggcccaggaggttcctgcttttcagagccctgcttcctggctttcgcgtctgctcctgttaggatgctgtc

SEQ ID NO: 157062 - DNA, 291 bp, Homo Sapiens
cggctgtacagcagcaattggaagagaccagtgaaattcgatctgacttggagcagttagaccacgaggttaaggaggctcagacactgtgcgatgaactctcagtgcttattggtgagcagtacctcaaggatgaactgaagaagcgtttggagacagttgccctgcctctccaaggttttagaagaccttgcagccgatcgcattaacagactccaggcagctcttgccagcacccagcagttccagcaaatgtttgatgagttgagacctggttaggatgcttagggt

SEQ ID NO: 157063 - DNA, 420 bp, Homo Sapiens
acaaagtatgttcaacttcttcttatgacccactatcattcaatgttagagaaaatctaggcactaagtaaaagcatttcagatcatcactttgtaaacagccagagtagttcttctaatttctgaaacaatcacctgtaattcagcaccaaaaaaacacacaaaggaataaaaggtaaggaaaaaccatatgaacataaggtgcccttgaaaagtactggcatggaaaagacttgaagattatataacaagactaatccatattagagaatcaaaaaggagattaaactcccaaagatacgttcagaagaaaaactactatgaactaaattatccttccttttcatattgttcatgcaatatacacacatgcacaactttcccgcactttcacctggttaggatgcttaaggtctgtaa

SEQ ID NO: 157064 - DNA, 234 bp, Homo Sapiens
  misc_feature (176)..(189): n is a, c, g, or t
cctgttaagcatcctaaccagaccccaaagcacaatcaatcttgtttctatgtacataaataaggaaactctgcttaacatatgggctcattaatcaagtatcaacactgaactcctccacagtgagggcttcgtgcttcctagaggtgaacagctttctatcatcagggataaannnnnnnnnnnnnnaaaaacagggtctggctctgttgcccaggctggaaggtcagtgac

SEQ ID NO: 157065 - DNA, 291 bp, Homo Sapiens
taatgtgttcttaactgaatgtcccaaaccctttgtagcaaaagagaaatgaaagagaaacctaaataacctttcttcgtctttcctggaaaccccgctaaactagattctcaatgtcattttgtgtcctgagacttacatgataagaactttgtaataaacccagtaaagagctccctgaatttagactgcctcatttggcaaacagctaaagacccaggctgtgtcctcctacaaaggctgaggatgaagactgttactcctggtgtacctgttaggatgcttagatct

SEQ ID NO: 157066 - DNA, 144 bp, Homo Sapiens
tgagggtacagaggatcccgacagcagatttcttaacagcaacaagagttgctagaaaataattaaattttagctttaaaatacagatagaaagtaattatcaatctaacatctctataaagtatcacttaagagtaatggcaa

SEQ ID NO: 157067 - DNA, 254 bp, Homo Sapiens
ccacctgaccatgagtcagctgcttaaccattctttgccacagtttccttgtctatgaaaagggaaatggctcccacctcaaaaagttgttaacattaaattcaatcatgtattcaaagtcctgagcagaatgtctggccatgactgggacttaacagatgttagcatttattattagtatctgtcagtcttgaattgttctcttcccttggctttcatgacattccacactctcctggttttctcttacctct

SEQ ID NO: 157068 - DNA, 341 bp, Homo Sapiens
ccagatgggactgccttgtctggaggctttgttcatctcgaaaggacaacacacttccacactgtcttgtgagccctccccacttccactacttcagttgtaaatcaagtgtgtggatctcaaagggtgctatttatcttaatataggaatacatttctagggcttccttcaagcccactctcttcaccctattttttcttatcttaaattgagagaaagagaattaatcttatactttgtcaaaacattttctaccatatttccagatgacatctgcgcttgaagagtcaaagaatctgtgtctaatatcctggttaggtgcctgtcgagatcctgctag

SEQ ID NO: 157069 - DNA, 237 bp, Homo Sapiens
gagtggctgagtggcgttatggggcctgcccgactgtggtatgatatgctgggtgtccctgaagatggcagtgggtttgactatggcttcaaactgagaaagacagaacatgaacctgtgataaaatctagaatgatagaggaatttaggaaacttgaggaaaacaatggcactgatcttctggctgatgaaaacttcctgatggtgacacagctgcattgtacaggatgatatcat

SEQ ID NO: 157070 - DNA, 232 bp, Homo Sapiens
gcatcggttagcatcctaacagcagaacctggcgtggtatcctgaacagcatttgtttatttgcacacctggtgagctttgtgattagtaaattcagatgcctgggaggccaccagcggctctgctgaggtataacccagacatgatagctcatgttttcttcctgatccttctctcttcacacagtcccatgaccagagcggttcctcctactcctgtcctactccagccc

SEQ ID NO: 157071 - DNA, 376 bp, Homo Sapiens
  misc_feature (139)..(155): n is a, c, g, or t
tcccagctaacttcgggaggctgaaggtatggagagaattgcttgtaacctgggaaggcggaggtttcacgtgaggcccgggttattgcccctgcacacttcagccctgaggccacagaagtgagaatcccgttcctcnnnnnnnnnnnnnnnnngaacctttaatctaagggcaaacataaccccaatatatccaaatttatgagatgtaaataagcaacactcaaaagtttttagctttggattaagaaaaagggaggctcaaatcaataacttaagtttctacctgaggaatctgaggagcaggggaagccaagcacagtggctctacacctgtaatccctactactttgggaggctggttaggatgcttcca

SEQ ID NO: 157072 - DNA, 246 bp, Homo Sapiens
  misc_feature (97)..(97): n is a, c, g, or t
ctgtgtccaattcctcctggagctctggtccagctttttccaagagggacttagaaagaggccctctactaagcacgagatccaagggaacggagtntgacaacaacatcggtcttagcattctgcacaccctctttcaccaacagcatctgcagctcccgggacacagctcctttcccatatgtttccagccgctgctgctgtgtactgcggcagcttatctgtaggatcttaggatctctagat

SEQ ID NO: 157073 - DNA, 489 bp, Homo Sapiens
gaagcatcctaaccaggagagtaattttctcccaaacactagtattattatatacctcctttctagcagataggcacgtgttaaactagcaatcattagtttagaaaccattaaacatcagaagtgcacattacttaaattgggaatgtttgaaattaccttttaaatctataagcaatttggttgttgcatatttctaagccttgttattgatatcaatagccaactaaaggagggaggacatacattagtgagtgttgataggactagaataaatttttgtgagcctgctttaaaaattttgttttaaggttaatatgaccctcagacatattaaacaggtaaaatttatataaacttaatagtagccataaaatagactcctgcaaacttctgggtttttgcagatctttataataggttctgaaaaagctgtttttgggggaagttttcatgcattctagacaagaccagtaatgtcagaaagca

SEQ ID NO: 157074 - DNA, 450 bp, Homo Sapiens
  misc_feature (224)..(242): n is a, c, g, or t
gcatccctaaccaggactttcttctttttgctctcgaccacttagctaaacacgactatatcccggccagcaggccccagcgccgttagtctccagctgactctgtgggttggtcttaaagcaaattctgttttgtggactgcctggcaattttttagctagctgtaatgataaaaagggagtattaatctattctgaatcatatctagttgaatgcatgtttnnnnnnnnnnnnnnnnnnngcttgctccaatctacctgcagtgactgatgcaaaaccatcatatgcaaaatccaaaggaatggaaacgtattttacaacttgtatcactaatgcactgttgtaatgtgtgcaaagtcttacagttataagtgttaaagtgaatttcttcatagagcatctgaaatatcttagatgattcttcaaccttttggggttgatgtgggttg

SEQ ID NO: 157075 - DNA, 353 bp, Homo Sapiens
  misc_feature (154)..(154): n is a, c, g, or t
ggatcgcttaagcatcctaaccagagatatatttttaagtaggaaaaagcaggcagaacagggaccgtacatattgttgttagtgtcagctcccaaatggatcttattttatctcagatcacagtccttgcaccatgtggcgtgctggcaccanatgtagagtaaaaaccatctatgtgggcattttttggcacaagaaaaatctcaatctgataccaataaatgtgtgttacagaatgtcagacttagagtaatcattgcaagttgagcccagataaaactattgcctctctaatgtgttttcttccttctagtgtatatcagcctcgtgtttggtatttcatatgattcgc

SEQ ID NO: 157076 - DNA, 246 bp, Homo Sapiens
gtcgatctacaggatgcttaatattatgatgaaggtagtaaagcaaattagcttaaccatgactgtcacattattatttctaattggtttattattttgttctccctgcctgccctccaaagctcccttgtgtatttttgtcagcagtcaacctgggaggtagcagctgtttgggttttaggcttagaagtaggagggaattttccccctgtgggtgtggttggtttggtttttattttctttttc

SEQ ID NO: 157077 - DNA, 344 bp, Homo Sapiens
catccctaaccaggtcctcaaaagtccaaatcccaaggcctggcttaggggaaattgcagactattgttcacccaaaggagggcagtcagaggtgacaggcaagacctgcaaccacagtctggtcaccctccctcactgggattatcccaaccaaatgccagctgattctatttcactccatgtagaaagctcgagaattttgtcagggaattcaaccttgagttgcccgtggtccagcactactaaaggttgatttgaggcaacaaatcctcaccagtgtcaagggcatgtcaattacccattcctttgcattattccaggtgaaagttacataaagtgcagg

SEQ ID NO: 157078 - DNA, 265 bp, Homo Sapiens
  misc_feature (168)..(168): n is a, c, g, or t
gcataaattggaggttttaattttagggcagttacctgaagtgaaatataccaacaatttcttgtgttctttaaattcctagttaggtgaatatttttgaaggtccccttttgaataaagaggggaatggacaccacatttcaggtcttctcgaagtgtggaaggcanagagagcatcagtgagctgatggtggattgcttacatcggattccattggtatgaatttcgcaaactggaaatctaagcgccagggtggggttaggg

SEQ ID NO: 157079 - DNA, 596 bp, Homo Sapiens
acagcattccctaaccagcatgtaatatacctagctgcctttggagaggcctcttggcgctctcaggaataattaccgaaagagcagctgtctgtcagcctcctccagagccgtcggcttgggctgttgtcaacctgttgttggaggagttcccagagcagcagacttaactgccattgacatttataactcgaaagccatatcacagatgactttacattctttgtaatcctttaaatagccttcagcgtataaagcacgtggcctctacacgctttctccaccttagagagtgaggaaatagttggatcatcctgaaggtggtgaagtggctcactgttctcccccacccaggttataaatcatcatctctcttctgacttaggtaggaagaagttgtcctggctttatgcttagatttatgtgagatcatacgaagtcagtttagactgggggaagagcattagcttctaagcccaaatgagcctttacctctagcagccacagagcctgtgataagagggtgtccctgggaattggatgtcaggaaacgtttctcacatgccagctggatcttgtgtctggttaggatgctg

SEQ ID NO: 157080 - DNA, 323 bp, Homo Sapiens
gatggacacataggtcctcctcctaattttctctgttcgcgcccacgcagaactacaatagttttttataatacaccgcaggtaatctggggacggaagacgcacacacatcgattggaaaaagatcgaattaacgtctaaccccgacttagacctgatcttgactctgcctgcattggaccaaaggcagctgttgcaggatatgcgtatgtgtcatatgtcccaggatcgctatctcatgaatccccagcttggtggagacaaaagtcccttcctttctggccctggtctccccagcaccccctggtttagggagctgtcgc

SEQ ID NO: 157081 - DNA, 215 bp, Homo Sapiens
cttggaaaactttttatgatgaatttggttatgtatagcataaatgaacctctacactcaggattctcctgctgtagtctgaatgggttgtttgctacttacatggacatgggagagggtggcacctctcttttgaaagcccgagttctggcagctctgctagtctgatatgcttaccctcttccctgagatcctcgaacctggttagggagctg

SEQ ID NO: 157082 - DNA, 194 bp, Homo Sapiens
ggagctgaagcatcctaacagtagggtcacgctcttatgagaatctaatgcttcgcgactgatctgacaggaggcggcgctcagtctgtaatggttgctcacctccagctgtgcagcccagtacctaacaggccatggactgctactggtctgttgcctgggggttggggatccctggtataaagaggagaagg

SEQ ID NO: 157083 - DNA, 627 bp, Homo Sapiens
gtcgggtgactctgaggatcccgacagcatcctaaccagcagacaggtcttcctcctatttcacaggagaaatagaagccatcagatgggacctcctccaaagtcctggcaccaaacctcagcatgtacctggacccacatgtatcctcttttcctttgggattgaattagagaggtgccgctcgaaacccgctcctggatgggagtcttggctctatcagttatgcctctattctgtatgtttaacctcgccctcgtaggggcataaaacagcatttaaacaggatcaagctttccattttaaaactccatacactcccttaatttcatctcctcctccagctactggcccatgtctctccctcttcgtggctaaacgtctcaaaaaagtggatacactttctgtcaactcctaaacactcctcacgctcatttgggctctggtcctcccttcctcctcccacttcattggaactgcttctgccaaagaggatccctgagtcatcctgactggtaaccccaatggactctactcaatatgcaacatccttcacttcttagcagagtttgaaacagcctgactctcctcttctggcaacattcttttccctggttaggggatgctgt

SEQ ID NO: 157084 - DNA, 240 bp, Homo Sapiens
cggcaagcactaattgactttgtctctctagtttgcctcttcctcactgagggctttcgtacttttaaagtggtttccctatacatgtgtacatattaagtaggcccagatagaatagcaaaatctcaatacatccagatattttgttttctcagtagatgtaggttagtgcttctcaaactttaatgggcaagagaatcactctggacctggttagggatgtagagctcctgctagagt

SEQ ID NO: 157085 - DNA, 338 bp, Homo Sapiens
ggtcctgcagctctctctgatgggcttgtgaccccaacaggccggctgatggtgaccggcctgctgatgggcccaggcttggaggcaggcaggggtcggtccatgtggttccagatccggtgtttctccagctgggtcttagaggtgaatgcggcctcgcagaaggggcaggggaaggccaggcgatctgagatggcacccccttggcaccgctggtaatggtacttgagcccgtagatgctggggaactccagccagcaacctgagtttggacacttcaccctcgagtgtgccttgaactcatccttccagtcgttatgcagagagcgcaggggata

SEQ ID NO: 157086 - DNA, 136 bp, Homo Sapiens
gcctctctctgatgaccaaggctcaccagtctccaaggacactcaaaaacctggtggtccttacaatgaccaacatggaccctgtggacacagccacgtattactgtgcacggttctatttgaacggctttgacta

SEQ ID NO: 157087 - DNA, 660 bp, Homo Sapiens
  misc_feature (618)..(618): n is a, c, g, or t
cctgagctctctctgatgggtgactgacatggtaggcaggaaagccaaagaactcaggctctggagaatgagcttttagctgcaccctaggtcagcaaggccgctgagtgctggcacagcaggagtgtgcagtttcagtccatgtagacatttgctctgtgggctcttgtctgctgtggcttcactggatgctagggtggcagagtaggtgcacacttggacaggtctctcctgctgggagagcctgactgaaatggggactctcagaagcagtcccaagcagccaaatcacagaacacacaaagcaagaaccgtatgaagcacctggggtcgaagaagacacctgcgattctgcaagccatggcagtcccttcactacttatccctatagatgccgagcggccacagacatgaaatgtggtctgataagaagagttccaacagcaaagatggctgccctctggctggtgcaaagacttcagagaaaacaaacagcaggctgagatagcaggactagagtgggagctgccaacaggtggcaccccctcagcagtgttctgggtcctgggaatgcccacgcccaggagctaacctccctcctttctaaaaaaggtaacncagtcagttgaggggtgacatcatcagagagagcgcaggacc

SEQ ID NO: 157088 - DNA, 425 bp, Homo Sapiens
ttggtagaaaacaaggagcttctctctgtgtgagtatgcactagagggtactgttggtaggccagtcttctggtcagctggtccagcaacagctgaaactttcagaccctcttcaggtagatgactgtctgctaagtcctgtgggtacaaaatactaggcttttctctttgtgagtaagaactagactgtactgctggtatctcagtcttctggtcagctggtccaggagtggctgaaactttagtaagagtctcttcagtttgatgactgtctgcgaactcttgttggtaaaaaataccaggcttctctctatgtgagtggggagtagagagtactgttgctgtcccagtcttctggtcagctggtccagacacagctgagactcttcagagcctgatcagttagatgaccatcagagaggctg

SEQ ID NO: 157089 - DNA, 107 bp, Homo Sapiens
atttaaattggagctttattttcttgggagggagggtctggcttgtcatccaggctgtagtgaaggggcttgtcataactcatggtttccacaacctccggggctga

SEQ ID NO: 157090 - DNA, 576 bp, Homo Sapiens
tgtgctttgggacggcgggtggggttgttctaacatcctcggtgacatgtgcccggttttgagaactcctggctctgcggctctcagacttcataaaacccatgtggttgtggcaggcagtctgtcatagctggtctgtgcagtgtggtccaatgcccggcaggcagggcttgaactcctcttcctctgtgatccgctctggcaaaataaaccagccaggtctggggtggcacctgccccgcactgaccctcaggcctgccgtgggctgagcacagggtaagcaggtggatccacgctctctctggccctctcgctcccttctccctgctccatcacacttcccattgaagaggaggatgagacgctcagtattttacttctcgccgtccaaagcacagctgtgctttgggacggcgatcctgggtaccacgcgggccccgagtgcacctgtgacgatgtggacgaatgccggaaccgtccttctgcggtgccacgccgtgtgccagaacctgcccggctcctccagtagctctgtgaccaggttacgaggggccgggatggcgtcactgcgtgaa

SEQ ID NO: 157091 - DNA, 615 bp, Homo Sapiens
caggagcttatggtgcatgttgtgccaacacacgctggtataatttgtattttaagtagagacaaggtttctccattttggtcaggctggccttgaactcctgacctcaggtgacccacctgccttgactccctaagtgcggggattacaggtgtgagccaccgcggctggctggttcttcatttttttcacagtacctttttaaacaagtgaaaacattttacaaacaatgggtctatatttttatggctagtccttgtgtgtctttgtaaatgtaaaaacttacaactctaaagaatcaaatgtcatttgaaaataatagagtgttatatagatggttggtgaaactaaccagtattgatccttctcatcacgatgacatttgtagccagaattatttgattgtttggagaatgtgttcctgaaatgcctcagatgtaccagagtgagacaagtcatttatcttcctgctggaggcatggggagataacctctggctcaggtgcagagtgctcaccactcccactgaatgtgctgctttcatcccctcttccttcacctttgtctctgaggtgctccccacaccccttccacatgcatgcaccgggggatcct

SEQ ID NO: 157092 - DNA, 461 bp, Homo Sapiens
acttcttcaccctactccctacagtgcagatctcccaaggggcacagtggcctgccgcctcacccacagaagccaggcactcgggctcaggagacaagcaggtccaggtgtaactccctcccccaccgcctggtaaaggtgcgatagaagcccatggtacaagcatctgggtcctcatccataagatggggatggctccatccactccagggatgtcagctaaaatgaaacacagcatccgaccacagggagccgggaataaacgaccgcagcctcacttccttttctggccctgtggagatgctgctctgcccacctgagtcggcttctgtcttcttgccaggccctcgaaagtgtacctccctttccagatcctgctcaagctccattcaccccaagaagcctcccttcccctgcgttcgggagttatcatgcggacataccccaggtcagatgccaca

SEQ ID NO: 157093 - DNA, 489 bp, Homo Sapiens
ggactaaaaagaagagggggtatgtgaatatcagaaaatgggctcagtaaggcagaggtaagaggaggggtcatcgtatggccttgtaagaaacaggaaagactttgccttgatttctgatgatgcgttaacactttatctcttctacttttctttcccatgagtatttggttactctctctgactcccacaagcccccaaaatggtactcaggaataaaataatttatcaaacacgggtaacgactactgctagctaccaggatacaaaatctattaaacatggccatcgagaggtgggacagtatcatgaaaaccttctagattatacttataataagccaacctatttctaactcagtaattttttaaattgatttttccctgaatcataagagtaatgatacaagagaaactctctcttctccaacccaatcaatcaggacagtggtaggatcatccagggtgtgggcagactagagattagcca

SEQ ID NO: 157094 - DNA, 469 bp, Homo Sapiens
gagctcggtacccttttccggtccccttttcctcaagggtattgagctaaggtaatctctgagggcccttcctgctccaaagcttaatggtgtgatacatgacataaactagctctgctaggcaggttcagtgaatgttttcctctgagagatgctcctgccttactgtttgacacctcttatatcatccgtttgtggctgtgattattcctaacacaattaggagaacaactcatgtgggagtagggagatcctccaagtatgggtatcaggaggtctgagttgtagtctcatcctcacatgacagataggaatgaactctagctctggcctgtttcttgactcttccctttaccccagccctttctggaagatgggacagtagaagtttggcagtatatgtttctgaaattccagaaacacagatgctattcgacagggggaaaggcaccgcaaacgatcctctaga

SEQ ID NO: 157095 - DNA, 481 bp, Homo Sapiens
  misc_feature (127)..(382): n is a, c, g, or t
atcttttttgcggtgcctttccactggtctatatgaaacgtgacataaggactacgtctgattcgattctgactccccagcacccaattaaatggcagccaatgtcattcttttttttggaaacaannnnnnnnnnnnnnnnnnnnnnnnnnnnnnnnnnnnnnnnnnnnnnnnnnnnnnnnnnnnnnnnnnnnnnnnnnnnnnnnnnnnnnnnnnnnnnnnnnnnnnnnnnnnnnnnnnnnnnnnnnnnnnnnnnnnnnnnnnnnnnnnnnnnnnnnnnnnnnnnnnnnnnnnnnnnnnnnnnnnnnnnnnnnnnnnnnnnnnnnnnnnnnnnnnnnnnnnnnnnnnnnnnnnnnnnnnnnnnnnnnnnnnnnnnnnnnnntgagccactgcgcctgtccatggatccttccaaagtcttcaaatctctcccacatccgggcttcatcctcccctgcctgtctccatgcctttccggtgt

SEQ ID NO: 157096 - DNA, 644 bp, Homo Sapiens
aggatctgtttgcggcgcctttcctaacggcagaatagtcttgcacaaaggtcttactttaagccaaaagaccggggttcaaatcttcactcttacgggttcaaatcttcactcttacttaacttactatacctcctacctttccaggcctcagtttcttcagctatcaaacagagctgagaggaccaaatgatttttaaggtcccttctatgtcccaggattcactagttccctctcattaatcagcacagaggcttggaacaaaactccaggatccatgtactaccttcaaacaacaggggtgtgttgtcagccaggccacttgggtcccagctcacctaggccagaggaagcagcagttgccttgtccgcctccccagcgttcacgaaaggtggctgacctaaacccaggacagagacttggggccactaccactctcatgatctattcttagcccagcctctcagggtgggtgaggaaggaaggtggaccaaggacagaaggacttttttctaggttccaatggattctcaggcaccacccccaggcctgtcactaaaatcttcactgggactgataaggaagatcttgccagagccaagacccgtcaggcaattgaggaagctcgctgtgaaggaacag

SEQ ID NO: 157097 - DNA, 395 bp, Homo Sapiens
agcttaacatagcagggccactgttttctgggctgggttttacccattgctgctggcacaggatgctggctcaggcccagtgccctcagtggatggaaccttctgcacagttgcaaagcactgtccctaccccaagggactgagctccagataccacctgccccacaaccagacagcctgttcatggcctctgcagagcaggtctcctactttctgatcatcctggcggccaggtgctctgtggtctcctcactgaagtggccggtttttgttgcccttggttttagcatctgcctcatataaccccacttgccccctttgtctctcttcttgccaggggtcacgggcgtcagcggtccaggaaaggcgccgcaaaggatcctctagatcgcccc

SEQ ID NO: 157098 - DNA, 446 bp, Homo Sapiens
ttttgcggtgccctttccctggcatataataaatttatcagatagcagaaatattcagttaatgtaggagaatgcacagtcatcctaagcccatttttgctttcttgatatgtcttcctgttaaacatgatagaaattctcttttactggactccctggatgatgaagcacacatagctaggacaccacaagttattagactccttatgctatcagtgtcgtatgtgctagaaccgcctctggagagcaagatcctgggttacctcttggagacttccattgcccaacgatgccagaggtacccgtggagaatcacttgtgtagggtttggtattgactggggaaaactgtaggaaaggtttgagggtctgagattctcagccacacttctgtgtagtaattagtttaatggaaaggcgccgccaaagaatcctcgagatcgacct

SEQ ID NO: 157099 - DNA, 517 bp, Homo Sapiens
cgatctagaggatcccttttgcggtgcttttcctaagaacgctgtaaagaccagtggtgacagtgctggtaaagaagcactgaaaaagttaaggttctttcagagctaaaaggtgtgccctgttaaatgcacagtagtaacttgactgctctgtgttgtcagaggcaccacctgaagttagtccctcacagatgcttttctgcttttaccttagtacttctaacttgtcattttgaaggcacagagaatccccagtccttggagctcccccggctccacatttttgatgcagaggtatggttcaaggcattctatttaagacaggacatttcaggggcggcactgatggtctgtagaacttagaggcatggagaagagagggcctcatgggataaagggtttgccacaacccacatgcggtgctcccaatgttcattcaacagcagggctctttcagcactattctgaaatatcaccggcttttaaatcttttaaagctgaaacaatgtttcctagt

SEQ ID NO: 157100 - DNA, 138 bp, Homo Sapiens
gacctagaggatcttttgcggtgcttcctccagctcccatgctttatacttgaatctgagagcctgttttctgacttctctgtgtgcttacatccaaacaaatttaagttggttcagaaagcactttgaatactgtag

SEQ ID NO: 157101 - DNA, 359 bp, Homo Sapiens
ttttgcggtgcccttgcctgtcatgaaaggatgccatacgtcacaccaagcccttttgctgtgcccttcttacatatgacttcctttccattggcatttccaccccttccctcactgctacacacacaccttcagagacccctgttcaaccatggactgctctgcccctctccgtgtacagagccctctctctgttcttattctccgtagcatttatcaccttgcaaaagaccaaataacttatatgtattatgtgtattgtttgtagtttgtctctctctgcaagaacataagctccatgaggcagggatatttttctctttattcatcatatattacgccctagggaagcacccaaa

SEQ ID NO: 157102 - DNA, 177 bp, Homo Sapiens
tattgcggcgcctttcccagaccgagactgttagctacttccgtatttcaggctgattttgagacagtgaaatacatcaaggacaagttcgtggggtgtcccctagctcattttccctactctgtgaaccaagaacttttctcagcccctccagacctgacctactcctactttatt

SEQ ID NO: 157103 - DNA, 508 bp, Homo Sapiens
  misc_feature (69)..(77): n is a, c, g, or t
ttatcgacccaaagttgggctttcctcctcttaaagaagttcagtgaactacaagaatttgtggatttnnnnnnnnntatatttaacccaaagactcctagtgacctttgctggagctaacacagcatctcgtaagccagctctagaggatgtgaagacctccaggcctgagccaccttgctgtgcagcaatttactttcgttcattgcaccaggcttcatccctcttggcccacagcatccagggggtaacctcggaacaaaagtttgcttacactttcataacttcaaaaattacatcacacatgcatgtccagtgttaaactacaactgattacatgtactgtctaacgaaattgttgaatacttgctctgcttttctccctgttggccttactatccctgtttctaatttccttccatcctcgggtcataaaactttatacccagtggcctggcacaaaagtttcttttcttgtttccctagaaagcgccgcaaaggcatcctc

SEQ ID NO: 157104 - DNA, 415 bp, Homo Sapiens
gctgtgtctagaggatcttttgcggtgctttccctggttaactgccttattgtcagtttctgtagaagactgaagaacggtgatggcacccacgttacagggctgttcacgggaggtttaagtgagatcttacatgagaaaggcgcttagacaggtgccccaggtccagagtgtggggttggctgggagtcgtgtgcatctcctgccctgacccacctctgcaaacttgttccttgagtgcttgagtgaggcacacttgaccgtgcttatgtggttcccatggcaccatgatgtggggaatgtttcccaacaaggcaccttatcaagcgctctctctccactctgctgttcctaccacatatccctggggcaggtcacccctggcctttcttgtccactttcgaagacaggtctc

SEQ ID NO: 157105 - DNA, 356 bp, Homo Sapiens
ctcggtacccttttgcggtgccctttcctcaatagctccgaggccgaccccttgccctccacgtgccacttttcattcctacagctctgttctcagtaccttgcaagtaccaagcacatggcagacagggtaaaggccgggtttctgcatcaggtgtgtgctgtgagggcgcactgcagcatgtttgctgaagacaaaagcgattagggtctcctggtacccgagccctttgcagctcagcccccagcttgctgccgactccaggtctgctgcccctgtattcctggtcctgtcccgctgaggaacagtgcccgtgaacatgatacatgtcagcagattactgaaaaataataccc

SEQ ID NO: 157106 - DNA, 165 bp, Homo Sapiens
tgagatgcatggagtcaggtaagagagagtatcaggaagaaagttaagtatagggtgcctaaattaggattcctagaataatattatacaggtccacaatgctttatctgaaatcctgagccagctgtgttttgggattcaacatttttggagtttgggaaaggg

SEQ ID NO: 157107 - DNA, 430 bp, Homo Sapiens
cggtgccctttcccctaagccctagtctcagaccagcacagcctgccttcttcatatcagattcatcacagagttgatggtaaactaaatgtagagcaaaccaaaagtaaagaatttccttttcccttgacattctcctccaatggctctccactgactacaaggtaaatcccaaatccttagcaagccaatgagatcctcccattttcaagtctctccttccctcccagactagagccaccaaaagcagcagtgaactgggatgctcttgacttgaggtctgatgctccatctagcggtagagaacatcgccttgggatgggactgagaaacacgccaggtcagacgctgggagagccaacaacctgccaagatgagagtttgtcacctctagtcagatttggaaggcaccgcaaagaggtcctgtagg

SEQ ID NO: 157108 - DNA, 482 bp, Homo Sapiens
tgtgatctagaggatccggttttgcggtgcctttcccaaacaggccaggtctgggactgaaagaacagaagaggctgctgagagccagactgcaggagggaagctgtgggaggcaggagcaggggagagctttgagggccaggtagacctgcgtggtaaggaggctgagatgaggcaggacttggggatcagggccgaccgggccaggatggaagagctggtacaggcagaggaggcccaggaggagagggggagcagcagggatccagtggctgagctgccctcagatggagaggctgaaggcactgccgactttggaggcaactccagaggccaggcctgaggaggagctcacaggggagggagagtgaggcggcccagactagctgtggcctactgggcgtgcaatggggtggcctcacacacagcgtcaccaaaggccagggacctgagctgatggggggtcccagaccccaactaag

SEQ ID NO: 157109 - DNA, 639 bp, Homo Sapiens
ctagaggatccgtttgcggcgcttttcccagactctcatttaactccaggttgcactgtggacacagtccctcttgagcaggtacctccttgcagtggttgggacgtcctacttggctcatagttgggaagtgcatatgctggagctgaagcctcttgccttcccgggatagggcgtcctcacatcccctctgagaagttccccagcttccctctgttccccgtttccacacttagcgaggctcttgtccactgctacatcccccatagccagtccctcagccttgccactgcttatgctggtctggaaacaattcctagacttgtggggcatctggggaagttctccatctttttttagctggcatgacccaagtggtgtgggcagggctgtggattctatggtgtggctggaagccaggtagcctctctctactgtacatggaactcagcaacttctgagtcaagcaagatcttagctctgcaggtgtcttgccctgtccaaagttatggccacaccagtaccttttaactctagaagcccagtaagtgtattgtgggaccgcaaagatcattttctagacctgctgaatatgcctagaacgggtagggatggtttcacgctgtacctaggctgcaa

SEQ ID NO: 157110 - DNA, 215 bp, Homo Sapiens
agtacacaatttgacagtttttccactggtgcccatccttgcagcatggcattacattggcatctgtggaggctttgcattcatcctactgcagttggtgcttattacagcttttgcccattcctggaacaagaactggtaaggggcacataaccctaaagcgttttcctggggagtttctagtatactacatgaaagcaccgcaaatagctccg

SEQ ID NO: 157111 - DNA, 575 bp, Homo Sapiens
  misc_feature (412)..(412): n is a, c, g, or t
tgcagcagcacactggtactttcttggcgtgctatgttccatttttcggccatgccaggtggtttgtcaatgacggagaaactgaaagggccactgtttgggtgtccatccaggtcctctgcagtaacattcacatactctgcatcgtgacagattgtctgcacaggctctatcagtgtgggacagttgtcgttgatgtcttcaacattgataaggactgtgccagtgatggtttttctaggataatcttctgatatggccacaatctttacagtgtatgtgccattttgaacatatcaagattccaaatcaggaagttttgcaagtttaatttcagatgtgacagaatccacagagatccaattatctctatcttctaattttacatatcgttgcatgggctgggtagtcncagtgtcctcatccaaagcttgaaaatttcccattatttggcctttgcttgatctatccatgctctcgctaacataaattgagatgacgctgcttttaaaatgaatgccttctttcacatttttcacttgaccttgatgggaaaggcccgcaaaggatcctca

SEQ ID NO: 157112 - DNA, 411 bp, Homo Sapiens
cgagctcggtacccttttgcggtgccctttcccagactgtttttttcctagatgtgcctgctggagtctagggatagttggcatattgattggggccccacttgaaattccctccccaggcaagcttccttgacctgagttaaccttaaaacaaattaaattccatctcagatttaccatcgttgataattttctttctcctgcttagaaggaatggatgaagggaaggaaccgcagaagcagttggaaggagattgctgtagtttcatcacccagcttgtgaaccacttctggaaactccatgcatcccaacccaagaatgccttcttggcacctgcctgctctccaggactaactcatattgaagctactgtccatgctctggtggacatcatccatgctacaggatcc

SEQ ID NO: 157113 - DNA, 418 bp, Homo Sapiens
ctcaaacaatgcatcctttgttccacagcctcccagctgtgacagccatgataaaaatggagatgtttttatactctatgtgctgtttgtatactgacagcagcatggttattcgccaaataatcagagtatgttggcatttcttataaatacaagtgcttgggttatgacacgtaatcctgtgcaaggaacgacttggacggatggacaaacaatgtcttctttcccatgcagaggaaaaaagcctccttggctatttttcagcacactaacatctcttctgactaaaaggcagccaggagcatagctatgacatcagcccagccgaagcccagctctctccaaaaggacacagggaagtatttctttcctccatggcttgcaggaatgtgttcctgggggaaagggcaccgcaaaa

SEQ ID NO: 157114 - DNA, 170 bp, Homo Sapiens
atcaccttaggtgtttattgtttggcttccctgttactacgggagctctatagggcctcatctgtctacacatggctgcatctccagcatttagaagagtgtctggcacataatgagtgctaataaatggacgaaggatatacagacaggctgtggaaggcgccgcaaaa

SEQ ID NO: 157115 - DNA, 410 bp, Homo Sapiens
ttttgcggtgccctttcctggcagcgccggctcagttttctggaatgtttctccttgtcttgttagacttcgtgtccacatctagtaggacactggagaggtaccttcttggagtctgcgtagtttcttctatgggatcaaatgcctcctggcttttgtagggattactttaggagctgaattgtcagagggtttgacaaactagattgtagtttctttggtgatacgatttctccacattttcagtagtgacattctagcttcataacatgagttgggaaggtttctgcctcctgtttcctgaaatgtttatgtaggattagtattatttcttccttaaatgtttgctagaattcaccagtaaggcaatctggatctggagttttctttgtggaaagggcaccgcaaaa

SEQ ID NO: 157116 - DNA, 419 bp, Homo Sapiens
ccttgtgcggtgccctttccacagactcagccagtttgctgtgtcgaactttctcatctgcatcaactatttccatgactctttccttgaagaatttgttgaagacttcagaagtgatgctggctgctttcttcattaggttgagctccccatcctcctttacagcgatggtatatgccacaactgcactgatatctattttgtcaaagccttctttgttgaggcagtcattccagctcttcatgaactctccagggaatttgtctttgctgaacactccaatcttcttgccattcttgctttctttaatggcttcaatcattttgtcaaagctactcttattactttcattctgtaaggcagttgatttggcataaacatttcttcatcacacccactgatactacatgcatcaccgt

SEQ ID NO: 157117 - DNA, 442 bp, Homo Sapiens
  misc_feature (51)..(153): n is a, c, g, or t
  misc_feature (168)..(247): n is a, c, g, or t
ttttgcggtgccctttcctaccaatgtctgcaaatatcaatagtaagtgcnnnnnnnnnnnnnnnnnnnnnnnnnnnnnnnnnnnnnnnnnnnnnnnnnnnnnnnnnnnnnnnnnnnnnnnnnnnnnnnnnnnnnnnnnnnnnnnnnnnnnnnttttttagagagaannnnnnnnnnnnnnnnnnnnnnnnnnnnnnnnnnnnnnnnnnnnnnnnnnnnnnnnnnnnnnnnnnnnnnnnnnnnnnnngactgccacagtctactcaatactgaatacatttgttgaatgaatgaattaattaagagtaaatgaacatctctcctggatatttaggtagcatcttatatagaagtggagatgagttttagtgctccctaagtgctctccagctccagggttcctgactagcatgagaagggaaaggcagccacaataagctcc

SEQ ID NO: 157118 - DNA, 276 bp, Homo Sapiens
accttcggtgccctttcctgttcttagagctaaattacctgaaattagcatcaagatatatgctgtatgcttacctatatcaaaactatgttgtttaggtgccgggcacagtggctcacacctgtaatccagcactttgggagttcaagcgggcggatcgcctgagtcaggagttcaagacagcctgtcaacatggcaacccctctctactaaaatagaaaaataactggcattgtgtgcgcctgtagtccatgagcatgagcacaggagcggtca

SEQ ID NO: 157119 - DNA, 318 bp, Homo Sapiens
ctcggtaccccccctggtatccccaccctgggcagagccacttcgccacctggtggctggttcctggaactgcatgttccacctcatctctgggaagatgctgctcctgacatcttctcccaggacccaggcgtcccctccctgggtctataacctgtgtctgaaagcccgaatccagggtctctagttccactttgggtcacctatggtttggaattacctggggtgcccagctctcgccttcattcaatgtgtgttaactcagcaaatggttgttggcacctaccacataccaggggaggatcctctagagcgccg

SEQ ID NO: 157120 - DNA, 248 bp, Homo Sapiens
ctagaggatccttccctggtatcccaccccgtcagaggctcctccagccaacctgcacaaacgattccctcctcactgcccggcacacggcaccacctgatacatggctgttgtcatccccacaacaggggtcccaggcctgctctgtcacctgctcacagactctggcaaagctctgagggcagcaagggaaggccagtgagaaaggggcggcagtgggacccaggtgtgtcagagtagcccagggg

SEQ ID NO: 157121 - DNA, 336 bp, Homo Sapiens
gtagcgaataccgttagaaatagaaccgagtgtgagaaatcagagatggcctccccccatattaggccacgataccgacttatatattattcaggtatactagagatagttgaactcaggtcacagaaagttagagttataagaaactgctgagcaatttgttccattcatatccattgcttcagcttgtacagcatcaactgagaaggtgatctacgccatgcaccaccattccacattttcacctgcctctgggacaaaatcactgataccttgtggacacttcagttacaatgtgtccaagagattcatcaatagtgacgttcctcatgcata

SEQ ID NO: 157122 - DNA, 480 bp, Homo Sapiens
aatgaggagcatcaggtctgtgtggatataatgctgaatctgggtgttatcatatgctttttttctattctaatcttttattctttgttaaaaaatatggtcatgtttataaaatcacaacttctacatttaaagggtaggttgaccaattaaagcagcctttccaacctaagtgcatctggctaggtaattctctctgagctttattatttgttttagagcttagatcagagtttgacaatgtagtgtatatactaagatttcttaaagatttatctgtgtattccaaggtgtgcttatctgtgtaaaaaactcagcaagacatggcattgccacaggctatcaaacatttgaaatattcctttggagttattttctaggaattaggccacttttcaataattagatgactttgagctcttggagtcatctcctagaaccaactttggaatagagctgtctctgtgctcgtctaaccag

SEQ ID NO: 157123 - DNA, 491 bp, Homo Sapiens
cgaccagactacacagcatggttccctttggagcccttttgcaaaaggcaaagtgacaggacaaaacagaaatgggtggctgctgaagaggtggccgcaatggagctagaggcaattttgtgggtgatgaaacttttctacatggtagctcctgctgggagtgacatggctgtataagtttatgaaaaataacagatctgtagattaaaggagtgaatttgacagcatgtaattcatacctcagtaaccctgtgtcctagagaactcaccgtccagggtggactgcagcgggcctatcctccccatccgccggaacctccacacatgtctggatgctggcacatagagctgagtgacctgtcgggggcaatcctggttcagaactcccctgtgctctagcacacactttgacctgatcacacttgaacagaattggtgctgacatttctctagtgacgttcctcatccacgggatcctctagatcacccac

SEQ ID NO: 157124 - DNA, 333 bp, Homo Sapiens
gtacggctgacaagtaggaatttagatgcagtgctagggaacacaaatatgtttagtacagtcattcctataaagatattgccctatggaccttgaaattgtaagagtcatattgcaataatagatgaaagtatccctaaacagtgagtaggaaataaactataaagtttaattgtatgttcttaatattactgtttgtgattcgttcaataaagtaaaatcatgtacagcctttaatttgtttttaaaaaattttatgaaactatccagttaactccagtacttcctcatcccataacgttcctcaccccagtacgtcctcattacgctcct

SEQ ID NO: 157125 - DNA, 243 bp, Homo Sapiens
  misc_feature (229)..(229): n is a, c, g, or t
aaggtgcgtgggagttacaaggcggtgagccactgtcacctcggccccaagtgtttacagagtgaggaaacgtggacctagaaagttttaacagatgtgctcaagttcatacaaacaccgactatctcatgtcagatccttgtgtgataacctgcctgcactaactaatctacatttgctccagaactgctgcaaatttaatgtcacctcacccagtacttcctcatcncaagatcctctaga

SEQ ID NO: 157126 - DNA, 300 bp, Homo Sapiens
cttggtgtgttttcatgaagtacgctttttttaagtcagattttatggtttgaaattgctactcatgattcctggtgatgtctctttaatatgacctctttattttcttggtacctacctacaagaagcaacttcaaaagtaagtggtagcaaatgggagaagagtatttattgcttttgctcctactgacttttctcatcattcacctacattttggtaatctgatctctttacacgtaattaatgatgtgatcattttttaaatctagtacgttcctcatccaccgatcctctaatca

SEQ ID NO: 157127 - DNA, 140 bp, Homo Sapiens
gaatgggatccatctactggttctttaagctcaacagcacccgggcgatgaggcttcacttactcaagccaaccctcccaccaggaaaagccctcctagacacctggccatctagttccccgcagaagactcctttcttt

SEQ ID NO: 157128 - DNA, 288 bp, Homo Sapiens
  misc_feature (182)..(195): n is a, c, g, or t
tgcactggctgggcaagatgctactagcacattttaggtaaataatattctttattaaaaactatgaggtcattctgtttaaaactttcaagataattcacggaaaacagatatatctattcaaattaaacattaaagggccaggctactagcctatagacatttatatgtgaagcagctcnnnnnnnnnnnnnnctctgagaccgagtctcattctgtcgcccagggttgaagtgcagtgccccaattctcagctcatgtgaaacctccgccctcgtgggtcaggca

SEQ ID NO: 157129 - DNA, 327 bp, Homo Sapiens
  misc_feature (54)..(54): n is a, c, g, or t
ctgcagtgtagcccagtgctagcaggacacgtgtatacctgaggatggcaaggntgctggggctcagagtctgcacttggttttggttttctttgagacaaggtctcgctctgtctccaggccggagtgcaatggctgggaaatcagatcttttctggactgaaaacattggccagatgagagtgagacaccgcagtaagcgtgcagggttccagatggtggcagtggcacacggtattatttattcagacctcttctctcccgcattctcttagtagcaggagatttcacatgcaggagccaatgtacatgtattaactttgctgt

SEQ ID NO: 157130 - DNA, 464 bp, Homo Sapiens
tgcctgggatgtacaggcatgagccattgcactccggccagaggagccatcacgcctggccagagttgtcttgatagaggtcttgtaattatttgaattagaaaattttctgttaaaatatgtccacaaattctttggtataccctcccttcaagaagtgaagcctaaatcccttcccttcctagtgtgagctagacttagtgactcagttctatgagtaaaagtggtggaactgatagtgtgacttctgagactaggtcataataggcattgtggctttctccttgctctccctctcagatcacttgctctgggggataccagcagccatgttgtgaggacaccacaagcagctctatggggaggcctacatggagagtaaccaaggtcccctatcaatagccagcaaggatacagaagcctcctgtaacactcacgtgtgagccatgcactccgaaagctcg

SEQ ID NO: 157131 - DNA, 148 bp, Homo Sapiens
aaaaataaaaataacaaagctctctaggcccagtccaagcccagccattgcactccggccagccattgcactccggccagccattgcactccggccagccattgcactccggccaggcattgcactccggccagccattgcactccgg

SEQ ID NO: 157132 - DNA, 558 bp, Homo Sapiens
attggagcttcgtacccgtccggagtgccaatggctgtgatgactgcatcctgctcagtttgtgggacaatggggttaaaacactgtcacggcaaagacactggcctttttccctgagtccgggatagtagccctttgtcctctaaagatgctctgtccctgggcggccagcaaacacctcccaagggagaggagagaaaagaacccggagtagagccagccgagtagagccagccgagggcagataggtcttgtagggctgtgggagccactgcaaccctgggagcttcctgtcagctcaagcccagtgcccagagtgtccaagtgccacctggatgccctgcagtgtccactgtgctgggttctcaaggtttttctctggggggggtctgcggggaacctggagctgctgggtaggaggtgggcttgtggctcagctgtgtccagtggctggctgtggagcgcctcctctgctccagtaatattttcatgggcaagaaagaccactactttcttggccaccgcttcctgagctatacttcctggaagccagccatt

SEQ ID NO: 157133 - DNA, 500 bp, Homo Sapiens
aggttactattattataataaatgaactacgtccacgtgtacacacccatagctctgtggcattgtcctctctttgtggcatgcctctgaccttcttttagtaaagatgatttcttctcagctttgatactggtatgctcagttatcttagtcaagtcaagtcgtggtcttccccataatctagttaaggagaggatctggacagttttcctttgttttccaagtcaacccccactctcgccgagaccttcatgcaaacacaaaatgaaatccattttctttgtgcagtcagtgtgtctcggcagatgtgagtcagcatcctgttcagaacggctgttggtgccttgccatggacaataaagacacacattttccacggaatgccaggcgcttgagctgacttggggtttccacccgcagagaggaggaggaaactccaggaggctgattttgtggttttggatccagccatgcactccgcaaagatcctcagagtcacg

SEQ ID NO: 157134 - DNA, 70 bp, Homo Sapiens
  misc_feature (56)..(57): n is a, c, g, or t
tcatggctcatctgtatcccacactggaggcaggtggcagatcactgagtaggagnntcagacagctgac

SEQ ID NO: 157135 - DNA, 253 bp, Homo Sapiens
atgggtgctccatccccctccctctccccacatctgttacacctaaaatggaggactcgacagcctcaacccaatgacatgactgcagtttgggcagccgacagcagaagggtcatgaccagcttcattgggtggaagttccagtagtcttctgcaattcccaaaggaactgcagggcacctctgtccacagagcctctggggaccatgtccgaatgctaagtgccagtaacatacccacctgatgctgtgat

SEQ ID NO: 157136 - DNA, 287 bp, Homo Sapiens
tgtcagtctacacgagcaggacaatcacccatccaggattcgaatccttcccagtattggtttgaggactgtgttcactgtaaagacggcgaaggctgctcaggggccgagtgcttctgtttccactctgccatctgggaatatgggaccaactcttcccttcaccctttccacaactccaggccccccagcaccaagccctctgtaagccatggtcagaagaccctttcatattttcctgccaacacccacctcatcaccaggggcggatggagcacccatgggta

SEQ ID NO: 157137 - DNA, 264 bp, Homo Sapiens
tcatacccctcaagtgctgagtcggtctgtcggaggttactctcaagcacatcagtctcctaatcttcctagaaggtgctgtacaccctcattccagagataagaacacagaggctctagaagcttccacgacttgccccaggacataagggcaaggatgaaggtcacgacttcttcctgtggtcccgtcactcaccatgtcttccttctccaacatccatttttttctttcgtcataggggggatggagcacccatgggtttt

SEQ ID NO: 157138 - DNA, 246 bp, Homo Sapiens
tatccatgggtgctcgcatccccccactgtcattggcagcgagaggaatgggtgctggtgacattgggccagggctgcctctctgtgtcagagttcagggtgtaggaggggttctgccaaccatgggctgtgtggggtatagtgggtgaggctgatcttgctggatcataggtgatcctgagcccttggcctgtggaatggggtagaggcaaatagtaacctagcatgctgtggggatgacaaact

SEQ ID NO: 157139 - DNA, 641 bp, Homo Sapiens
gatctagaggatctctgtgtgcccagaacgacactgcggtctagagtatcttctgccttccctgctccctgcatcctcacatattaggacttggggacctttaggattgttggatggccatggcagtctctcatcacagggaagaccaggaggacaaacacccagatgacacagcacccagggccattgggaactattccctttgagggggaagagtgtgaattccaagctcaggagtagcctggactctctccttggacctgaggctactcctggatcccagggctggcctctaccactggactctgcttgtgtttccatgagttgagtccaatgtggtattggtgcttaggtcttggctcaggctctaagtgaccaaagtgttcaaggaatgaaaacacaactgttttctaacgcccggaaggaggcaaatattccagcaattctgcatgtggcatcagaggacccagcttaaaagggaagagttgagtctttgggaaaacccatccctaagatcctagaacattcttttgagtttttctgagatcttgtggaagcacctccatgattacgcgctgcctccagtacacacacatgcagacacactagacaaacacacaggttctgggcacatatggtcc

SEQ ID NO: 157140 - DNA, 216 bp, Homo Sapiens
ctggtgtggctgcaggttctggtgttcctgttccctgggtctcctgaccctttgtttcaggcccggctaaagagtgggaaactcccacctcctaccccgggagtcaggagctgagcatatatttccaaccagggccaggctggcaccagcctaccaacttttgtttactcctgttcctggaggtgtgctgtgtttgccgcagtccagtgcacacag

SEQ ID NO: 157141 - DNA, 254 bp, Homo Sapiens
catctcactgtgagtgaaagtcagagaaatttctgacatgaacccagaagcaccagcaccgggccactgagtgcatggtctgcaaggtaagcacagtgaaagtgtttcagaaagctcctagcaatgacatcggcactacatctaaacatggactactgaaggacccgtctggatggactaggaattcaaggtatgctccctatcagacagagttgagaggccctgccccacacctcctccaggcccacctctgc

SEQ ID NO: 157142 - DNA, 309 bp, Homo Sapiens
aagaacccacaccccaagtcacacaagggtctcattgaagggtcctcaagatttccctcctgttaccacagagtctcacgtgagggccccacagaccccccatcgcccagggtcccatgagatgtccccaaccctctagccccggcggtgtcatgtgcatcctcttacagctgttgcctcttctctgggtctgactgcagcccacaagaagacgggcatttaatgttctgctgtgtgtgtagaggatagtttagcccctaaccagagtcctgatggtactgtgtccagacccagttctggcactaacgg

SEQ ID NO: 157143 - DNA, 702 bp, Homo Sapiens
agggtgctgcggggtgactctacaggatcttctgtgtgcccagaactgtgctggacatatgctggcccacttgttccaggagccccgaggctcacccccataagtatagctcccccagcctggtacagaagactagctctgaagctctaggggagcccttcatctaattatcgacaggaaacccatcctgatcctgtacaggaatgccagcgcttaccctgaataggaggaacctctgcctaaccccagctagggacatctggactaagctgtaaggaagcccctgcacaccctggacaggaacccttgtcctgaccatccacacaagcctcagtctccctatacgaatcctgtcttgacctcagacaggaacacctttgtactcacactgctgcagtcctgtcctccaggtagcattttaaaaacacctcactcacaataatctgagtagtaaaccatggacccagctctgtctttacagaaatccctgtcctcaacctcttcaaggaccctgactgtgtgtggaacctcttgccttcattgttgacaatgatccctgatgttgccctgcacaacaatccatgacctcacaccctatcccatagagtccacaggaacccatgatccaactctcaatatgaacctcagtttttaacttgtatagaaaaccacttcctgggttctggggcacacaaaggtcct

SEQ ID NO: 157144 - DNA, 176 bp, Homo Sapiens
tgctggcagtccttaggagccacggcatttaaggatatcggctcctctggtttctttctcttcctgttctctgccacctcttttcattttagtgttatctgtacctctgggcacatacagacacagataatgaaaaatgaatgtgtgccaggcatggtggcacgcacgtgtagtct

SEQ ID NO: 157145 - DNA, 548 bp, Homo Sapiens
aacctaaaataaaagttggaaacaaataaatggaaaaagtaattgagttctaaaagtaaagaagtgttctccgttccagttgaagataaacaaaactgaccctggttagagcagtaggacagatttattcagtaatatgattgcaataggggaaatagtccagcgtggagtggactcacatccctgaaacaagagcctgtatgacgtttcataggccaggtgtgccaagggaaacactgtggtctatggggagagtgcttggttcatgtgactagaccacctggatgtcttcatcctggctcacctggggcagaaacaaactcctcttatctttaggacaggaagccatgcattagaccgcaggaagaacccactgaagtcaggctctactctttcgacagggactgggaagatcaggagtgagctccctgaatgtttgcattgcaaagagaaggctctcaggtcctcaaggaaatggggttgggtggtagattcagcagagaaagtgtttatcattgcaggcttctaatactgctctggttcgttct

SEQ ID NO: 157146 - DNA, 595 bp, Homo Sapiens
  misc_feature (88)..(147): n is a, c, g, or t
gtctagttcagtccagacacctgtcacccccactgtttctggggttccctttctcattctctcccacccttgtcgtcctgccgtcggnnnnnnnnnnnnnnnnnnnnnnnnnnnnnnnnnnnnnnnnnnnnnnnnnnnnnnnnnnnnctacccccgctcccgtgtttccagtgctctgcctggctgtctctccctttctccccctctctctctgccttaggctctgtctccaccgcagggcccaaggtgaaagtcctccccttgccggaggccagcttgcaggccccttttcgtggctggaagtgcccagtttggttcccggtgctgacccctaggccccagcgcagctgcctcccgtgctgtctgtctccccctctctgtttatgtctgcgctgtgtctcacactcagagcctccttgcttctgttaggttcccatctctccttctgcctcactctgggcctcttctttctacttgtacatttccacctctctagcctctgctctcactgtccctctctgtctgtctctcagcctttatctctggtatttgatcccccactccagttctggcacacaggggatgctctagatga

SEQ ID NO: 157147 - DNA, 584 bp, Homo Sapiens
tcgagcgtcggtacgcccagggaatgtctttctccagcatgtaggtactgttgagaccctttgggtctggggacgggtgaagccattccttctggagagtagggaatgatcattagtgcaggagttagtggataagacggaagttgtaggtagtgggatgagagttagataccaccccctgctgagatgcagggctaggggatgggggtgagggcaactgaatgccagggactgcctctatgctgagagaccctcagttccctcagttactatgacccttggcaccaccaagatggattggaagtgaatataaatgcacaacacatgcactccgggctgcaggggtttctcctcatcaggagtgagggactacaactcccagcactgcctcagactatggatgatgacttctccaggggtaatgtgtacagtcaaattttgggatcttagcagccaggaaggaaagtgtagacaggcctgagaaggagaggctgggggaacaatgaggggctgttagactgccaggacagacaaggggagaagccgaaaatgaacacggaagagagcgcaagacacacacaggt

SEQ ID NO: 157148 - DNA, 519 bp, Homo Sapiens
aaaaagaaaaagacatgtagggggacaactaagagatcatttgcttctttcggcgtaagaaggataacactcagtgcttagagaaaatattgtaaggctagcaggtgttagaaaggcacactgcttagctcatatttcacttctgccttttctaggaaggaaaatgattttcaaactgcaaaagatagaaataacagcagaaagagataattaatggtaggtgagagaagacagagcagatagtctctgtaaataagttcaggtctctaggctctaacagtttcttttattatcaaaaaaatagttttagcagatataactatagagccatatattattctgagaaaaagtcatggagaggtataacggaagatgaggcaaatgttatcctgcctttcaagacgggtaatgcaaagaatagatgtattcactgtgtgctgcacattgaaataaagaaattaaaaataaagagtagacactatacataatcatcagtggtagggttctggggcacaaaag

SEQ ID NO: 157149 - DNA, 598 bp, Homo Sapiens
tttgcgcgtccccatatgcaagcgtcataccttgcgagtacagcttgtctaagaagtcacaggaaataatttagttagtaatctcggtctcatcaccttcctctcctagcattggggaagcaaatggtactcttctccctagagctttcctttcaaagtgtgtaactgatggggaagtcagatgtatacagacttgtagaattttctcaagatgattcagacagctcagtgattacatttgtatggcgtcctcactctctggggcctcatccatgtggtttccatccagcttggtttggatctcatcctcctgatggttctataattcaatgaaggcccataatgcaatgaccactatattcagaagaggaatgatggttgcctaccactctacagcatcctctcctgaagcatagacctttcccctctaacagggtcattaagccttattgtctgagtattagttgactttggagggagaagagacagtgacagaaacccaataccagatcccaacttgtctctccagacactttccctccccttcccccactagatctcttcttctcagttctgggcacacaaggatcctctagat

SEQ ID NO: 157150 - DNA, 388 bp, Homo Sapiens
tcctgtgtgcagcgaatacacgcgaacaatcctagtgaattttcagcaagaaaccagttcagtttggctggtagcgttttcaagtaactttgacactattggaccgggtgtggtggctcacccctctcaaagtgctgggatatacaggctgtgagccactgcgcccagcctgagaagtgacagtttagatgaaggtggtgagatgcagttggattgcttatatatttcacttgtttgaagccaaaaacgtgctgattgaggtgcaccgacgccaacgaggaatccaatcttaagttttttttgccgcgtaactggttgcaataggtggtttcatttcctcaaaatgggcagattgggagcagtaaccggttctgggggcacacaagga

SEQ ID NO: 157151 - DNA, 229 bp, Homo Sapiens
gaatcacttgttgagcagggatagaaagctggaggctgagcaaggataaggaaatggctgatgttgaagagccagcatgaggccaaagcttgtgttcccagttcacactctggaatgagctacacctgacccctgacccctgcagcactcagccaggccaggacaggcagcacaggagaggcagagccaagagtgaatccagccagatattgctgagaaacatccctgg

SEQ ID NO: 157152 - DNA, 207 bp, Homo Sapiens
aagtgccagaggaggactcttgcgtgagccatgccaattaagaaaaatgagaatgccagcttaaataaatgttatcacaatctctgcagaatcgtgatgtctccgattcttaaaagtgtctactgcagggtatttattattctgtgataataataaatcgctgcttatgaaatgcagcgagtgtcatggaggggaggaagggaagta

SEQ ID NO: 157153 - DNA, 283 bp, Homo Sapiens
gcttatcctgagagactgctttagggatacttttcgacaacaaggatttacgattgcttctgcctgagctgggatcattgccatccatcctccctccctagaagggacctatgctagcctccttttgtgttggaggtgagtgcctcagtttcagccacctcacctcgttctgttccaaggcttgatctcttcatcaactgtcaatatggcgtttgttttccaggccacttcgccattcgtatttgcttaccttcagtatttcacctctgtttcagctacactg

SEQ ID NO: 157154 - DNA, 297 bp, Homo Sapiens
ggagagcgggagacgtaagttgaggtgaaagttggtgaggtttggtgtgagttcccggggagcaaggaagctgctggcagctgaaatctggggtttgttggagagtagctggacagaccgggagagtccctgagggctggtgaagacatgagagagactggagagtaattgagtgtaattggtgagattggtggtgactccggggagcttcgaacgactccagctgaaatgtgggtgtgttgcagagtagctggtacagacgagaagtcctcaggctgagaatacatcctaaagtgc

SEQ ID NO: 157155 - DNA, 270 bp, Homo Sapiens
gggcctgttgagattagttttgggtccagcagataggggaaagcaaggatcctaccagctgggccattcttggatgccgtgttagcagctcactcttggccccggcctgaaggggggaacagtccatcctccagtggaccagggattgcgctgtgggttccgagtcctcaaagacatggcagctgaagtctccgtgcagcccctgggctttgatgacttctctgagattgcttttgccctgtgcctaatcctcacgtttcttgctgagaa

SEQ ID NO: 157156 - DNA, 579 bp, Homo Sapiens
acctgttcccaaagacaagaggagaagaaagtaacaggtgggataatttacaaagtggagcagaggagcagaggctcatacctgtctcggggagagaggagacagaaggtgtaagagatgattccctccctccagggcttctgccctcatagaggggacagaaggatgtcagcatgtgaaatcagacgccaagagagggaatggtaactgtcaaagtgcgaggtgcagaaatagttctgttggagtcagagaagggagttgtgggcagggatcagtcaccaggactggaggctgacgctgttgagatagtctgtgaggtgggaatgaacatggctttccagagagacaaggagatgtccttagccataccagggaatgtatcctgaacagtaggagatagaggtggagaggaacaatggttgagattgtgaaagtcttagcccttttggtgattgcatgccaccctgtgtgtcctaaggagacattcaggtttttgagtgagggaatggtgtaatgaacaactgtaatggaagggttttggaaagttgtgtttgggcacagtaaggatcctctagatca

SEQ ID NO: 157157 - DNA, 332 bp, Homo Sapiens
tcccaaacacacaccgtctattataatacataccactgagaagccacagcaagaacataatgttccttatgggccaatggatgaaatgaatgaggacagtgaatcctccaagctgatacagtgacttgtaaacctggtttatcttatttggagtctcagtttctacattttgtaagtatttttgcctgattcaacagtatagttatttaattaagaaccagaacttttgtctcctcccatcttcttttaaacctcgagataggttttttcactctgttgcagtgcgccaatctcctgaagtacctggaactacaggcttgagccaccacccc

SEQ ID NO: 157158 - DNA, 384 bp, Homo Sapiens
cacattaagctggcctctattttcgaatgatgagaggaataataccatgtggcttcccacagcttgcccacatgggtcctgcccatggatttagtgtgggccagtcctctgagtaggctcacacactcaggacatgaccctgggggagggggcacgaggacaaagccctctcctgaaggagcagtgctttccaagccctgcaaagactgcaactgatgagggggacacgaccagaattttagaaggaagtatgtgctcatttagtacacggttgtgagctctgccacacactagatatcacatttatcaatagagaaacaaataggcatagtccctgagtttaaggacttcataggcatgcacatatatatgtgtgttggcatg

SEQ ID NO: 157159 - DNA, 593 bp, Homo Sapiens
attagaggatccgactgttcccaaacacctgcagaccaaggcctatgtgcgccagtttcaggtcatcgacaaccagaacctcctcttcgagctctcctacaagctggaggcaaacagtcagtgagagtggaggctccagtcagacccgccagatccttgggcacctggcactcaagcactttgcacgatgtctcaaccaacatctgacatctttcccgtggagcaacttcctgctccacgggaaagaggtcgatggatttacccctggacccataagtctgttcatcctgctgaagtcccctccccattgctccttcaagccaaaactacactttgctggttcctgtcccctctgagaaaggggatagaaagctccttcctctatgtcctcccatcgagatctgttctggggatggagcttccaacttcctcttgcagcaggaaagaatgctgctcacccttctgtcttgcagagtgggattgtgggagggattgcagccttcttctccaccacctgtccagcttcttcctggtcagggctgggacccccaggaatattatgttgccgtgtgtgtgtgtttggggaacaggtg

SEQ ID NO: 157160 - DNA, 504 bp, Homo Sapiens
gaaggcatcctttcacatttttaagaggtcttaagatggcatcatcgaagcttttgagtctttagttctaacatttaatcatctttattgaactaataagagtctggtgtttgaaaaggaacaggtgagggaacagaggtgcagctgcatctggtggtggcagtgttgttcacctcaggcagtgttgtctgggataggaaagtcggaggtgaagtgtaaggtttagaagtgtaagcgtgtgtgtggacgtgttgtattagcattgcctgtgggtcttagaccaggtgggagtttctcagaggcagaccgtctgcaagagaatcccttgaggtgcttgctgatgggcacatttctaggccccagacttggcaggtggagtccagtgatctgcgctgttgacaggcttctctggtgaatcttacacttgctagtgtttaagaaccgtcattgccatttatactcgtagacatttcttatgatttagtgatgttatggatatacggg

SEQ ID NO: 157161 - DNA, 406 bp, Homo Sapiens
taagtgctctccgatcttttcctgtcccaaacactcgaaacacatgaaacatggcattaagttcaactccacaggtcctgtcagggagctgctgtgctctcagcacggtgccaggccctctgggaggtgggagaggcaccgaagagaccccaggcttcaggaagcctaggactaggtggaagtgatttaggagtttacgttcaagttaatgtgcagtggctgcctgagttagtggagatgctggagagggagtatatcagataaaggaaaaacgagattggtgaagggacttggagtactaagttttgaagtacattatgcctgtggacgagtaactcacccgctagggcccaaagacaagaggagaagaaagtaacaggtgggataatttacaaagtggagcaga

SEQ ID NO: 157162 - DNA, 460 bp, Homo Sapiens
tgcctaagggaacactgggggaaaggcccatgcctgagggacccagcctgggggaaaggtgggagtccaaggccacagggctgcaggtctcatccagggctgactcctgtgtaagaggacacagtggcaggccacagccatcccaggaacacaccagcaaggctccccgaaaagccacggtgatgggagcggaaaccctggtcaagaaataagaagcaactcctgcagtctctccctgggtctccacggaggatttgcaaacgaaaatgaacagctgaagccttcctaggtaaaactcgagtgtgccatggggccccatgtacactagaccaagagcccacacagaaaaggcagcttgcagtggcatccaaccatcatttcacctgccttctcccatcacagtttggtgagcgggaacagttggtgtttgggaacagttaagatcctgctagagtcactt

SEQ ID NO: 157163 - DNA, 583 bp, Homo Sapiens
gatgccttactgttcccaaacacataattcgcaagttaatatgtcataaattttttttaaagaaaacataattgacaataaaatagtacacattttcaaaggtcacttctcggacaggagtgtatcagaagcccaaaatgaaatcgtctaatgtttgcacctacttataggtttggattcaagaaacataagacaaaaaattcgccagagttttgttaatgtattctcataatacttaacattttgaaagcagcattacatatattttaatacagacatcatattggtaaaccaactctgaaaattacaaaatgaaaactaaaacaatcatccttattagtagcatttgccactttccatggtgtaaatattctcaccacggtcagtttcaagctaccaacacgatgtcactgaatccagattttggaagaaacaggcaaaatctgctctcatgagctgctcgctaagggcatgtctagcacccaactatttaatcaccatgaatacaaacagctacatatgtagacagatcacattatggtgactcaaatattatgagcagtgctgcatgatgtttcaagat

SEQ ID NO: 157164 - DNA, 441 bp, Homo Sapiens
  misc_feature (273)..(375): n is a, c, g, or t
cactggagttgacatcagtggacagagaagaggaggaattacagctaattggctgaaaatcacacccattctatcttagctatgcctatgtaatctattccacagttgcccttacctaacataggcctgtatcttcctagagaaattcattacatgaagatcaacagtcatgtgttgcagcaagaatgcaccatataaatgatcgttatctgttacctgtcaaatatacaacgaaaaataatgtaataccttgctgttggctcatgcctgttnnnnnnnnnnnnnnnnnnnnnnnnnnnnnnnnnnnnnnnnnnnnnnnnnnnnnnnnnnnnnnnnnnnnnnnnnnnnnnnnnnnnnnnnnnnnnnnnnnnnnnntaattagccagggtgttgttattgggatacaggtggatcacgagtcagtagttaaagaccagcctg

SEQ ID NO: 157165 - DNA, 424 bp, Homo Sapiens
  misc_feature (71)..(106): n is a, c, g, or t
tagggtatcaggggcaggatatagggtatagaggatctataagccatatgcagagaattccagttttgttnnnnnnnnnnnnnnnnnnnnnnnnnnnnnnnnnnnnggaacaggtgctgcttactgcttaccttctgtatcttcctgcattcatttaaaaaatttatttcgtgtctgctgtatgctttatatatttcgagcggatacctggaatacatagaatagtaagtaagattggttgaagtcatttggctccattttctctccctccttgtacagtatgcaagctgtaacataataccaaatataataggttgaaatggctgcagtgaactgtctcttaggatgagcctagccgtctcatttgattttctggttttgggggattgtgagtggtgctgcgtaaacatccagttgttacatt

SEQ ID NO: 157166 - DNA, 320 bp, Homo Sapiens
tggttcctttcttcaagtacggtattgaccctttgcccacaggagaacgtgcccagtttttcttaaagaccacgtgggaactcaaaagcccatgattgtaggttcctttttccctcatagattggccttcaagggcagtttcttgttatctgcgtttcagagacccctagggaccacaggcatttctgctccctgggaatttgcggacctttgaatcttgagctcagattttggtctctgttggttgcttgtttatcttcatctcttgtcatttctggagcctgcatgccttctcagagcagcagtaattgcttttacct

SEQ ID NO: 157167 - DNA, 172 bp, Homo Sapiens
taactatatgaatttatttgagtgcttctctactctatatgaatttatttgaatgcttctctactcaatagagagcaaatagtttcaagttaacagaacttttctgaggcaggataaatgttaacttcatgcccttgtatgtgtttgggaacagtgaggatcctctagagca

SEQ ID NO: 157168 - DNA, 416 bp, Homo Sapiens
aaggacctttttttccccttaggtgtgtaagattttaaggttgaacagtattttgtccctgcaacttttgcgaactacgttctgtcttctgggcatgggcagccgtagggttctgagcaggagcccttggtttttggtgcttgtgctctgatgggctgacatgtatcctcagcctgtttagagtttgaggcctcttggatctgtggcttgaggccttcatcatgtttcttccagtgttgtttctgccccgttcctgctcctccagggaccccgagagcctgacgttcaacctcttgaaactccgtcatctgtttgtctttcctgtttcctgatggatattccctctggtgtctttcagttcgtggattctcttctggttatgtgtcatatggtgtttgggacagttaaagatcctg

SEQ ID NO: 157169 - DNA, 328 bp, Homo Sapiens
  misc_feature (26)..(27): n is a, c, g, or t
catccgttgcgcctaactagaatgcnngaagggacgggctcacatgctcagggtgcttgctcggcttggtggttcagtttgctgtgaagcctggcccagagtttgggcttcagttctgggaaagaagagcatggtgggcagtttatgtgttaccgtccagaaggctggagcacagaaatcagtggtctgacttgttggcactctgcttgctccagagccagcagtgggggcagagtgccagctgaggtgtgtgagagacgtcagtgagattcctgcttggcttcccagatgttgatgcacgttgtgggtgtttgggaacagtgaagct

SEQ ID NO: 157170 - DNA, 413 bp, Homo Sapiens
  misc_feature (19)..(19): n is a, c, g, or t
ttagaggtttgtagtgagnccatgattgcatcactgcactccagcaggggcaacagagtgagactctgtatcaaaaataaataaaatttacagtattttgtagaaaaagatagtttattggtgctttttgctagacatctgaagggctctaaatggtcatcaggcttctgtttctagagggacaagtaaggaggccatgatcttttaggcatcttttagtagcatagcagatttatagacgtctgaggggcatctaggtgcttggtttgtccacttgatatgtgtactatcttattgaatctttataataaaattctgtcctacatcttgtggttaaaagcaggaaggaaatgatgaatttaatgcacagcatagttgttaagatagacttgtatgtgtttgggacggtgaag

SEQ ID NO: 157171 - DNA, 586 bp, Homo Sapiens
tctggaaccagtcactgcaaggggaatgagatcatccttgcactgatcacatccagctatggcctgagatctcttactaggaaccatatgtgttctccttggaagaagagagactaactgttgtggagatcagctgcaacgtccaccataagggtgcagatttcactgaatgctgagtctcccacaagcagcatcccctcttcagtgtggtttcctgggcagaaagtagatggtatccagggcacaaccagttcaaaacctgcagacaattccatgcaggaaaacctgccctgcctgctgcgttcagacagcctcaggaccccatgatgaccttagcaattcccaagcacccttcactttcttcaactattaaaatccaggacaattctgtgggaataaccagactactctgaaatcacacaggacaatccagggatggtatttaggaaaacatgggtacatccttttatgcagatgcaaaaagcatgagtgtccaacagtgtgtgatggctgagatgctcaaacaaggggaagctggcctctgcctcagctgaaaagtgtgctccggtgtttgggaacaggggag

SEQ ID NO: 157172 - DNA, 535 bp, Homo Sapiens
cgccacagtgcccagcagagctgtctgctgccagagaagaggatcttgagtagtggttctcaagtcttcgtactccacgtagaccctagggagcccaggagactgctccttcctgccctcccactccggacatcagtcccattcagagcagtttgatgtgtgcttgagtaatctgtgttttaccctaacctctccttgtaccctctccacgatccctatcctgacagctgtggaccatagacggggtccagttgtgatctgatccatcagcctctgtgactggtggaagccatgcttatttggaatattgttcaactgatgtgaagttttttagttgctggcttaaaagaagtaagaatattcaatgtaaaatacctcttagatccttaataatgaaagtagtgtagttttgcttttgtaagttactaatgattcgcagaatgaaagcattctcttaacggtgtttggcagtcaggctctgagtgctatgtggccggattatcaggggctagtgtgtttgggaacaggagagatc

SEQ ID NO: 157173 - DNA, 478 bp, Homo Sapiens
gtccaaaacagaaggaaaataggatcagaatcaaacctgtcaggcctgtgagcctcttcatgtgctatgagggtgacccagagaagacagctaaagtggaatgtggggacttctacaacactggggacagaggaaagatggatgaagagggctacatttgtttcctggggaggagtgatgacatcattaatgcctctgggtatcgcatcgggcctgcagaggttgaaagcgctttggtggagcacccagcggtggcggagtcagccgtggtgggcagcccagacccgattcgaggggaggtggtgaaggcctttattgtcctgaacccacagttcctgtcccatgacaaggatcagctgaccaaggaactgcagcagcatgtcaagtcagtgacagacccatacaagtacccaaggaaggtggagtttgtctcagagctgccaaaaaccatcactggcaagattgaacggaaggaact

SEQ ID NO: 157174 - DNA, 535 bp, Homo Sapiens
ctactctctaggcactttcccagagggacaagagataggcagaattattctcaggtgctttccttatatttgggtcctttcatgggtccccaggtggggctacccttgaagggaagaggggcaatcctaccatggtgattaatgccagttggtgttcaagttgtttatcacgctgaggcaaattagtcctggttttggcactggaagctgttggttgccggtttgaagggtttcccagaggcagggtagggtgacttttgtcttgaaaaaaggttagccgctgaggagggtcagaatcagaggaagggaacttcaactgagcttcacagagagaacaagaagtggattatggaggctgcagggacaaaacggaggcaaaggacttggatgccagaggccttctttacactttagtcaatgtgaagggctattctgttgctgaggaaggaatgcagacgtggtatacaggcaaatgtctactcttcactgacaatcttcactgaatagaacccaagagtgggccaggctggtcatg

SEQ ID NO: 157175 - DNA, 514 bp, Homo Sapiens
  misc_feature (72)..(99): n is a, c, g, or t
  misc_feature (114)..(362): n is a, c, g, or t
tcacctgtacccaaacacttctatatctgactactaaaattgtattgtgaaaaatcacaaatcttcagcaannnnnnnnnnnnnnnnnnnnnnnnnnnnggagacaaagtctcnnnnnnnnnnnnnnnnnnnnnnnnnnnnnnnnnnnnnnnnnnnnnnnnnnnnnnnnnnnnnnnnnnnnnnnnnnnnnnnnnnnnnnnnnnnnnnnnnnnnnnnnnnnnnnnnnnnnnnnnnnnnnnnnnnnnnnnnnnnnnnnnnnnnnnnnnnnnnnnnnnnnnnnnnnnnnnnnnnnnnnnnnnnnnnnnnnnnnnnnnnnnnnnnnnnnnnnnnnnnnnnnnnnnnnnnnnnnnnnnnnnnnnnnntgagccatcacacccagccaatttctatagcctctttgaaaacggaatctctttgtggttgctgctgataaaactcctttgacctgacgattgctctaagtcctaattgccatatttatattcccatagtaagagtgtttggggaacaggtg

SEQ ID NO: 157176 - DNA, 599 bp, Homo Sapiens
taccactaagcaggccactgaatgcaaactaatattccgcatcccgtgtaagtgctgcaagaatgaaaagtggaggtcaaaccaccctgcttgagaatctgagtcttttgcacagcctcccagagccgagtcctttccctcctccagtctccgtttcttagcagagcagggaccgccttgaagaaatgagaaatcaattgtgtgtgctctgctgaattaaggcttttccaggcttgtcgatctgcattcatttgcatgcattggcactgtcttccctacagaatgaattcacaggaatccagaaaatgccacgcttgtacatttgtgtccccaccacttccttgcagaagccgctcctgtgattcattcaggagtgcccagaatgaaatctcctgtcattggtgactcttgggaagcactgaattcgtaggggggtcccggaggtggcactgcagcaagaccacaagttcccttggcaaagagtctgattctgcctgacttgcttgcagccacagtagtgaaaatacattcagttctcagatgtgcattgttcgaaggagtgtttgggaacagtgagagatcctgctagagtcacccgc

SEQ ID NO: 157177 - DNA, 269 bp, Homo Sapiens
gtatggtgctaatgtgtctgtggaccctcgctctctgtctccaggcagttctctcgaatactttgaatgttgtgtaacagttagccactgctggtgtttatgtgaacattcctatcaatccaaattccctctggagtttcatgttatgcctgttgcaggccaatgtccacgtctagacaataatgcacatgtcacggctactctatatactttcgcttggttcatttcccctccctcttagttacgcatgactttagatgggaaagcct

SEQ ID NO: 157178 - DNA, 498 bp, Homo Sapiens
tctggacaagaaatcaacctgaataggccccacaagtcaccttgctcaactgctatcgcaaatgggaaactcgaagcccccagaagcagtgatggggaggggtcctgctctctcccaataccccaacttcccttacggctcacctcccatggctgtccttgtggaagtccagtgaaaatccaaactggctgccattggggcctgcatagaaggtgagctgcactgggtccaggttcaaggcccaggctggaggggcagcacaaggtcccaagagcagcagcacccactccagaagccagagggcttgcagtggacacaaagctctggccatcttccttcttccacaacctcccaggcaggaatgggccagctcctcctccttcccttcagattcctccacaggaagtcttttcttatcaaactggaaccccaagtaacttgtctgagcaacgggcagagcaaagggctagccctatactcatggtggctagtgtttgg

SEQ ID NO: 157179 - DNA, 513 bp, Homo Sapiens
tgtaccccacgtgtgccccaaacacctacctcgggggtgaccagctcatgtcccagtcacgggtgaacatatatgctgggctcctgcagcctggctcccgctgcgtggaggtgaactgctgggatggccccgacggggagcccattgtgcaccatggctacactctgacttccaagatcctcttcaaagacgtcattgaaaccatcaacaaatatgccttcatcaagaatgagtacccagtgatcctgtccatcgaaaaccactgcagtgtcatccagcagaagaaaatggcccagtatctgactgacatccttggggacaagctggacctgtcatcagtgagcagtgaagatgccaccacactcccctctccacagatgctcaagggcaagatcctcgtgaaggggaagaagctcccagccaacatcagcgaggatgcggaggaaggcgaggtgtctgatgaagacagtgctgatgagattgacgatgactgcatcctcaatgtaggatgca

SEQ ID NO: 157180 - DNA, 269 bp, Homo Sapiens
taaaaaataaaataataacagaaggatgaaaggtagagatttttatcccacacaagatgatgttgtattttatgggatggtgaggtcagagcctgggactccagcctaaatttgcattttaagttcagatagtattaggatgccagttagcactaatcttttctattatctgtatttggtgggtacagatatgggggatatgggacatagtttttggttttctcttgcctgtgtgtgtgtttgggtacaggtaaggatcctctacatcg

SEQ ID NO: 157181 - DNA, 381 bp, Homo Sapiens
cgggtgactcaccgagcctttcctgttcccatacactcacatgatctatgttgtgatttcttgtatgactattgtttaattctggtctccccaaaagctctatgaaaacagacacctcatcctcccttgtccacagctgtatcccagatctgccctagcacacggcaggttctaaataaacagctgccgaatgaaccaatgaggggccaggagaaagagcccagcctgccttgggtgatgaagaggatctattctgccctcacagaatccatttgagaacaggctgggtgcacatggaaacatgtcccgtgcctctgacaagagcagtgatcagaggtttactacataccaggtgctctaatggtgttcggggaacaggtg

SEQ ID NO: 157182 - DNA, 365 bp, Homo Sapiens
agactttcttggatttgtttggctaaggcctcatgcttctatttttgctaatgggttatggaaaatgaacagaatttggatgttgggaaagagaaactgctggaggaggccagaagaagtttgggaagaaagttgaagtagtgaaatggataaaccctgctgagtaagtgactgagtcagaagtggagaaagattgaacaaagactctcgttcttaccctgctgttgtgaaagagaattgcggctggcactttatttcttgggcttcagatcctgctagaagagtgcactaatttagcccttttggagaggattagatttattagtatttttcttaaaatgttttccctactgctccggacagtg

SEQ ID NO: 157183 - DNA, 363 bp, Homo Sapiens
aaaaaccagcctcccataagtgcgtgggattaccggtatgaaccaccacaacctgccaggaatttttagtttttagcttttgcaggagacttcaaggaaaggagacattcctctgtccaggaaacgggtaaggggaccatttctgcattgctggtttcccctcttggcagggtgggcatgaggcatcactgttcctgctccctcactcctgctcctcatgctcagcctgccagctcggcctcaactttgtgtgtctaaagtggaactgaatagtaggctgtgagaagataggaaagaggtagtgccaatctccttgcccagatcataaatccagactcagcagggtaaccacatgtacgcaca

SEQ ID NO: 157184 - DNA, 529 bp, Homo Sapiens
cccagatgttcttgttcatagattaaaaatgatcgtagatcctgctgacagtagctacatgccgtccctggttgtagtgtcaggtggaaattctctgaataaccttattgaactaaagacaatcaatattaacccttctgacaccacagtgccccttctgaatgactgcacagagtatcacaggtatattgaaattgctataaagcagtgcaggagctcaggaatcgattgtaaaatccatggtctcatcctgctgggacggatccgtgcagaagaggaagatttggctgcagttcctttcttagcttcggataatgaagaggaggaggatgagaaaggcaacagcggaagcctcattagaaagaaggctgctgggcaatcagcagctacgataagagccaaggtgtttgtgtggggcctgaatgacaaggaccagctgggcgggctgaaaggctccaagataaaggttccttcgttctctgagacactgtcagctttgaatgtgaacagttgaggatcctctagcctc

SEQ ID NO: 157185 - DNA, 507 bp, Homo Sapiens
ctagacgatccttacctgttcccaaacactgattgcatttcttttacacaggttgggtagggagagttgtaggtaaggccttaaacaaatgaggccgtttctggaaggatagggctgtgtggtcatgttcccacagccaagcttttgggatcgggggaataagagggtgtcacctagctgggttttgtcgtgagagaatgtgctgtgttcttggaagttaattccttcaaagatacggtgtacctttaaaatgcttaatcattcacacacgtgcacagtgaggaagagaattaaatggaacaagcagttatgggatgcgctctgtttgcacatgaggccctggggcgtgtgcaaaggtgagcctggtgttactcctgctgccgagggacttcgtttgctgagggagacagaccagccaggagcttctgccgcaaggatgctggtgccaagcgggccacggaggggccaggaagccctgtggcagtataggcaaggaaaggggagtta

SEQ ID NO: 157186 - DNA, 495 bp, Homo Sapiens
accggaactgccagagctcactggagcacagtctgactagcctagtctttgtaaaggccgaaggacatgtaggcatgatgggtgggtggcaatttgtaagcttcactgattctgtgggtggcattttttttctacaggaacaaagtgttgctttcaattgactgtttatgggatatataacaggactttactctggaaggcccgttccatactggagacaatgttcttactttgtttcttagaaggcgggggtagggggagacttgtttctgaggaattttttggttctcttgttgctgatccttccatgattagggacattagttacattgcttcagacttacggagagttgctcaaaatggttcagaattgtggttgctcatcagctgttcctttcagaagcattttggctgaaaatagaggttggggtagatgtttcaccaatgttgtacccatctttgaaatgtgttttgtgtttgggaacagtagaggtc

SEQ ID NO: 157187 - DNA, 421 bp, Homo Sapiens
cggactatactgttcccaaacacaggtctcacggtattctttctgtcctcatgcactgggcagaggttccttaacttcctttgttgcacattgccattctctcacatcccgtgcggtcaggaagcccttcctgaactctgacttcagttcttgctgcggtttctgcccatttttttcatatcctctgacagctgcgaggtcatctctgctctggcttttctccaagcagaacaagtgggggctctggaaaggttaagggacctcagtggccaccattatactttgcatctttcctgagaagtgagagttgaaagggaagcaggaaggcccatggtcagattgaaggaaggactttttagtttattatttactatagatggagtcttgctctgctgtccatgctggaagcagtgcatatctg

SEQ ID NO: 157188 - DNA, 201 bp, Homo Sapiens
cacctgttcccctaacactgtgaaaggggcctgactccccatgggggtgatgtactaggctctcgggagaccagaggcatggccttcctggatctacacaaattgcctgaattgctctcccttgggccacctgttcctgccctctgcgggagaaagtcccagactgcaggagaatctccctcccacagatgtgtgtgtttt

SEQ ID NO: 157189 - DNA, 188 bp, Homo Sapiens
aacctgttcgccaaaacttgtgtataaggtcaaaatgctgcagcggatgccagattgcagccacagttactgagcgcctctgtgctgccttgtgcactgatggcagcttgaggatctgactttcagcagcatggctggtagagtgtgggggtgcccccaaggaacagtggtgtttgggaacagtaagg

SEQ ID NO: 157190 - DNA, 381 bp, Homo Sapiens
aaatccctgaccttgggggaattcacagtctgatgcaggaggcagccaggttacagctgtcacaagctcaggtgacatgaatgctcatggaggaagcccagggcatcggatgggctcctgaagtcatctgatgcaccctgggggatcagggacaacagaggacctgccagaacagtcttgtaggaaaagccgtgtggatttcccagcacagagagcagcgccagcaccatttcagccccgactctctgaggcctcagtcatagaaccagccagttccctctggaaggaattgtgctgggaaggtggccactcagacagtgtgggaccccctatgacagactgcctgatctagcgagaaattcttcaacctagatgagtgaa

SEQ ID NO: 157191 - DNA, 414 bp, Homo Sapiens
ggctcatggtgcacagcagagttcgggcagccggcccgatgggggggaacaagctgctccacgctaatcactgtgtgggggtaatgaggagaggggttctactcttagccccatttcgggctgcttgttctgctgggcttttggccccaggtcactcctgcccatcccataagggctgctttacaattcttctttaacggggaaacctacagttccctccagactgcctgcgtcaaggtcctctccaaacagttcagcaggcttagtttagggctccccattagaataatgtgacaaggctgcccttccatgcaaggcagcgcccctcacatttcttcatgccatgtgcagaaaacgtatggtacacaacacacaccctctcatctctctccacattctctccgagggatctta

SEQ ID NO: 157192 - DNA, 435 bp, Homo Sapiens
tagccagaaggaatatgaaaaattagctgccagtttaaatgaagcaagacaagaactaagtgacgaagtaagagaactttccagatctgctggcaaaacatcccttgtggaggaggcagaaaagcacgcgcggtccttacaagagctggcaaagcagctggaagagatcaagagaaacgccagcggggatgagctggtgcgctgtgctgtggatgccgccaccgcctacgagaacatcctcaatgccatcaaagcggccgaggacgcagccaacagggctgccagtgcatctgaatctgccctccagacagtgataaaggaagatctgccaagaaaagctaaaaccctgagttcctacagtgataaactgttaaatgaagcccagatgacacaaagaagctaagcagaagtcagtccagctctcacacctccaac

SEQ ID NO: 157193 - DNA, 519 bp, Homo Sapiens
caagtggcagcgggctgagtgggagaaccacacccgctttcaaaaggcatgcagtttatataccaatagcatgtccacttggcacctccccgacaatctccacctggcagccttcacataccccaaaacaaacagtccagaccccctgtgcatgcagtggtggcagcagggcggggaagctgctcagatgttcctcagtagataagggacggatgtccagttggcgctcatgctgagtttcgttagcttggaagccctgaaccccatgcaggtgccgctgccatacagggccattctcagggtgtgcctaagtgattgctgtcaggcgcatttaccatgcagagggatgggaccatttaagcccacgccccggttaggcttcttcccagttccagctcccacactgtccgctcttcttcctggcacggagtgaggcccatgcctccctgttcacctatgccatcatctcctcacaagtagctctccagttctctctcctgcaagatcctctagagtgac

SEQ ID NO: 157194 - DNA, 164 bp, Homo Sapiens
ctcaccatgtagcatgggctggtcctgctataatttttaagcttgttccctgtacgtggtgtgcttcatgtctctggcatgactttcaatctttgttttgagatgttctttattttttagaggtttgtctgtgttgtgttttgctgcagttctctctcctgcac

SEQ ID NO: 157195 - DNA, 246 bp, Homo Sapiens
aggaaaccccccgtattaagctcattcaggcttctgccgttttggatttaaccgaagatgatttcgattttctgacgagtaacaaagtttggattgctactgaccgctctcgtgctcgtcgctgcgttgaggcttgcgtttatggtacgctggactttgtaggataccctcgctttcctgctcctgttgagtttattgctgccgtcattgcttatatatgttcatcccgtcaacattcaaacgggc

SEQ ID NO: 157196 - DNA, 618 bp, Homo Sapiens
tattgacttctactgtagacattttacttttatgtccctcatcgtcacgtttatggtgaacagtggattaagttcatgaaggatggtgttaatgccactcctctcccgactgttaacactactggttatattgaccatgccgcttttcttggcacgattaaccctgataccaataaaatccctaagcatttgtttcagggttatttgaatatctataacaactattttaaagcgccgtggatgcctgaccgtaccgaggctaaccctaatgagcttaatcaagatgatgctcgttatggtttccgttgctgccatctcaaaaacatttggactgctccgcttcctcctgagactgagctttctcgccaaatgacgacttctaccacatctattgacattatgggtctgcaagctgcttatgctaatttgcatactgaccaagaacgtgattacttcatgcagcgttaccgtgatgttatttcttcatttggaggtaaaacctcttatgacgctgacaaccgtcctttacttgtcatgcgctctaatctctgggcatctggctatgatgttgatggaactgaccatacgtcgttagggagatcctctagagtcacccca

SEQ ID NO: 157197 - DNA, 296 bp, Homo Sapiens
taaccctaatgagcttaatcaagatgatgctcgttatggtttccgttgctgccatctcaaaaacatttggactgctccgcttcctcctgagactgagctttctcgccaaatgacgacttctaccacatctattgacattatgggtctgcatagctgcttatgctaatttgcatactgaccaagaacgtgattacttcatgcagcgttaccgtgatgttatttcttcattgggaggtaaaccctcttatgacgctgacacctcctttactttcatgccttatggcatctgctatgat

SEQ ID NO: 157198 - DNA, 483 bp, Homo Sapiens
ttgcctgtttggttccctttgaagtcttcttttcggttccgacttccctcccgactgcctatgatgtttatcctttgaatggtcgccatgatggtggttattataccgtcaaggactgtgtgactattgacgtccttccccgtacgccgggcaataatgtttatgttggtttcatggtttggtctaactttaccgctactaaatgccgcggattggtttcgctgaatcaggttattaaagagattatttgtctccagccacttaagtgaggtgatttatgtttggtgctattgctggcggtattgcttctgctcttgctggtggcgccatgtctaaattgtttggaggcggtcaaaaagccgcctccggtggcattcaaggtgatgtgcttgctaccgataacaatactgtaggcatgggtgatgctggtattaaatctgcatacaagctctaatgtcctacctgatgagcagatctctagag

SEQ ID NO: 157199 - DNA, 281 bp, Homo Sapiens
cataaggctgcttctgacgttcgtgatgagtttgtatctgttactgagaagttaatggatgaattggcacaatgctacaatgtgctcccccaacttgatattaataacactatagaccaccgccccgagagggacgaaaaatggtttttagagaacgagaagacggttacgcagttttgccgcaagctggctgctgaacgccctcttaaggatattcgcgatgagtataattaccccaaaagagaaaggtattaaggatgagtgttcaagattgctggagg

SEQ ID NO: 157200 - DNA, 322 bp, Homo Sapiens
tcccgaaggcccctgcaattaaaattggtgaccacctactataccaaagacggagcgcctcttacgcttgcctttagtacctcgcaacgggctgcggacgtaccaagggcgtagcgccagaacgttgttttacctttaggacattacatcactccttctgcacgtaatttttgacgcacgttttcttctgcgtcagtaagaacgtcagtgtttcctgcgggtacacgcaaggtaaacagcgaacaattcagcggctttaaccggacgctcgacgccattaataatgttttcagtaaattcagcgccttccatgatgaagcag

SEQ ID NO: 157201 - DNA, 642 bp, Homo Sapiens
tagaggatctcaagttctggtcgtgtcacagactataacattctgtgccgcgttctttgttcctgagcatggcactatgtttactcttgcgcttgttcgttttccgcctactgcgactaaagagattcagtaccttaacgctaaaggtgctttgacttataccgatattgctggcgaccctgttttgtatggcaacttgccgccgcgtgaaatttctatgaaggatgttttccgttctggtgattcgtctaagaagtttaagattgctgagggtcagtggtatcgttatgcgccttcgtatgtttctcctgcttatcaccttcttgaaggcttcccattcattcaggaaccgccttctggtgatttgcaagaacgcgtacttattcgccaccatgattatgaccagtgtttccagtccgttcagttgttgcagtggaatagtcaggttaaatttaatgtgaccgtttatcgcaatctgccgaccactcgcgattcactcatgacttcgtgatacacgattgagtgtgaggttataccgccgaagcggtaaaaattttacttttttgccgctgaggggttgcccaagcgaagcgcgccaggtccctgccaaggggtttaccattgttccgcctttattttcgg

SEQ ID NO: 157202 - DNA, 287 bp, Homo Sapiens
cctccactatgaaatcgcgtagaggctttactattcagcgtttgatgaatgcatgcgacaggctcatgctgatggttggtttatcgtttttgacactctcacgttggctgacgaccgattagaggcgttttatgataatcccaatgctttgcgtgactattttcgtgatattggtcgtatggttcttgctgccgagggtcgcaaggctaatgattcacacgccgactgctatcagtatttttgtgtgcctgagtatggtacagctaatggacagatcctgtagagtc

SEQ ID NO: 157203 - DNA, 630 bp, Homo Sapiens
tccaacttaccaggctggtttacgaccggaccccgttcaaccagatattgaagcagcacgcaaaaagagagatgagattgaggctgggaaaagttactgtagccgacgttttggcggcgcaacctgtgacgacaaatctgctcaaatttatgcgcgcttcgataaaaatgattggcgtatccaacctgcagagttttatcgcttccatgacgcagaagttaacactttcggatatttctgatgagtcgaaaaattatcttgataaagcaggaattactactgcttgtttacgaattaaatcgaagtggactgctggcggaaaatgagaaaattcgacctatccttgcgcagctcgagaagctcttactttgcgacctttcgccatcaactaacgattctgtcaaaaactgacgcgttggatgaggagaagtggcttaatatgcttggcacgttcgtcaaggactggtttagatatgagtcacattttgttcatggtagagattctcttgttgacattttaaaagagcgtggattactatctgagtccgatgctgttcaaccactaataggtaagaaatcatgagtcaagttactagaacatccgtacgtttccagaccgcttgtacggat

SEQ ID NO: 157204 - DNA, 296 bp, Homo Sapiens
ttagtttaagggctaccaagaacactacatgtatgaagactagatggcacttcctcttactcactaaagacagcttctagacaacagcctgagcaaactacaccaacaaggaaggttcacaggcaatacatcaatgatgcagacacaaatgtgggactatttggtgcataagtgttggggaccactgctcgctcgcttgctcgctctttcatttatttatttatttatttggagtatagctctatgtcaccccaggctggcagtgcaatggagcaatctcgtttttttctgcaacc

SEQ ID NO: 157205 - DNA, 230 bp, Homo Sapiens
caaagaaaaaaaagatattcacaaatccttgccatgtgaagtgtgagctgtttccattaataccttcttccctgatccctctgctttaggctgctccaggccactttctatcttttcaattctccagtctggaggcaggctctacctagtcaagaggtagatgttcatctccctttcttgcagcctctaattctctgtagtgtttctactgaaggcttgggtagcccata

SEQ ID NO: 157206 - DNA, 223 bp, Homo Sapiens
cggtattagggctaccctcataacccattggcattctggtgcttcctttttgaaagaagggcagagctacctctctagtatgcagaggtgtgcagcctaaatgagaaggtattcaagaccctactagtgtctgacataataaatgtcaacttcacttgacgcagcttcttggctataaaccaaaaaacagcttgagcatggcccatgacttactgtactgacc

SEQ ID NO: 157207 - DNA, 642 bp, Homo Sapiens
tttaagggctacctgtacttcctggggctcagctgaacttcttgtcatgtttaaaatatgcaagatactatgttgtaagtgtgttactttgtaaatgaagaaaaaattaagcatttacttaaaacaggtgaggaaatacatggtttcataaatttttttgacgttatgggagaaagaatgtttgaagacctctccgtgcgtgatctgcaccctcaggacctctcagacgccatctccttcctgtgtcctcccagccccctctgctccagtcacacaggcccctttccttttcctggagcacaaggttgctcctgccttcaaggtcttccatgtgggctggccctctgcctagaactccctggcctctcagctgcaagtgacaagcagcctttcttcctgaggtctttgttctgacatcacttcctccgtaggaaacgtttgtgatctcccacagcctcctgtttgacattgcaggcccaccttcacccccacctctggtccatgttgcctgttctgtgtgattctttttgctccttcaatatccagtctggatcctggtgagaacaagtccccaacaggagagcagagccagaaggtggggctgtgctgggctcaccccactcagtggagctcaatcctgtc

SEQ ID NO: 157208 - DNA, 225 bp, Homo Sapiens
ggctacccgcgacacagcgcactctaacccgccacacatgcactgtcttactcctgtggcttgcctgctacacatgcactctaacctgccatgcatgcactctcttagtctcctgggctacctgctacacacgcactctaactcgccacacatgcactgttttgttcccacggactacctgctacacatgcactctcttggtcccagtggtagccctaaactaac

SEQ ID NO: 157209 - DNA, 220 bp, Homo Sapiens
aggctcggagagaggcacagaacagtctccctcagagcctccagagggaaccaaccctaatgacaccttgattttggacttctagcctccacaaaaacagactagaaggaaatcacagactagtgctaagtgtactggtgattggcttataaagttgtgcttgttttttgcgtaaatcgctgtatttgctgcatttttccaaattgtctaacttagcgat

SEQ ID NO: 157210 - DNA, 473 bp, Homo Sapiens
  misc_feature (85)..(175): n is a, c, g, or t
ggtcgactctagaccatccttagtttagggctaccctctcatttcaagtatgatgtcttctttgatccatgtgtatttttaagtnnnnnnnnnnnnnnnnnnnnnnnnnnnnnnnnnnnnnnnnnnnnnnnnnnnnnnnnnnnnnnnnnnnnnnnnnnnnnnnnnnnnnnnnnnngcaggaggctgaggctgcacgtcacagggagagacgggccgcggtgatgtatgagcttcctgttgataggcagttaagttggttcgggataacgtggcctgcctggcacgggtattcccagagtcacagatgctcacccgtgccagcgttggctgcttgggacatggggacggcgaggtccccacaccccacatgtgagctgctggtagctgggctgagcccaggtcccatccgtgtgtggggcgtgagtgtgcggtgccatcgggtctgcacgggcctcgcctcgtcccggacgctc

SEQ ID NO: 157211 - DNA, 420 bp, Homo Sapiens
ggctacccaggctgtggttactggttccctccaccatctcgatacaatgtttctgagataccctcatcagacccaccaaccaagaccctctggctctttgatattgatcgggaccctgaagaaagacatgacctgtccagagaatatacctcacatcgtcacaaagctcctgtcccgcctacagttctaccatacacactcagtccccgtgtacttccctgcacaggacgcccgctgtgatccacaaggccactggggtgtggggcccttggtatttaaggatttccagggaggctagaaaacctcttcaattggaagttggacctcagccttttctcacgactcttgtctcatttgttatcccaacctgggttcactagcccttaactgcggtagccctaaacttacgggatcctctag

SEQ ID NO: 157212 - DNA, 254 bp, Homo Sapiens
ggcatgagccaccatgcctggccgacgacgtcgcttctgaggttgtcctggggattatctaggcctactagttacagtagccagctagtcagaaagagaaaagagcctgaaggaacaattgtggaaagttttatgagccactcctgtaagtggcatatgtcactcctgtacgtatttcattcattgaccagaattcagtcacatggccacacctcactgtcacgtgaccatacctaactgcgggtagcccataa

SEQ ID NO: 157213 - DNA, 402 bp, Homo Sapiens
  misc_feature (232)..(323): n is a, c, g, or t
taagggccatgaaacaatgatactgtaattgtggtgtagtggattgactgatgaccccccaaaaggatgtgtccacatcctaattcctagataatgtgattacattacatggcagaaatgtgaatatcaccttatgtaatatctaatgtgttaaacatatatgtttatatgattaaggactaaggacaggtgtgattaagaattaatgaatagggcttctcatggtgcgtcnnnnnnnnnnnnnnnnnnnnnnnnnnnnnnnnnnnnnnnnnnnnnnnnnnnnnnnnnnnnnnnnnnnnnnnnnnnnnnnnnnnnnnnnnnnnttctctactaaaatacaaaattacttgttgtgtgtgcatgccgatccagctactggtaccctaactcggatcttagagc

SEQ ID NO: 157214 - DNA, 486 bp, Homo Sapiens
cagggagtacaactttgtttgagaacgaaaatagatggagacggcattcagacaccctccttggattgtggcaatatcatctattccatatggcccagagcatttcctgccatgtctagacatgctggcacagatttctctgtgggtgtctgcctgcctgtcagtgacccacagcgaccttccctcgggcctcctgttgaaaggcactcctgctttctgccctccctcttctccatcatttgattgttccagcaggtgcatgaaatgtgggagtgttgtcacttcagagttaatcagatttgcggtttactccccctttggtcacaattctgtgtcacataaaaaagaaaatcacaaagtaattgctttagagatgttgttatgtcaataatgggagagttttaaatatgaaatgagcaaggaggaggatctaaattaatacacacaagcaagaaatgctttattcaaactgagagcacccaggta

SEQ ID NO: 157215 - DNA, 449 bp, Homo Sapiens
ttcattcttcatttaaatcagtgacttgaccagattgcaccttagatcaagggtctttatgctgggtctaaatgaagacttcccgaaagtgtttgctgtatcatgtggaatgtgcacatgttcatttttctggagttaatctagaactctcattagattccccattcaacccaagttagtaaccattaccttacattagttagcatgtaataatattgttgcaatttttacgtaatatgatatataaaggcaaggtctattttcctgctataggaattaatggtcatttgtcctagtgtcatgctgacaaaggccaatgtcaggagttaggagatggttaaatagttagcattataatgtaatgagcatcagttccacctaagaagattggtcacccaggaagactgatctcctgtaacttgtgtttcaattctggtagccctaatcat

SEQ ID NO: 157216 - DNA, 488 bp, Homo Sapiens
agtgtgtgatcatagctcacgagtctaatcctggctcagcaatctcccactcagctcctgagtagctagaactagaggtgcatgccagcacaccagctaattttaaaattttctgtagagatggagtttcactacgatgcctaggctaatcttgaactccaggcctcaagcaatcttcccacctcagcctcccaacatgttgggatgacggtcgtgggccaccgcacctggcccctcaccttctgtttcagcagcacttgtctctgctccatgtccctcttctctcgtgctgaattcaagaccagctggtgcaactgggcacaggaagggcatctcagatgtccaaggccccccagttaggagtccctaacctccctctaccacctgctgtgccctggggccccacctgggcgcccagctcctttcgatactgggacagccggctcagctcctcatggccctgctggaaatgggtagcccttaaactg

SEQ ID NO: 157217 - DNA, 239 bp, Homo Sapiens
cagtttaagggctacccatttctgaagctattctctctgttaccttagggcttctgttttggttttcagactctgaaacctatgtgaccatttctctttccttatttaaggcccctttcctttaccctctctataccttgagtttttacagtctcccagaaagcttgagattgacagttcatgcaatattccagaagaaatagtctgaaacaggtagcccttaacctacggatcctcta

SEQ ID NO: 157218 - DNA, 398 bp, Homo Sapiens
  misc_feature (75)..(107): n is a, c, g, or t
  misc_feature (221)..(221): n is a, c, g, or t
  misc_feature (250)..(251): n is a, c, g, or t
accagcactatgaatgattaaaaatacaatatttttcttactaagtaagactaaacattctaatcccctactggnnnnnnnnnnnnnnnnnnnnnnnnnnnnnnnnnttttcagaaagtcagcagtggtaacaagtcagtaagtggaagaactggttcaaagtttaagaattcagtaagataaggtatataggagctgtcagatcttcttttgcccacagntataaccatttctgacagacaagccctannaacacttagctgagagcttgactgcacaggaccacggctagtgttggaaataaagactgagccggacttgacatacacaactccggacagatgggacctggaatgggtctgctccaacagccacagttccagaaagagagcatccat

SEQ ID NO: 157219 - DNA, 334 bp, Homo Sapiens
attcgcgtccccatgtgatggaagaacacgtggtcatattatggatgaccaaccggccctacccattctcggccaccttttgataatcagcactctcaagaccttgactccagacagcatcccgaagagtcctcagaacgagggtactttccacgttttgaagagccagcccctctgtcttacgacagcagaccacgttacgaacaggcacctagagcatcccgcctgcggcacgaagagcagccagctcctgggtatgacacacatggtagactcagaccggaagcccagccccacccttcagcaggcccaagcctgcggtagcccataactt

SEQ ID NO: 157220 - DNA, 420 bp, Homo Sapiens
agtgataccgtatgcggatagggtgtgtgtgggggtggcaggaagctctgtcagccttggtatggctgatgccagtcagggtcatagacacctgtttgttctcccctccctgccacaaacgttgaggactgtgaacattatgtcactgtgacctgcttacaatggtaactaagcgttaggcagaaggggttgaggaggggggagacataggctcttctgtaatagtatggtgtcgacatggtgttctttcccctcccttttagctattgaaacaatccacccggtagagtgaacagcttgaggttgatcctggcctgtgataagagccgggtcagtatacttgttagggacatgtgagagacctccccgccacactgcagcattcacagcacctttcctggacctcctgtcacctcgcag

SEQ ID NO: 157221 - DNA, 396 bp, Homo Sapiens
  misc_feature (59)..(59): n is a, c, g, or t
gtctttggctctaaagctatcacgcaataagctgcaaggagcacaaatgatcccttccntagtcctctaaaaagtgtcaacctccattctgtcagtgcttctgaatctagcataagaccaagctttccgtccggcccaccggaaggcagtggctgcgccggcacctccccggctctggccttctaatgtctcacacacagaggctctgctctaaggccaacacttctggctctctcatcttggccacatttggcccacccatgttgactgctttctcgtgtgtgattcagggaaacagctccatagcctcaaacgttaatatctgaagatttagatcccaggcattgtggtggtgtgcacacctctacctcatatattagcacagggtagccctaa

SEQ ID NO: 157222 - DNA, 602 bp, Homo Sapiens
atgcaactgaaaatgacggcatttaactcttctcttctgtaatctgtgttattttcatgatagatcaggtctgtatgacgctgcatcttctacctccatccatacccattctcttgcccctcaccccttacgcttcatcttcacccagtgatcccactcagcttcaatataattgctgttgaacagtggaatgcctttgcaccaccttgcagaggttaagtcgggtttccttgcagccatgatccaattctcaccccttcctcacccccagtggagaccactgcaattaaggaaatactaccttttcttaaacggaagatgaatgtcagtgctacaccaaggcataataagatggctcccagaattaccaagtgagtcctttcatttggaggatgtgccagagttagttctgggatgaccaattcagctgtatggttttcctcaggatctaatctcctaaaagtcgcagtagaaatatctcattagttgttgtgttgattctcagtgtgctggtcacattgattagcttctcctctctcttggaattggtggtggtggtcttaccactcatacttgatgtctctgcttgtccagatactcgc

SEQ ID NO: 157223 - DNA, 431 bp, Homo Sapiens
  misc_feature (371)..(371): n is a, c, g, or t
tgggactgtggtggaccccagcttggaccaggccctgccagagatgagtgaggaggtcaacactggaagacaggagggcagtgaggctccccatgggggtgacctgggtggcagtcccagcccagcagaggtggaggagggcagctgcacactacacctagaggccctgggagtagagctggagtctgtgactgagccaccccttgaggaggtcactgaaacagcccctatggagttcaggcccctgggactggaagggccagatggactggaaggaccagagctatctagctttgaaggtattgggacttctgacttgggtgctgaagaaaatccccttctggaaaagccagtgtctgagccctccacanatcctccatccttagaggagctcctaacactggtagccctaacttacaggatcctctaga

SEQ ID NO: 157224 - DNA, 403 bp, Homo Sapiens
gatccccctcagctactcagtgaggctctacccagagcaacttccagtcctgtctgctccattcatggctcagagccctacacaggcatgctttttctcttttataccacgcctctactggactttctctgtcgttctagcaccttacaacaacaggtcaggtaagacttagccaaagtttgctcagttagaaagtggcaaagccacattcagactggcaaggtctatgcatctccaaaatccctcgtaatctcttcattgtactggagatcatatctctccctaccttctcagaaatgcgagtgcctcaagtgtgaggggtctttaaaacattcatttttaaaagtttttaaaaaatccaaccttcaagcaattcttgtgcctcagacttctgagtagctgt

SEQ ID NO: 157225 - DNA, 183 bp, Homo Sapiens
cgatgttggctaggatggtctcgatctctggtcagagtcttttctgtaaatatccttggtaaagaagcattttagactgtagctgttgcaatgctttaaggaagaagcaaaacaactgtcagtcttcctgaaatgaagaaactacaccagggctgctatatcagagcaaccccaaccagcact

SEQ ID NO: 157226 - DNA, 383 bp, Homo Sapiens
cgatgctgaatatttttttaaaaggctaggtaaattgcaaggagtttcatatacattttaacactgctctccagaaaacgctggagatgttatactctttccagtatatggaaactgttacactctttcctgtgtatcttcccattttgcctcattgttactcatttaaaagactattactcagtgttagtaactttctgttcacatgtttagaacttcagctgggatagaatagaataggtagaatttttggggactggccatatattttctgtcccagacattctcttcatgtggtgaggctggacttcctcaagctatggtggtctcatggtagttggatttctcatatggctgctagcttctaccacgagcgagctttc

SEQ ID NO: 157227 - DNA, 1000 bp, Homo Sapiens
tttttttttttttttttttttttttgacattgaccagaaaaagtgtttattcatcaagtctttaaagatacaaaaacacgtgtcttctgtggagctctgagaacaggactccagcaaagcacttttcagccttgtggtcttcaagcatttccaagatctttgctgcaaggagcattgtactcagcaattgcaaactcatccgtctcgtagtaatcatagactttcactatggctggtttcagatctcttactgggacatcttgcagaaccgtgaagaacaagctcagtgtctgatttgacaccttatcaaggtaaatcaagacatggttgctgctgacttctgtccggctcacatggttagatctttcaagcattttcactgttggcttcaggggaatgaagccagagaccatcttcacatcaacgatcgccatgttggaggcagagcggctccctgtgtaactgacacttagggagatttggaagctggtgtgggctttgggttcatcacaagtttgaggcagagtctgcactcctaaagcaaaggggaactcttccttttctgggagaatattgtatttcaaggatgtctggaggtagacacatccttctcctgtcactttcatgctgtattccccaggcagctctggcaatgagacctgctgcagtaacaggcggttgttgttgtccacttggaatttgctggaaaatgtccctgaagactggatagtcacctgtgcagccttcccagtcctggtaaatgtggctgctccatatttggacagagcatggagagccaccactgtgtcctgggtggaggagaaaccgccctgggcattctgctgcttcgtgatccacttcacgatgttggttgcagaggtcaggtcctccgaggttggggctggctgggccgtgagataagcgaggagcacataggatgtcatctccacctcagcagagggagcctggggttcgtaaaaatgccccactggtgccttgg

SEQ ID NO: 157228 - DNA, 1000 bp, Homo Sapiens
atgataataagcactgaacaattttattaagttctttgccaaaatgcaaacatatgaaatgagattgtgtacaatagaccaaaggctacctagagaccaacagtcatataaaaataatttaaggcaagctttattgatttattttaaataaggtaagtgaaatatgggctcagaattaaataagattttcaagaaagttcttgtagctgtaaaataggagaatatgaatgtcaaaattttgactgtttctgtgccaaacagaaagtttcacaaatgctttccaaactgcaataaaaagaactttaataataccattaagtctacaaagttactgtcaagttgacagtattcaaatactacaatattttctaaatgtaaattttgtaacatcttgaatactttctaagcccacttttctgtcattacaaaaataaaattccaagaaatttctgctacattaatcttaagagatcaaaataacctatgtagttttctaggttaatgtaattcaagtaaagtggtactaaagaaaacacatcattttaataaaaaccaaacctgcttaagagacataacagagttaagcaaaagtataaactactataataagcagttgcttagatttaatataagaggatttgttttcactggaaaaaacgttaaagccctttcttttttctggagctgaaacagtggcttgtgttctagttattcaatatttctacagtaatttttttaatttttgtacttgtcaatgtgttcacgggctacaataagtctttgaatttgtgaagtaccttcataaatctgatagattttggcatccctcattagtttttctacaggatattctgtattaaatccattgcctccaagtatctgcacagcatcagtagctaactgatttgcaatatctccagcaaatgcctttgcaatagaagcataataggtatttcgacgaccagaatcaacctcccaagctgctctctggtaactcatt

SEQ ID NO: 157229 - DNA, 1000 bp, Homo Sapiens
caggtttcagcccagctgtatttttggctgggtgggctgggggccgagcaggcaggcgcagctgcccatccccagcacacaccacactcacactacctctacccagatagggcaccatccactgccccccacccccccagccccctgcaggcagaaaggaatcaggtgctcctgggctattgaatcactttaggcttctctggactgttgctaattttttgtagtgtcttcttgatccgcagcgcggtgagtcgggcagaggggtttgggtaccagcactcccgcatcatctgagctaggcctgagaggaccgggtctgcagccagccggttagggatggtgggggtctgctgatccacacacaccaccttcttcatgtcctcaaagctggggtcattgggcaccacatcatagaagggtggtctatagtcctccacgatgccattcacgatggtccggcgggcaatctcccacagcaccaggccaaaggcccagatgtcagtccacttgtaggactcaaagcagtccgtgcggatctgctcgtccagcacctcgggtgccatgtaccgcttggtgcccactctcgggttgttgccgatgtccaggtaatcgctgccctgtgagtgcatcacagccaggcccaggtcggcgatgcaacactgcaggttgctcttgaccagcacattgcggctcttgaagtcgcggtgggcaatggctggtttgccctgtgtaccgaagatctccacgtgcaggtgcgccaggccgcatgccgcggacacagctagcctcagagccagatggggctccagcgtctgtctctgcagaaagtcgtagagggagccgtgctcgtggtagtgcgtgatgagccacagctgcgtgctcgagttgcgggaggtcatgtctgaggcgatgaagcctaggatgttgtcgtgtctgagcaatactgtgttatagatctcagtctcccggaaccaggactgttcatccctcgaggagaaga

SEQ ID NO: 157230 - DNA, 1000 bp, Homo Sapiens
gcttcaacagccattttactcttctttaattctaccgctttgggcatacatctcatttgctgtggaagaaggtctgacagcagggctgacagcaccgattcataacacattcttttcatcatacaaagagtaagaccctagaataatgggaccatctgctaccacgacagagctgccttactggctgtagaaaaagactgcttgtgtgggagagaagaatgaggacagaggaggcatctggggcaagtgagcgtacaagtatgtctacaaattcagaatttggtggaaaatccaaatttgacttcaacatgatagagaattgatgagaaatagctgtactgtttccaaaatttactgaatttggaacctgaggttaaaacttttaggataaagcaacctcaggttcagactggccttgggaagaaatggcaatcacagacggtaatgagtgtcagtgcttgagaagaagaattgccaaaggcaatctacatatttgacttgactcaaagagaggggaaaacaagtctcatttaaaaaggatgagtctgcagcaaaaaatcaaagggaagctggaacccctgcccacctctccattccccattctgctgctggtgcctgctcttcctcacagtacctcctgaaaagttcagaattcagttaatacagaattattgggttgattttcaacgtgtagtttaagatgaagagttccgtttggtttaaaccacttcacctaacctcttggtaacggtagtcctgagagttcgcagtgtcagtgaaatcgtcctgtgaccacgcgtcaagctgctgatggggcacagcaacttccgggcctatcatatctccttgacctcgtccctcaaatctggtagtttctgcaccgagggacacagtccactgcgatgaagtatgttcaaaatcgttttctataggcacctccttccaaagtccaatagtgcaaggtggtcaggaagacttggaaggaagctgcaaaagtcca

SEQ ID NO: 157231 - DNA, 1000 bp, Homo Sapiens
tttactggggggactgggggtggtgcccggcccgagggctgagggcccgggaaaggcacacggtggcggtggggtctctctcgggcaggcgctggctccgcagacagctccccctggtgacccctctttggcactgagctgggaacatggtgtccgcactcctggctggcaagcagaggcccgtgtgccccggtggcggctggcagtgtaggctggcggggtgacggccgcaggggctgggtttggcaccggtgggagccggggccccacgggactcagaggctgggccgcccccgctgctggcacggtagtcacattggccacggagatggctacgaatagggaatccaataaattaggctgtagaaagaggtggtgaggggccgagggggcggggcctgcattctcgcttggcaggcagtgctgtgcgtccctctcccctctcccgtgggatctttggggctcttgtgggggagaggatgcaggtgaggcgctctgtgtgactgtgggtcccactgggcggcttttatggcatcccacggaacgggagccttggctgaccaccctcaggggatggaccatggggtctttgagagactgacgaggagggaatcatggggactcgagtctctggagggaggccacctgcagtgccaggggctgtggcctgacgggctcctggggctcggctgcgctgctgtgtggccagcactgggccccttgtaccccagcttcctccgcggagcaaagtagaggactcactgccctggacagggcccagtcactgtggaacagcgcccccagggagtgggagggacagggcgagggttacgcagggcgccaccctccacatctactttcccgagggcgggaagggttttctaggaggaggggccaggcatgcaggggcggggtgcgtgcatgggtgggtgctgctgtctccttcatgtgatccgagcttgggggcggggcaggggccggggacggttgtgtcaggtgg

SEQ ID NO: 157232 - DNA, 1000 bp, Homo Sapiens
ttttttttttttttttttgcatgtatctccattgtttatggaagcctgggaaaacaacagaagtagatggtattcatagacaatttcagataacatttggcaaaaatttaaaggtcaatcatttcaaagatagtaaattgaagtgtttacaaagtggtgcagtagacacagtacaggcattggagtcaaatatcttagctcaagtcatagcacttttatttactggcattttagctttaaaaaaaatcattctcattacctggaagttataaacacaggtaaggggtagataattaactacttgatgtgattttcaaggcaccaggtaggtgtattcactcctatctgagtgccccaccatgcttaaaaaggttttccctccccaaatacagagtgtatgaatcttatcactaaaaataaattttcatttattcaacaaatatgtatgcatgtatcatcagtcaccctctgatcttttaaaacaaatcagggaagatatattaagtaaattatcttagttaataagtgtcagtttattttccttcaggaaggaagacttccctccactgtataaggggacacttaacatgtaccccagaactgtacctaccacaaataaagtttccttaacaggcagggattctaaaatatacttctgaatatcttaatcgtattaaatctacctctaaagttccatgtgatttgaattttctgagcatggcaaagtgctgattatacttcactgctgagatcttgccctaacatacagggtgataaaaagtgttcatgtcagacccagttgcaacaagaagatgaaggggcaagacagtttacactgtaaagcctcgaagagactgcaatgtctaagaatcaatttcaagtacagaattctataatattaagaaagaggaaattatgtgggcctattatgctcaatgcttagtctgtgctaggctgcttgcattgctattacatgaatttacttttactgagctccagt

SEQ ID NO: 157233 - DNA, 1000 bp, Homo Sapiens
ttttttttttttttttttttttttttttttttttttttttttttgcgtgaaacttggtgaatctttattaaactagggtccaccccaggaggacggctggggcggggacagggtctcccgctgcaggctgcgcggaggcaggaggcacggggtggcgtggggtcgcatggctgcaggcttcggcgttcagtgattgtcgctgggcacaggggcggcgctggtgcccacggcagcctgcaccttctccaccagcccggcccactggcgctgcatgtcttccaccaggggctcgaaccagctcttgaggcgggcctggaaggcctcggcctgcaggcgtatctgctgggcctgctcctccagcttggcgcgcacctccgccacctgctccttcacctcgtccaggcggtcgcgggtccggctgcccatctcctccatccgcgcgcgcagccgctcgccccaggcctgggcccgctcctgtagcggctggccggccagggagcccacagtggcggcccgcacgcggccctgttccaccaggggccccaggcgctcgcggatggcgctgaggccgcgctcggcgccctcgcgggccccggcctggtacactgccaggcgcttctgcaggtcatcggcatcgcggaggagccgcttacgcagcttgcgcaggtgggaggcgaggcgcacccgcagctcctcggtgctctggccgagcatggcctgcacctcgccgcggtactgcaccaggcggccgcacacgtcctccatgtccgcgcccagccgggcctgcgccgcctgcagctccttggacagccgtgcccgcgtctcctccgccaccggggtcagttgttcctccagttccgatttgtaggccttcaactccttcatggtctcgtccatcagcgccctcagttcctgggtgacctgggagctgagcagctcctcctgcacctgctcagacagtgtctgcacccagcgcaggtaatcccaaaagcgacccagt

SEQ ID NO: 157234 - DNA, 1000 bp, Homo Sapiens
ggaatgggggtgtggtcagttggggcacccaaagacaaccatgctctcggtgaaggcgccgaggtcctggcattgtttctggttctcttcgtcttggcattcgtcctcctcaggccagtgctccacccaagtgtccttcccgatgatgtagctgaggttgggcttctctccccagaaatcggaggagagaccccacatgaggtagtgtttcttctcctccagcttcagggcttctctgcacttgatggggctgatgaacgtgcgctgctgtccaacctgcacctcatccgagcctgacttgatggtctgctcaatggccatgatgtactcgtcaaagtcattggacagctgaaccttgaccagtcgggtcttgtacacatagtccactcctggctcacaggccttgtccagccgttcttccagggtgaccttgtcatccgacttttgtatgaagcaattctcctcagcacagcggcacagttcatcacggcagagcttgttcagctttccatcctccttttccggatggtagaaccgggtacagctttcctccaggttgtaataggcgtagaccttgactgctccaggctggataagctctacattaaagtattggtgaactttgaaagctagacagtcatcctcagagtgtgagaccttgtccaggtagatgatgagggtgttcctatcggagaaggctttgtccagctcatacttggagatgtatctgtcaacaccattggccagctgcttcaggtcatctgtgtctggagcaaagccagtcatcatggatatgtccaatatagacatagtggcatcctggtctccccggtacctggtacagatctcaaggatcatagtgttcttggcatcctgaggcctcttttctgtttccggtgctggttttatggtgaccttgaggtcgaatttattacaggtgagttgatctttggccttagcatggtacattgtcaccaccgacaaggtgccttggcctttt

SEQ ID NO: 157235 - DNA, 1000 bp, Homo Sapiens
ggccggaatcccggtttttttgtactgagtttcagcagagattaaacattttatataaatgactcttaaagctttacactttgggaccagtgtaccttctcgtgcagaatacatttagatataaaaagacgttattaatacattgcacagttttcaaaatttaaaaacaaaaccgaacgctgctctgcggcagccgccgccggttgctgctacatgaacggtcccagccgaggcccagcgcccttccaacgtccgctgccccggcaggttccctcggggctctttgggctctaaattggctcaccgcagcctcttgcgcggggtctgctccaccgagcccacgccaggggcggcgcttggagagggacacggcgcggggacatcgcccgacgacttctcaggcgctgatctcttgcgcttggcgaagaaatcggagatcagaggcccggacagcttcttgatcgccgcgccgttggcgctggcggccgcggtgccggccgcgggacgtcccgaaatccccgagtgcagctggtcagcgagaggctcctggccgcgctgcccctggttcgcgccctgctcggcgctctcttgaggcgccgcgtccggggccggggccggggcgggggccggggccggggccggggccggggctggggccggggccgcgactggagccggggccggagccggagccggggccggggccggggccggggccaggaccgcgaccgcgaccggagccgcgaccggagccgcgaccggagccggagccggggccggggctggagccaggaccgggactgggggcggggtggacgccggggccgggaccgggacactaggcagctgctccggcgcctcctcgaggccgtcgagggactcagcggccggctcgaggggcgggctgacagccaccgcgaccgcgacgggccgcggcgccagcagcaggcggcagcgccccacctgcaccgtctcgcggtagaacgcgggcaccgagtcg

SEQ ID NO: 157236 - DNA, 1000 bp, Homo Sapiens
atatgttcttttggaaaaccaaacatgctttatttcatttttttcacaatttatttaaacatctcacatatacaaaataggtacaatttaatttttctgcttgcccaagaaacaaagcttctgtggaaccatggaagaagatgaaaatgagactggcaaagaacaaatgctgaatctgaagaagatttgggcaaataatctgcatacttttaattgggaataagatggaaaatatgaatgctaaatcaaattttttaaaaaatacaccacacgatacaactcaatacaggagtatttcttctcaaattcttctagcaccatcaacattcttcaagtatctgaaatactattaattagcacctttgtattatgaacaaaacaaaacaaggacctcagttcatctctgtctaggtcagcacctaacaatgtggatcacactcatgggaaagtgttttgaggtagtttaaacctttggaagtttgggttttaaacttccctctgtggaagatattcaaaagccacaagtggtgcaaatgtttatggtttttatttttcaatttttattttggttttcttacaaaggttgacattttccataacaggtgtaagagtgttgaaaaaaaaattcaaatttttgggggagcgggggaaggagttaatgaaactgtattgcacaatgctctgatcaatccttctttttctcttttgcccacaatttaagcaagtagatgtgcagaagaaatggaaggattcagctttcagttaaaaaagaagaagaagaaatggcaaagagaaagttttttcaaatttctttcttttttaatttagattgagttcatttatttgaaacagactgggccaatgtccacaaagaattcctggtcagcaccaccgatgtccaaaggtgcaatatcaaggaagggcaggcgtgatggcttatttgttttgtattcaatgattgtctttccccattcatttgtctttttagagcagccatcta

SEQ ID NO: 157237 - DNA, 1000 bp, Homo Sapiens
gaattttaatatgatattttattatgggtgtctgtaaggaaaaaaaagatcaacaaccacatacaagcttacaaagttaaatttcaacacattctctatgctagtgtgacaaaagcagccccataatttggtttttattgttgacctttacaggatgaaggaggagaatccctgtggcatgccaatgaatctttctgatgggagacatgtacagattttgtgcatttatgttctgaatgcaagtcaacaattctgatctagagtttaaaagtgaaagtacattagcaccataacatgcgtctttaaagccttcccaaatattagtaatcttgaccagcaatgacaagaaaaaagaggagcacctttacaagcagttgatatccaatattaaaataattgtggctttaaaaatatttctttaaattcttgcattacacttttctttttaaaccaatcttccaggagattaatcaatgaaatttataagttttatcaacgtataaaatttttttcatcttctgggactcatagaatacaatctgtgtttctgaccagttgaggtagttaaaatagggagggcttttctaatttcgtatttgactatttcagaaagaaaggttatcttttactggtgagcacagtcattgctctgcagatgggctaggattcaaagaatataacacagtgttgttatcataaagagtgttgaagtttatttattatagcaccattgagacattttgaaattggaattggtaaaaaaataaaacaaaaagcatttgaattgtatttggtggaacagcaaaaaaagagaagtatcatttttctttgtcaaattatactgtttccaaacattttggaaataaataactggaattttgtcggtcacttgcactggttgacaagattagaacaagaggaacacatatggagttaaattttttttgttgggatttcagatagagtttggtttataaaaagcaaacagggccaacgtcca

SEQ ID NO: 157238 - DNA, 1000 bp, Homo Sapiens
acaaatatttacttaaaactcacaaaaacataagcacctttaatccatcgggaaggcacctgcagaatgacatttggcctctaaatggatcgtgttggaggttgttaaaaacggaggctttggtgatggtgggatgacctttacgaggcttaccttggaacattttttgaaggtcaggggaaatacacatcttcaagttgaatttagaaaaaaatatagtgtccaaatctggcagtccctcccccaacccctgagacctattcacgaacaggatgggtcgggcgagctggggggctggaggcatggccccgctcccggggcgcatgggtgtggacagagcgtggggcgggcccaggcgctggggtgcagctaggtcatgtgattcagctccaggtgggggcgcggctccttccctctgttctctccgggctggggtcccacaccccgtggtgccgaggcgtagatgaagtcaggtgggaggggagggagaagccttcactgtccaggatcaggacgtgcacgggacactcacgaagcaatggcatgctgaggtacgaggttgctgaattcggctcgggagcccgggctcggcggctcctagcccatgaagcaagccggccccacttcaaatccaaatttctgtgacgcttcaccgaagtcattgaacatgatgtccacgatgggcacctgctccactttgggggtgtcgatctccagaaccgtcttctggtagcctttcttggtagcacagccgtccaccagggcgcggatgtaggggttgttgtcataggacatctcctcgtcgttggagcccaggaagcggagggccttgtcgtagctgcccgtggctgcgtcctgccaggccactgactggtagcagtggtaggtgacgttctggtgggcagaggcgctcagcagccgcaggaaggtcatctgtaccacacccacagggttgccctcggcgtccacataggagagcagtttcccacgcttgaattca

SEQ ID NO: 157239 - DNA, 1000 bp, Homo Sapiens
ttttttgccttttaaaacagcagctttaatgccccccagaatcagcaccatgtcatcacaggcttgggtcaaggggcgggtcagacgccagtcacatccgctcactgcccacagccacccccccacagtgagtcatctgccagggtggcaggagccacaatgggggtttgtccacaggggggaaggctagacccacgggaccaagtcactgaaataacggacgtgcactcgcacgctcacgtgcacacaagcctctagcaccaaggggagggacagtggggttctgctgagaccccgactcctccaggggatgctgaatctcagctcattatctgggcctcagtcctgggcagtacctgtcccctggctctggaccacccggggtgggcagcggcgctcgcaggcctcacgggtcccaaaacggttggcattccctccacagccaccatagacaaaagggtgacaggcctctgtgctgcctgtcacagcccgatggtaccagcgcagggtgtaggcagtgcaggagccctcatccagtggcagggaacaggggtcatcactatcccaaggagcttcagggtcctggtactcctccacagaatactcggagtattcagagtactcatcatcctcagggggtacccgctcttcctcctctgcatgagagacgcggagcacaggcacagcatggagctgggagccggcagtgtctgcagcataactagggaggggtcgtgatccagatgcgatgaactggccctggcaggcacagtgctgactcatctcttggcgcacaaagccccggatgtcatcctccgtcagtgcagcttctcccttctcgcctcgaggaccggcaggccctggccgcccctgctcccctctctcgccaggagctccagggaccccaggagcccccaccactctctctccggggggacctcgctcacccttctggccctgaagtccttcggggcctctgggaccaacactgccaggtggc

SEQ ID NO: 157240 - DNA, 818 bp, Homo Sapiens
tttttttttttttttttttttttttttttttttttttttttttgccgatgctactattttattgcaggaggtgggggtgtatgcaccgcacaccggggctatgagaagcaagaaggaaggagggagggcagagccccttgctgagcaacaaaggccgcctgctgccttctctgtctgtctcctggtgcaggcacatggggagaccttccccaaggcaggggccaccagtccaggggtgggaatacagggggtgggaggtgtgcataagaggtgataggcacaggccagcccggtacagacccctaggcgtcctgacaggtggatttcgacaaggtcattgtgccctgccaaggcacagcgtagatctggaaagagcagaatgctttccttttcagatgtggctggtcatggaaggggcagttgtccaagttgggctgggtcttggtacacgtggttcggcccagctccacgtccaagaagtagttcaccccagctacgatctgcttgcgggcgcgcaccacctgcagcgcgcggctgtggtacatgtcgttgctggctttgttgtactcgccgacggcaaagtccagtgcacgccgcacaccctcctcctccacgctggcgtccatggggcctcccaccaggcgcggcggcttgccgggactggagccggccgcggggctcacggccagggccacggccaggatggccagcaggagcagcggggcgcgcaggggcccggccatggtcggctaggacgcgggacgcggggagtggggcgcaggcgagaggctggagctagatagagaggacccgctgcg

SEQ ID NO: 157241 - DNA, 674 bp, Homo Sapiens
tttttttttttttttttaaggattttaaaaatatatctattttgaaaatattctgaaagtaattaagatcacctattgggaaggaaagaaatcaacacaatgaaatttaggaagagaaatgcaaaagcagctgcagaatcctgccccttccaccccaaggggcacagcccggagatgaagcttattttaggatcacaagtgcacgctctggtagacggaggatgactttgtcagtcttctggctgaagggccttgtccaaagtcaggatcagaaataggtcagctcatcatgcttggctttgttggtctggtagttagataaggtcaagggcttgttttcatgagggagagattggaacactcgcaggtgtacgaagtcctcgtcgccgacgtgcaccttgatgaagtagtttgtccccgcgaccacctggctcttgaatgacacggccttaaacacagggaacttcttgttttctttctcttcaagctgggacctcacctggtcggcgatgtgctgggtctcggcggtggccggctgcgtggcggagggcgccccgcacatcatcttggcggcgacggagggaatctggcgaggggactcggcgaggggacgcggcggctcctcagcccaagtaggcgctggggtcacgtgacgcgcgggcggaaccaagggg

SEQ ID NO: 157242 - DNA, 1000 bp, Homo Sapiens
ttttttcaagattatgaaagtgatttttattattttggtaatggtgtcccagtataagtaatgagatacaatttttttttaatttggtatatcaaacagtaaaggctacatataaatgttgtttccccagaatgtactttgtctacaactatgcactgtagctattatgcacacactaaaagcattcatgataaagtacaaaaataagaaaagattaaataagaaggtatccttgagttataaatgtctactaaagtataccttttaatcacacagttgtgtcacagctaaaaacacacaaattaacatatactgctatgcaactatttgatctaatatagatctactaggaaaatattaaggctgtagtaacacttcacaggtaaaggctaagttctgggacatgaaagcttttagaaaattcacaaaacaaacctgagacatctttttgttttggaaaaaagcaatttgcttatagagtcaaagctttgacatacaaatgaagcatttaataaacattatactttattgcaataacctggagtaaaacttctgactttaatggttgtcagcaaatacattctctctccggtagaaacacaatgagggtttctgattaaagcagtaatctgattactccagcctccaaattcagttattttcattcgttttttgttttcttttcctttctttaactaggttataagcatattaaataagccaggtaaactccaagcaccttactttcttccatataaacacagctttcttttgccgcaagcatctgatgacgactgggcctacatacgtaaaaacagattatagcacatctggacctggttgacataatgaggcatccagattggttcatgattatttttgcagctacacatttctcaatctaaaaaaataggctacagcagcccaaattcactgtctcagccttggtggggcataatattttggaatggcaagtgccaaaaaatttaaatgtactggg

SEQ ID NO: 157243 - DNA, 1000 bp, Homo Sapiens
cggtatggttttattggccatatcaaaagagcacaaatcaaataactgcttgatccctctgctaccacccactgagaggagaaaagtcatttagttccaagataaccttggttccaggctagatacagaggggcccttgggacagctgtgtcaccaactctggagcagtctctggaggcaagtccagagcattaacataaaagtgtcccagtcccacagtgccccaggtcccagcacccctgctccaaccctaaccttggatacttttggccctttaacaaatcaccacctctgcttgcaggacttgatcccatgtgtgggctccaaggccttgtctggcccacaccttctttagtgtctctcacttccgtgtcctggcttcctcctggctccagatgagaatgtggtaacccattgcagaggccagcgtgtcccccatgggattgaattcattaagcgaactgatgccagaagattctgggtcatagagctgacacatcatcttccctgagtttccatcgaacacgtcgatcgtcctcaattcataaggggtacaacttttgaaattaggatctgggtatcggcccacaacaatgaggttgtagcgaggatgccaggctgccttgatgggtgtgaggtgctggaagtgacggtgagggtgcgggatcaggcccagggggcagtcccactgggaagcagagtaaactcggatctcgctcttctggtccgtggtcaggagccgggctccatcgggactgaaacaagctgcgttgacaggatgcctgtgcggcagcgagtagaggaagctggctttccctctaacctggcgcaggtcccaaattttcactgtttgatctacggaggctgtggccaggaaccaatcacagcatgggttcagggccacatgcgtcactttctttttgtgcattctgagattccaaagctctttgccgtccatgttcagcaggatcacgttccccacgttgtctcctgtgaccac

SEQ ID NO: 157244 - DNA, 1000 bp, Homo Sapiens
gtaacataactgcgtgctttattgagatacacagtaaagcagtactataatacaatagtaaggcatatatttggtgaagtctgatatgttgtgaaaatgcagtaaaactgaagtttaaaaaaataattcgtaaatgttacagtgttggtgttaaaacacaatatattatgatactcaagtaagaactcagtacctgaaaacaatgacaaaacatgccatgtgatgtttatgcttcagttacattatgatttacagtttaatactcggtggttataaagaacacaacacgaaataatgtccaaattaattatgcttaaaatgcagcaataaagctctcaatttttgttcaaatattatgacagactcactccagagctaatgtgtctaaaagaaaaacaaaaagattaaaacaaaattatttatgcactctatttacctctgattttagaatgaaacttacttacttaaacttcttagtaggatgtaaagtaaccccttgttttaaatctgagttttaaaaatccttgggtaaagaaaaggtccagcgtcacataaaggaaaaaaatgcaagacaaaaaccaaatcttcatgtaatttggtaatttgttaccttagagctttgggttttcttttgaaaattatgaaggaaaaagaaagaattataaaggaaaaagaaaataacgcaatggacaagtggtgaagctgtgaactcaggtgtgcacaattatcaggaacaccccaaaaccaaagtgaggtagaaatagcatgagaagccgtgtttgatgttaattaattaattattaataatggacaaaacccactctccaaaagctaattacacttgatgtcagcccactctccaaaagctaattacacttgatgtcagaggtaacagatttgcaaaattataggtcacacggtggtatctattgaatgaatgatttaaaaatcaaaaagaaataaaatggcatgaaagagtaaagctttttcctaccagtcc

SEQ ID NO: 157245 - DNA, 1000 bp, Homo Sapiens
tttttttttttttcaggtttcatggtctgatttattggtggtgaatacacaggggcaggcccaggacaagcagcttggctactccccctctgctggctgcccgaccggcagagggggctccatgtggcaggagctaggctcccaacgcccactgttcttgccaccctctgggctcccaggctgggctccgctaggctcctgtctcccctgccagttagttaggcaagttcaggtgtggaggccgcagggatagatccaggtggctctgggctgggccctcttctcttcccagcggggaggtgctgttggcctggctgggctggcctgaatctgtttcaagttctcccttcctgcccagctcagttcaccagtgctggatccaggttcaaatgacagggacttgggtttttacaacagcgtggcaagtggtctgtctcctgggcagccatatcccagacccactgggttgaaggttctgtggggtggagggaccccaaggtgttccaagccagtggctgcactggcagcaggcctctgagagggaggcgggaagggtaggcgcggagagcaggctccattctgggtcgagtggaggactggctcccagggtgagttcacaccagtgctcccagctggcggctgctcagtctctcctgctgggcgagcgcggggggccggggctatgccatgctgctggtggagcagggggtgctctgggtgctcccgatgctgtggttggtgctgctgctctccgaggaggccggggcagccaccgccaccacgggctcccgcttgctgggggaacctgggagcgggagcgggggcaggggcggaggtcagggtcctgccagggcccctcaatccctcagaggcttcactgggctcccccgggtggatggaggggcccggcatgctcactgtgggggcctggggtactcacgcgtgtgcgagtagatgtaccagagtgcagcagtgagcagggccccgatgaggaaggcac

SEQ ID NO: 157246 - DNA, 1000 bp, Homo Sapiens
tagagtaaagtcgtttatcatcaaagccatgttgcttaccacacggagttgggggttggggagtgagcttggaggggtgagggggtgagcgtgggctcccagcatgggcaggggacggaggcaaactcattcctcagaaaaggggtatcttccccaagaaaagcctggagggcacttgtggggggaggtggcaggcggggggagaggggtgggtcattgccgctccagcaccgacaggaacttgcggatgtcctgggcgagcagctccggctcctcaaaggccgcaaagtggcccccacgaaccatgtaggaataggagatgagctttgggtacttgaacctcacccacttttcaggcgtgtgcaatagctcaaaagggaaggcagagaagccagtgggcacatagaccttcatccgctcatgcttctgggtcatccagccctgtcccaggttctccttgtagaagcgctgggaggagatgatggtgcctgttgtccagtagagcatgacgttggtcagcaggtcgtccagggagaacttcctttccaggcctccatcctccaggtatcggaattccgtattggtccaggtggaaaacttctctagaatataggcagccagacccacaggagagtcattcagagcagagcctacggtgtcaggcttggtgcactggatgtgcatgtagccgctctccctcatcaggctgtagaataccttctccttgacggggtacagcagctccacatccctctcagtgaggccaagaaacctcccgaaacgctgtcccaggaggagggtcagggtagagaagttgcttaaaaccaaagccatgttcaagtgcaggcctttcacgtggctgggcaccagctgggccatattagtgcagatcagggacccccagtcccctccttgaatgtagaattcctggaagcccagccgcagcatcagcttgtaaaagatcctggcggtggccaccgagttgaaccccttcttggag

SEQ ID NO: 157247 - DNA, 1000 bp, Homo Sapiens
caaaaaaactatacatatttaaaaatactgcaaggttgtggtttcctgagcaggatggattgggcagacaaaatcagcaatgcccctgctcctgagagaggcctcgccatccctgttccataagtcttgagtctgcactggttctctgagtcatattggatccctgatcatctgcagcctggtgtcctaagagcaagccacatagctggggggcagaggctcagcggctgggataaggctgttctcataagggttggagtaggggccatcggataagcccccttgggctccctgggagtcccctgagctgtagtcagttgagatgccagagtcagataccacaaggtacaggtactttaggtggggtggggtagggggcagctcagggcacagtgtccatggacgcaagagctgggagctggggtccaggatagtgtactcaaagctggcagcagaggctccctctgggctgggcttcgaggccaaagcagatgagcaggaggatgcttctgagccttcatccatggccactatgtccacactgccaccaggccctgggaggtcctcactgggcgggttccggggcagcaaccatttgtccagcaccagataggtatcctgggcatgctcactgcccactggctccagcagggggccctcatcatctgtccccggctccactgcctgcatcgtcccccagcagcgctctgagaggacttccagggaagcaggtgggtcctccgtgaagggggtgcaggggctccaccacaggcagccatcattctggtacagccacagctggaagttacccttgtgggtggtgaagaggccttcaaactcgctctctgggctcgggatgccaggccagatcttctgcttcagagcccggcggtgggagagcagcgcgagcacggtcagcagcaccaggatgaccacgaggatgagggagagcgtcaggatgagggggtccaggtcgctaggcgtcagcagcgacacaggc

SEQ ID NO: 157248 - DNA, 1000 bp, Homo Sapiens
ttttgaccgtgccaccagttaattttattacgtctttgcgacaaattcattacaaatggctgtcataactaattatagaggatacatattttttaattaggttttcctttttcttcccctcgcacgtcttagtttccttcttttcttcccaaacacagatctggcggtcacgaggaccatcttctctttccctccatcgtcatcactatcactagagctgctggtggtcgcacctccattcttcacgggagcttccttcactgagttctgcgaatctgaagcactggtttttggctctttcgcagctgttctcctttgtacattcattaaagatgaactttcagcatcttcacttgaagatccatcagatgattctgagaggcaggtctcccccaaaaatccaccgcatgtattctttcgtttagaatctgaaagcctctttcttttcaggcttgatgactcttctaaggtatttgttatgcctctcttctgggtttttcgttttgccttatcaagtagctcaaattctttctccatggcaacagaaactgcttctatttcgctggctgctgcttctttctctttccttagcatacatgtcacagctctgtttagtctctggctcttaatacgtttagcatcttctttctcctgttgtgctaatctaaagaaggaatcaattcggagctgtgtctgctgggcatcgagttgctttaatacaggaaacagagattcatctgtcttcgttctgttccagccgaaataccgctgacaaaattctctaattttgtcgagatcaggtttcccccacagaaaggatcccttcgagtcatccaccacgggtttgaggtaggcctcggcaacagctgggttaggaaagccaggggtgagttgcaatgtccgtaatttttttttcactttggtgtcatgaggattaggtcttatctttggatttttttgagcttcatgccaccattctgagaattttaggagaggttcc

SEQ ID NO: 157249 - DNA, 1000 bp, Homo Sapiens
gtataaaattttattcactaatagaaaagaaagagaaatagtggaaaactgttaacatttaacacagcgtaaaatacattgcccattctaaatggtttgaggtcttaaagagtctcttccaggggtttttgaatgttcaattctagtaaatatcacagccaaagagttccaggcgaagtgcaatactttgattccatgttttaggaatgacacggataaacctggaaatgattggggggttgaaaaagttcttcacatgtcctttggtattagtatttccttcaaaaatcttgtccaccatggaggatttcagcctgtatggtttccattccactccctgctcactgtagtggatggtatagctctttacatacatttcagaggacagagacttgcagccctgtgttataattgccgttatcttcttgatcttgagtagatcaatttctagccactgcttattgttgtttgccttggcttgccaggcattcacacgtccctgggcattcagacgggcacggaagggttcccagtaatctccccaccaagatttcttaaacgaagaagctgtgatttgcttgttttctatctttccattttccatacccaggggtgtggaacatccatttacctcacaaccttgcagttccaatcgaagggtaggtctgttataggctcgagttggagagatcctaatatatctagccacaataggtgggtcaaactgattctcttttattgtagaggcatctgaattgccattaaaatacatcacattccttgtgctgttccctttgaagatctgccagttgatctggttggaactgtaagctacatagaactctgtggtatagcaggacttcaggtagtgtttggcaccttgggtctggatccctgtgattatgacttccttttgcatgtccacctggatccaaggtttagaggcaaattctgctgcaagtttttctacactccaagcattataagatccaccattgtt

SEQ ID NO: 157250 - DNA, 889 bp, Homo Sapiens
tttttttttttttttttttgcatcaaaaagctttatttccatttggtccaaggcttgttaggatagttaagaaagctgcctattggctggagggagaggcttaggcagaagccctattactttgcaaggggcccttcagaagtcgctgggctcagaaggctcttagtcgtgcttgagagtgagcctttcgaagagatactcgcccagcccagcctccgggccacccagcctgtggaggttggtcaggtggtcacccatcttcttgataagcttcacttcctcatctaggaagtgagtctccaggaagtcacagagatgggggtccgtgcgggcagaacccagggcatgaagatccaaaagggcctggttcagctttttctccagggccatggcagctttcatggcgtctggggttttaccccactcatcttcagctggcttcttgatgtcctggaagagagcgcggccgccacgctggttttgcatcttcaggagacgctcgtagccctcgcgcttctcctcggccaattcgcggaagaagtggctcacgccttccagagccacatcatcgcggtcgaaatagaagcccagagagaggtaggtgtaggaggcctgcaggtacaaattgaccaggctgttgacggctgcctccacgtcggtggaataattctgacgaatctgggagctcatggttggttggcaagaaggagctaaccacaaaaacggtgctggcaggtcccagaagcaggagatggccgagaagatggtcccggaggttgcaagcggagaggaaatcggagggcggtcggaggctggaagagagtccccggatctgttccgtccaaacactgttgaagcaagagacagacccgcgggaccgccgaactgc

SEQ ID NO: 157251 - DNA, 1000 bp, Homo Sapiens
gattccaaatgccccttttattaaaataattgcacttaagatttagaatctcccaagtcctgtgaattttcctgagttcccaggcttgctcggggaccggcaggcatccagccctctgggcagccgggaagcggtcgcgttggggcagagcagcaggcgcgaagcaggagctcaggtgcataccccacacctccacctgagcacccccttctccggtgctgggaacagatggaggggggtggctaatactacccgcatgccggcaacaggtgaggagggcaaaccttacaatcttattaacacagagcagccctccaggccccggcccacagtgcgatctagggagaaagctctcctagacacgttgggggccagagccccggcccaggaggtggaaacaagcgatgcggcggcttggaatggttagtgcccagctccaggtgacacatgcaacccccaggcccgcacacagctgctgcccgcacacaggctctgcttccctggggaaccagcctccctctggagagactaacacactccgcccggctaacaccagctgacgagaaactgctctcccatcaacagcgagacacagatgtccaggaccttggtgtcggggctgtaggtgaagttggagacagggacaccgttggagaggacctgctggggcgccgtggccacgcccaggacagtcaccttctgcagctgcaggccagctccctcactggtcacacgtaccagctcattcacgatcgtgttattcctggccaggaagatgacctgtgtgtaggcccctcgctccagcacttccaggctctctccatcgtcccagaacagctcccctcgggcctctccacccttggtcagggccacagccagggccatgggctgctggcgggactctgtggttgtgaggccagggccctgcagggggatgatgtacccagcccggaggtggacgttgatggtgtccaggggggccggcagcgtcacccactgc

SEQ ID NO: 157252 - DNA, 1000 bp, Homo Sapiens
gtaaatgtagacagttttaattgtagtatcagaaactggtggggaggaaacaaattgtggtatattcatacaatggaaaactcttcagaaataagaaggaacaaaccactgaatcacacaacatggaccaatctcaaatcattatgctgatggaaagaaaccattcataagaatacacagtacatgacgccgctttcatgatgttctggaacaaagaaaactaacctatagtgatagaattcctatcaatggctgccaacaattgggagtgaaaggaactgactgagcaggtatacaagagaaccttctggggtgatggaaatattctgaagcttgactggagtgttggttacatgggtatatcaatttatcaaaactcactgaattgtatatttaaagtaggaacattttattgtaaataaattacacctctataatgtttgttttaaaaaatattagatacatcagctggaaatcacttggttttaacaaaaaattttctctgtaatcttatttattctagcacttttcttgtcttcaaaagcaatgcaaaacttcactgtagctaagcctatgttagactcttataaattcctaaatagtagaattagttcaatgagtaattcttataaataattctagatttactttacctacatgaataactgatttgctacatagagccacattaatgcttagtataaatcatacaacatgatgaacatgctcacgtatatttaaatataaacatatttggactttaaaaagtaagtacatcttaggagatgatccaattctgggagttagcaaatgtctaagtgctcccctccttccacacataaggagagaaaagcattcatcagctgtgtgagtctgttaccagtgcacatgtgaggacagaccacagcacagtgagatgaggctgaggaaacgactacaacagcattggctatatcaggttttcttccttcttccagccacctggaaaaacgttcacaga

SEQ ID NO: 157253 - DNA, 1000 bp, Homo Sapiens
ttttttttttttttttttcagatgtgcaggtctttattttcctctccctcactctgctccaacacccagcataaggcactacccccagatgggagggagggagggcgcactgtgaactcagtgtgagggggtcagctgcagcagacggagttgcttccatgtcactctcctctcaagagaagctgctatttcagggtaaatggagtctgctctcatccatggttaaaagtggattgagacgctctacagagaattccatcttctttttaaggaacacatctgaacgacttcagaagggaaattttgatatttaaaaatcagtgtctctcacttcccactccatccgccacctccctttctaagctcagagcacagcgctcctacggtccagccaggcatctctccagaaaggggcttgagagtttcgggcccctgatggagcggctcacttgctggccgtgaacgcctggattcccgtgatagctctcccaaggatcagggcgtgaatgtcatgtgtaccttcgtaggtgttcacggcctccaggttcatggcgtgccggatcacgtgatactcgtcagaaatcccattcccccccagcatgtctcgggcctggcgggcgatgtccagggctttcccacagttattcctcttcagcagagaaaccatctcgggggcagccttgtcctggtccttcaagcggccgagctgcaggcaggcgtgaaggcccagggtaatctcagtgagcatgtctgccagcttcttctgaatcagctggttcctggccagtgggacaccaaactgcatcctgtcgagggcgtactgccgggctgtgtgcaagcagaactccgaagctccaagcacgccccacgcgatgccgtaccgggcgttgttcaggcagccgaagggaccccccaggctggatgcaccagggagcacattctcctctggcacctccacaccgtccatgatgatcatgcctgtggctgaggcccgcagcga

SEQ ID NO: 157254 - DNA, 1000 bp, Homo Sapiens
tttttttttttccaagaaaataaatttattaaactttgaaggaaaaaatccacagacataaagagagttaaatataaactgccagacacaactagtcatactagtgaataatggcttatgtggccaccaaagtaccaaaatgacattctgagactgattgaggtatttagctatttttggctatagaaatgttgtcaggctgttgtgaaatagtaagatagtcttccaaacacacagctttgaattgaattaggttctacactgatgatactttatatgaaactaaattatgtagctcttggagaaaaccatagcagcaaagtagcagaaaatctatcaaacatctattacaaataacatgttgaactttaaacactcaattctagcttttcatagtccttcctgcaagagagagaatttaaaattatcagccattaagcttgcttcctaaaaaaggtctgcgataaatgggaaatactatttaagttaaagctaacttcaaagttttaagcttttttaaaaaatgagaagtattcttcactgagatgagattcttctttttcataaaccttttcaggagatatcccaatgctctcaagaatgatgtttagggctgggcacggtggcttacacctgtaatcccagcactttgggaggccgagtcgggtggatcacgaggtcaggagatcgagaccatcctggccaacatggtgaaaccccgtctctgctaaaatacaaaaaaattagcctggcatggtggtgcgtgcctgtagtcccagctactcaggaggctgaggcacgggaatcgcctgaacctgtgggaggtggagattgcagtgagtcaagatcgcgccaccgcactctagcctggcgacagagcgagactctgtctcaacaacaacaacaacaacaaaaatgaatgatgtttaggatattaagggattgcaaaatgatttctaaattactgaggttgcttctttttcttctgaatgcttgcttt

SEQ ID NO: 157255 - DNA, 1000 bp, Homo Sapiens
ttttttttttttttttttaagaacaaggggtcaatttattttaagtaaatttgtcattaaatatcaatgtgtacaatttcaaacatttataaatcttccaatttatagaaaaattaatgtaatcttaaaattatttgaacagtggctttcacaattatttacaatgaactcaacctacttttgtagaaacatttatgtttaaaagtacccctgccacaaagtgatcatttcacagtacctttctataatatttatgtcacttaagtggtggctgcatcaataaaacctagcagattcaataaattagaaacagcacaatcagaacagtcaataaagctaccattgattccaaacaaaacagaaccttttatagtaagatataaatgttttcccattcagcactcattgaaaaaaataattaggaggcaatcttttcttcactgtttactacaaaacaaagtaattttaagatatttttaaaaattgatgttaagaagcaggattaggtaacttcttataatatgtgacattaaatattttgagaaattcttggtttcattggaaggtatttgtaatgataaaccttctttcagttataatgagatactaagcagaggtaattctgtcatcccagatagcaatttcttattaacaattgataacatttgaactgaaagagattcttggctttatttctatatttttttctacttaggtatttaacttttttgacatcctcttatcccctcaataggatccaaaatatgtctaaaattaattcaaaagaaaaataactatttgaattattgcttgtgtttgaaaacaatatttactgtagtattccacagtttcttctttttttaagctaagacaattaaataaaaatgtaagggataagaaatatagttgaagtcacaataaagtatattttcttttattgacataaaacataaattttaaatgttggcttgttaagaaaaaaattctcctggtaaatatt

SEQ ID NO: 157256 - DNA, 1000 bp, Homo Sapiens
acctcctccgtggcatctttatttttctacatgggatgtgaacaacgtgaacatgggtcagaaaagtcagctgcacaaaaacacttcagccaattctaacacagagggagcatagacatggaggggctgggggttaggctgggggagaccagccttccctgctaagggctcgtggtccaagcccacaaccagagggtgctctgggtggtgtccaggaacatgcagtgccggctccggggaggagggacgagaagagaaaggggagtcacagaggaggctgcagatgagcacgagtttattggactctggcctcgcgctgctgcttgatgaagttgatgagcccattggtagaagcgtcgtgagaggtcacttgagcactgccatcaagctcaggctctattttcttagccagctgctttcccagctccactccccactggtcaaagctgttgatgtcccagatgatgccctgaacgaagatcttgtgctcatacatggcgaccaaggctccaagcatgaatggtgtgagcttggtgaacacaatagagttggttgggcgatttccttcaaagaccttatgtggcagcagcctctcaaggtcctctggactcttgcccgcagcctggagctcctttcgggcctcctccgtcgattttcccctcatcagggcctctgtctgggccaagaagttggccaggaggatcttgtgatgcagacccttccgtatggggtgctgggtctggaccgggatgaggaagtcacagggtatcatcttggtgccttggtggatgagctggtaaaaagcatgctggccattggtccctggctccccccacacaatggggcctgtctggtggtccacacgggttccagatttggtgatgtatttcccattggactccatgtcgccctgctggaagtacgcagcaaagcggtgcaggtactggtcatagggcagcatggcgtgtgtctcacacccaaagcagttgatgtaccagat

SEQ ID NO: 157257 - DNA, 1000 bp, Homo Sapiens
cagtagcgactttcatgccaactctttatttccataatagaaaatcttttatttccacctttagtgttccctgctagaatagatgaccacaaaacccaggccagaaacgttctggtctgccgtgaacagtccaggaggcacttgttctgctgctgtggaagtcgccctgactcggggaggaagggacacgcaggtggtatcagtcttgctcaagtaaacgggctgttttccaaacattgtgacttggctactgagtggggatacctggtttcattggcaatcttccagtatctctctcgcaaaaggaacgctgcactttttggttgtctctgccgagtgaagatcccctttttattccccagcactctcgtcggtgactgttcagtcatgaaatcggcaaaattccaaatgagctctccaaccacatattttctgcgtttttgatccagacccagatggtactgctctagcagacttttctggtactcttcagtgaacatcagaggtggatcctggtgaaaccctgcaatcgtttctgctccatactcgctctgaataatgggcttctgatacttcttataccagttctcaaactgggtggccagctgcagctgaatcaactccaggtgcccgtagtcgtgataccaagagtagtagctgttcaaacagatcacatccacatacggagcccccttgtctgctgcatagttagagttgctcacaaaggtcacaggccgggaggggtccaaggatttggtgtgagcgatcaccatcttcaagtagtagccagcagattctaggtgggacgcaggctcgttggccacagaccacatcacgaccgcggggtggttcttgtccctacgcaccacttcttccatcacctgcatgtggtgatgcagagaaacgttgttgaagaactgcggcagcgccaggcccacgccgggacactcatcgatgaccacaatcccatagcggtcacacatctgcatcacttcctctg

SEQ ID NO: 157258 - DNA, 1000 bp, Homo Sapiens
tttttttttccaatatttctccactttattaacgctgaccaccatatttatgtatctaaacattttttataagttttcagtggtgtttagattctgaattatttttccataattaattaggcacgttggtttgtattttatagagaacacatctttaggacacagataagaacaagtataatttgcaaatattacaaagatgatttccaaatctcagttgacctctttcccaactgcaaaccctcatttagtctttagtgacaacagagaccaaaaacaaccacccacacatctcatgtgagattctggtggcttagaaatccctgaaagagcagtaaactgattattgaaaagctcagaacactggcaaggcttaagtgcaaactatttaatagaaggccacaagaactgttttcctaagaggagctaggaactacaaatgtcatttagtaatgcattgaaatggcattgcctagtgtgagtgttgcacagaaacttcaggtcacttcttctggatctattattttggataagcttccactatcatagcatggccctgccctccagctgcacacgcagccactaagccatactggcctccttctttccgtaatctgttggcagcagccatgaccaacctgcagccagtggctccaaatgggtgtcccagggacagagatccaccccagttattaaacttctccaaaggaggcaatccaaccttggtttttctacccatgtagttttctgcaaaccaatcagaatccatggctttaaaatttgccaaaatctgacccgagaaagcttcatgaaattcaaaagcatcaatatcattcatggtcaatcctgccttttctagaacttttggagtagcatatgttggtccaagtaatagttgatcttttggatcctgagacacatacataaaatccctcaaatatgccttcggcttataacccatggccagagccttttcctccgccatgattaacattgcaga

SEQ ID NO: 157259 - DNA, 1000 bp, Homo Sapiens
ttttttttttttttttcacagtaaatgtggctacatttatttatctctagtatgggagacatggcacacactgtcctccaggtcacagggaggcaacagcaggagggactgatggcattcatcatggatttgaaaggtcaggctttgagaaaattaagccctaacattagcccagggcacccctcatatgtcttgaggtggcttcttccctggacatcaagaatggtgctagttgtgtaccctccttgggagaggtaaggaattagtcacaccactcatttctgtgcttggtattcagatgaggggcctggtggagaaaggcttgagtgacagagtcaggtgtgcaaggatggggtcaccggagcgggaggtgcttaggacgcgctgctcaggtttgctgtgaagagtggggaggtgagaccctctaggtaacagcagacacactacagttacagtgacttctatgagcttacagcatgggctattgtgcagaattgattccaacaagcctctcttcttggtcgtttctaagctcctctcatatgggcctcgaattcagattggtagcgtaaactacgtaaatgatgccagaacatctctgttctcgttgttggaatggaaacaaaatgagggtgcccccaaggcacttcagacacctagacctccacctctaggacctgctggggttggccactcttcccatgaagagcaggcagctggtgcgatgctcgtagatgaggaaaagaaaggggcggtcgacagtgaagcggacttgggtggacagcggcatgaaccccaccgtggtcacagtggtggcttgggtgccttcctcgttcactgtgatcgtgccttggtgcttgaacaggtcgatggcgatcctttggtctgagatgcctgccatgttgccatttttgtcaaacagcatcctgatccccatcaacttcagggactccactagattgtagttcttctccagcttgaatttcggcagaagcacttc

SEQ ID NO: 157260 - DNA, 1000 bp, Homo Sapiens
ttttttttttttagttttccaggatttaatatggtgcttttaagaagagagccaccggtctcagcttataattacattttcacaaattaatccaaaattttacgtatgaataaaaaggagtaaaacaatacataaaaaatgaaattgagaactgatttaatactaaagttctgaataaaggtgtgcactttatgattgattctatctttttgcacaagttggatactccagtttcccatcccaacatgttgttcgcaatgtgtgagaacgtgatgaaagacgatatccccgtttacacacaaattcaactgattcacctgttctcgaataaagcttctgtttggctgtccaccttaatgctatgttataattttccataatttctcgggatattacacacggatgtaagcattttggtggttctgaccattgtccatttctacatgttattcgcttgttaccctcaagttgatacaagttctggcattggtactcaactgatgaagctggagcatatactgacaacgggaatgaagtaatgtccccattgtcaataggtggagggggcccacattttcctgtagaatctttgcattgaggtggttccgtccagtttccatttaaacacatcacttcttcatccccaaacatttcataagggctcctacattgataacgtactctctcaccagatggatatttactcatctgtctcgacactatataagcattttgtactgtgggcggattcacacaggaggtgtctctgcatgttggccttcctgtccatctgctattaatgcatgttacattactggctccatccattttgtaatatgttgcacaagtgtaagtcacttgctcacccgccttatacacatccttcttctctcccatgggtatggcattttcaaagctaggtaaactgagacaatctgtttttatgcatgatggagggtgagaccatttttctcctaagcattttgcaattgcaggccca

SEQ ID NO: 157261 - DNA, 1000 bp, Homo Sapiens
gaattggtacaaagtttactaggtcatacgacacggctcacaaagcggtgggaaattccagtgatggcattgtttgttggttggttccttttatccaaatggaagacaagacacatttccgcaggactgtccacctccccccacgagacaaacagaatgcaagactgtcacacgcggctaggactggttccacggacacacgattttgtggcattgacacaccacgatgcgatgccaggccacagtgggtgccaggaggggaggaagcagctaatgctatgcccacactcgccttcaggcagtgcccccgggagggaggcccggcagtgtctgctggtgataatacatttcacacagggagggggaaccccaaggatgggctttggaggcccagaaggcctgtcaggtggtgtgattttccatctccagccaataaataactctgttggatgaatgcatacattagaaatggatgccactacacttcacacgtgggggaccaggtcaaaatcaaaccatgcaaagtggcagggcaagtgaggagggatccgggtgagagatattatcaacagcacacgctctattctgtaccctacaatatataccattagttggattttgctttcctccccgcgccggcaggccctggcgccagcgtctcccagcgcaactcgctgggagggtagggggtcgccgcttgaagagagaagtgctggagaggcagtaggctggggatcccggactcttagctgcttgcctctgtgcgtaaccgcacgcccacggccgtgatgagggcggcccccttgccgctgccatcctcagacaggaggaaggacacgttacattttggtgacagttccttcaccgtctggtgcatgattctggagaagtgtggatgaagcttgtagagtgtcccgtccactcccacagtcacattcagacggtccagtcctctgttctcgcggatcttatccacaaccgcagccatgcctgcgccaca

SEQ ID NO: 157262 - DNA, 1000 bp, Homo Sapiens
gatgattatcaacagaaactttatttctcatcggttcaggaacaatcggagggtagatggaaagaggaagggagggaaagagggagggaggaagaatcctgcgaaaaggaagggccagactgagggagaagaaaaacatgttcggggcaaaagggtaattctcaagtggggaatgccaaatgaaggggtgcttacatgggggcacaaaattccaaatcagccacagtggggtgaggtgagtatgagacgcaggtgggttgaatgaaggaaagttagtaccacttagggctacaggaccctggggttcttctgtcagaggattggggttcaggtttcaggctttagggtgtaacatgggggggcccagtaggggctatgctggttgcatggggaggccccaggcccctccccaagggcccctccttttgggggaatctcactgacgaggcagagtcgttcactgtagtctggctgcagactctcagccagtcccttagacacaccactccaggccgaaaagttcccgtggtattcagtaacaagatcctctaggttcttcagggtgggaattcggggcatcgtccgttccagccagaaatacacacagagaaggctgataatcaatcccatggagccaacagagataaccacggcttccaatgcaaacaggaaaggattctcttttgaagtattgctcccccagtggattgggtggctccattcactccaatgctgagcacttccacagagtgggttaaagcggctccgaacacgaaacgtgtagcgtttctgcccatccacactaggcaaggagaacttatgtctataatccactgattgttcagtccagctgtggtcccagtcagtccggtactgcaccaagtgctccaaacagtggttcaagaatctgttgttccagttcagttctagctgggattcactcagtttgtgaagtgttaggttctctggagcccaggggatcaccagattctgcagtttt

SEQ ID NO: 157263 - DNA, 1000 bp, Homo Sapiens
ttttttttttttttttttttgatgaaatagataattcaggttgtcatttataattttagagtttgcttcacatatacaatgctgtgttacgaaacaatgaacacttttataaaaaatttatttcacacttttatacaaatatccacaggtaatttctaatcatgaaataattttacaatgctagttagtacaaaaatgtatcaaatgcaaacagaccagtgacttgacttgagatgacatttttaacaaccataagtctaaacaccataacatctttgtttctttgttgaccaccctcccaacacccttttccgacattcatcttttttttagtaacacaggtctaaaaaactgtcaagtatcagctccttagcaatctagcaatctaacacattagggacacaagttccccaagcaagaaactgagactttaaacactgttataacctgttttacagaaatttttgtaaacaaaatatattttgtgactaagaattccaagtacaaccaaaacaacgtccttagtatcttaaggtttaaggattttccggaaaaagaaaaaaagccccccccaaaacaacagtggcactacaaactgtgttctattctttcaaaacacagacactgcttatactatatccaaaacaaattagcacctgtttgctgttgctccccatataacttaacattgtgaagcatggtaattaaaaaaaatcagctttcatatctattcagtctctgttgaatgtatagagtaataattccaccccctgccatttttacaattaaaacacaatttaaagttcttgttaaattagccccaaagtaatttttgggaatacagataggggaggaaacaaaacaaaaaatagaacactcgactcactgattaactgttttggtagcagattcagtagtcttatactggatcagtttggatccactagttccataggcattcaccatttctttcaagtcctgaatatacagtatttgcagc

SEQ ID NO: 157264 - DNA, 1000 bp, Homo Sapiens
ttttttttttttttttccattaatccagtggtgtttattcaagcagtattcacacttgctgttgaataacaagggaatcaaggctcccctagatggggctcccgcagttccagcttcacagcagccccaggtctttgagaactccagatgagttttgtggttgaaaagcctttcagttcttcctccatccctctgtcaggcagagcctattataccccgattaccagaacagactcagcagggtggcagaagcacacggcaaagccggtagaactacgtaagctcagaagagccacactgttccatgttttcatacaaaaaaatttaataaatattacttttcaaaatttattgccaagaacaacacatcaaagatgcatttgtatgttcatataacactaataggacaatacaaagtatcttcacggtctcaatggtgaaccaacaagattactctgttttataagcctttttgatcttgaacttcgtaatagcactttgatttcctcacttaaggcaggcagtgtactctatggcaaatctaaacagtgatcttactggacattttatggttcaagtattcaactagcttattagaatactccctaaatgcagtagattaaaaaaaaaatcaaatctacaagtggttcagtattatgtacgaatggtgaaaagaaatcagaatttacaaagtcagattggtgtgcttccaagttcacacaattaatttgatatttttaatcatattcaaccactcacattttggctatgttaagtcatagctcaacttgttcccttactgctctgcagcagatcacctgcctgtctcttttcaagtctaaagcagaaaaacaaaaaacaaacaaacaaaaaaacctgttctaaactaatcctcaaactgcctcagtcagtccttaaaacgtgttttaagtgatgctatagaaggtgttttaaacatctgacgtcgtacaaaaaaaattccatcagtattctgggcaca

SEQ ID NO: 157265 - DNA, 1000 bp, Homo Sapiens
tctggtttaaggatactttattattgaaccagtatgtacaaactctaacatgaaaataatgagtcacagaatatcaagactatttacaatacttttttgttttttacaaaacatttttacaagattacttctctctaaataatgtgacagacatacacaaaaatccaactttttttattacatacataaataaatattgactttaaatgaccactgtaagggacatgaattctacagaccacttggatgagaaggtagcagttttgttatctgcacactacaatataattaagtaaaggggaaaagtaactttatatagacctctgttaatcactccgtaaatcatataactcactagaatattcagtagaggtaagacagtcatgagaatcctctccgtacctgacaccgagtctgaccatgcaaaatcacaggtaagagtcaacatctttatatatctgtttatattttataataaactttaaagtacatgcaacagatatttagccattgtgttctgcctataatatgaaagtttatataataagttttagagttatttgcaaccatagaaatgagtaaacttgaaaacccacggcataagaaagggcattaaataaataagtcaaaatcacaaatgacatttacggatacatagggcaaaattagtatttgtacttgtatgatacagacacgagtcaaaattccgtcttttaatcaagttgtttagtggacataaaaaacacagtttaggcctttgaagtcaaccataataacttcttagctgtcccttagtttttgggacttgctctagaaattcactgggtttcttataaagggcaaattcagtaaagatcattctctagcaatggttctcaaccagaggtaccatccctcaaggggtagctggcaatatctggagacatttttggttgtctcaacttgggggagggtgcaactggcatctggtgaggagaaagtgtggatgctactaaaaacc

SEQ ID NO: 157266 - DNA, 1000 bp, Homo Sapiens
tttttttttttttttttttgaactctgaactttttattggcctcctgctccccaaagggtaccctgcttctgctggcttaatgcctcagaactttggtgtcattggtctcagacaccactttgccatccactatccggcgggtggtggtcttttggatggtttgcatggagttgctgctgtccaaggcatcaccaagattaaagtcctcgccatcttccagcaggcggcggtaggtggcgatctcagcctccagcttgaccttgatgttcagcagggcctcatactcctgggcctggcgctgtccctctgcccgggtctgtgccagctctgactcaaggtgcagcaggatcccgttgagctgctccatctgtagggcgtagcgggcctccacctccctcaggctgttctccaagctggccttcagatttctcatggagtccaggtcgatctccaaggactggactgtacgtctcagctctgtgagcgtcgtctcagcagctccaacctcagcagactgtgtggtgaccactgtggtgctctcctcaatctgctgagaccagtacttgtctagctcctctcggttcttccgagccagctcgtcatattgggcccggatgtctgccatgatcttggcgaggtcctgagatttgggggcatctacctccacggtcaacccagagctggcaatctgggcttgtaggccttttacttcctcttcgtggttcttcttcatgaagagcagctcctccttgagagcctcgatctctgtctccagctgcagtcgtgtgatattggtgtcatcaatgaccttgcggagcccatggatgtcgttctccacagactggcgcatggccagctctgtctcatacttgactctaaagtcatcagcagcaagacgggcattgtcaatctgcagaacgatgcgggcattgtccacagtatttgcgaagatctgagccctcaggtcctcgatgatcttgaagtaatggctccagtctc

SEQ ID NO: 157267 - DNA, 1000 bp, Homo Sapiens
acggtagcaaaggaaggtctttattcaggaggcgggggctctgggctggcagtcggggatgcagggggaccctggcggtaggcacccagcaggatggcattgatgtgctccagggtcaggttgctgaagaccatgttgagatgctgtatcccgtgcaggggcagcaggtgcacaggctgtggctggcggccctgccacaggccacagagctcggtgctgcgggtcgccaccgtgtcatcaccatcctcatagagcacacccacagggtccgtgtaggggaagccgtggtcgtagatgtaggtgcggggcgtgggcaggcccacgccgtaaagacagtatacttccacaccaggtgctgggagtcctgccaggaggtcacgtgactgcagccacatgtaccagccttcctcaaagtgcaggtctgcaaagaagcgttggaagtcacggcctgtgtagttgaagctgggtgtggaaatgaacacgtggtcctcaggccacgccatgcgagagggaaacatccagggggaggtggtggttatgcgctgctcctctttcagcttgatgctggacatgatggggatgccctggttgtcacctgaggccaagaccagcatgggcttgatggagccaccccagggagccccaagagagatgaagccatcaataaagcggtccttccaggcctggggctggcgcagcaggaaatagagcaagtgtagacagccgaggctgtggccaatgaggaagacaggcttcccataggcagcgtgcatctcctccaccagccctgcgagcttgcggtagtactcctcctgctggccgggctccagccgccagtcatagggggcggcgcgcacagtctcgtcccgcacgtagccattgttgaccaggttctgcaccagtgtgtgcaggtaccctgccagcttgctgctgtccaggtactccacagagtaggtcttgccaaagccagggacgcggatctggacaccaggggcgttgg

SEQ ID NO: 157268 - DNA, 1000 bp, Homo Sapiens
ttttttttttttttttttgcattgggggtggcagtgcactttattaacaaacaaaacagtaccatacaggcaaaatcttacttcagtggcaaagcacacacataggtatactccaacgtgtagcactggggcaaacttcagacatggaacattaggcaccaagttcacaatcacactaaacatagttcacaatccttcaatccatactcttcagtggaggatgaggccttatttaacagttaactgggacagacagatgaagttttaaaatctaattcttggcctaactgtggagtggggctgactcagccttcagaactgtgaagtggatgccttaacagggccaagatctatcagcctcttaaactgactttcatttctctggttcagagaaaaagcttatggtatcttcacgttggatgaacttgcatatcgtgagagtcctcagctccaatttcgtgtctaggcacatctggactggcattcattttgatacccaatccatagattaatagggttaatctaattagaataaattaaatcgttttccaaaaagttgaaaagggtaaatcacatgagttcttcaacattcaagactttaaatatgttagcaaactgattactgttccaactgttgccagttaagaagtttaaatcagcatttcccaaaaggtgtgtcaggactgagttaatcagtaagctaatagaaacaactgcaatagactagggatgagatttctcaaagcagtctgatataatatgcggcaactccttatgtactggagcgtatccaatacattctcaaaactcctaaattagctaaaatgcaaggtaaagagcagtagaaaaatgcagctcttaggataggcaaaactttggaagatttatgtcctcacaccagggtccagcaacttaggtttgaatttatgataaggttaatgatataataaacttgggttggctggtttccctggcaattgttaattccccttaaataaaa

SEQ ID NO: 157269 - DNA, 1000 bp, Homo Sapiens
ttttttttttaaatgtgagtgttgttttaagccactatgatttggggtggcttgttacatattagataaccagagcagtgggtaccccaaaatggtaacagggtatgaactcaaaccctggacctgcctgtgacattaaagagacatttataatgtagtgaaaaaagacacaggaaatgaagctgtgcttccagtctgttcccctctcaccgccccattagtgtcccattagctgtttccctgctaagggctggtgcatctggccaggcctagctttggctttggccaacaatgtcagtgcattgagtcccatagacaaaagcagctgccactgaagcccagcctgttgcaatctggggaattagcaggctgggggttgcccatcagtgtcttctgagtgcccggtgtgccctgtcaaggtgtctggtcggagagcagggtggagaagtactttctctgtggcccggtgcagtggctcacgcttgtaatcccagcactttgggaggctgaggtgggtggatcacctgaggtcaagagtttgagaccagcctggccaacatggcaaaaccctgtctctactaaaaatgaaaaattagccagacatgatggtgggtgcctgtagtcccagctactcgggaggctgaagcagaagaatcgcttgaacccaagaggcggaggttgcagtgaacccagatcgcaccactgcacgccagcctgggcaacagtgagactctgtctaaaaataaaaaaaaagaagtactttctccccagggtggcaggggcctgggcaggcagaatggggctgcctctgtcactccctctggcctggccgtggctgtccgcaatgtccttcagagaaggcctcggggctcctgggtggaccgcagctgccaccaggcatccacccaactgggcgctaaaggagcctggagccgggcctgtgtctgtcagcagagcaagatgtggttcattccgcagccgggcaggggccaaccctgaa

SEQ ID NO: 157270 - DNA, 1000 bp, Homo Sapiens
ttatgttaagacacatctatttatttataatcaatccactgtgtataaaggaatactatcagaaggcaagtataagtcttaagtgctaccaacacttatgttggtacactttgtatatcacactttgatacaacactttgtatcggaatacagagaaagaagaacacatcccacagtgcataaataaccatatttaacacctctcaaagactttgtatagatcaggcaggttagcaagctgcaggatatttccatcttctgtgaaatgtttaggaggcagaatgtgtgagcgcaaggctttatagacaatgtgttccacagtccacttccaggagtttggaatggagccaggcacttcactctgctggcctgagagggtcgactcctcagatatgtactgcttccggatggaatagaacatagcgcattctttactgaggctttcaaaacattccttttcttcgtcccaattcacctcagtggctagtcgaagaatgaagataggcagtccctccaaagggggcacatagttgtcaatcagaaggggtaatccaatcaggttcccttcctcatcaatttccaaagagaaatagtctgcaagcatctcagccttcttcttcagaaactcaacaatgtattcagcaagtccttctttgggaccatcttcctctgtccagccactctctggactatctaaggcaagcatggcaaggtcaaagagcggtgctggctccgataacctgagaacaccaaaattggcaaaatcataaatgagtatctggtagaacagttcttcactaagcttggtggtgttgagaaggtataacttggtttgatgctgtgccaaggcccactgaggattcacacagcccacgaaggagtggttatgcaacatctcccggagaacctcatgtccctgctcattaatttcttcctggagactcaaaacactagtgaggttaatgatccttctccggggggtacaagctgcagtcatttc

SEQ ID NO: 157271 - DNA, 1000 bp, Homo Sapiens
ttttttttttttttttttttttttaaacattccactttgcctttattttttataatatatttaagtagaacatatttaatatgtaaaaaactgttatctattagttataaagtataatgtattaatagcatatagtaaacacttgtaagcctaccaggaggaaccagaacagctgcataacttggcatctacctatgtgctcctgtcccttccacttcctccttctgtgggtaattactatgctcaattttggtttatcagttaccttttttttttaatagcatagttttattgtatacgtatgcttagactacatattctttggttttgcttgtttttgggcccaataaaaatagtacgccccatgtggtctcttcaaacttgcttttttccttaatattttctgagattcattcttattgtgaggtatagctgtagttcactcatttccactactgaataatatcccgtagaatgaatatatatatctaattattcacctattttcctgtagacagacatacatttcactttttccagttattaactattataaatatgtaactatgaacattcttacacattcctcctagtggccacatgcaagagtttgctggacatacaggtgggagttggaagcaagatcataacgtctgcaaatgttcaagtctgtaagggataattgttttttaaagcagtggtgcctgtttacacatccacaatgttgtacaagtccctacagatctaacaactggtactgtcagacccaacctttgcaaatcttatggatataaaatggaatctcattgtggtcctaattcatatttccctgaccaatgctacagaacatctatttatttaaaagccctatttcctcttgtgtagtcttcactatttttctatttttttaaataggaattctctatatttgtgattatgaatccttcatcagttatttgtattataaatgtcttctcaagttgtggatcatcttctcact

SEQ ID NO: 157272 - DNA, 1000 bp, Homo Sapiens
catggaggttcactctctaccattttatttttgtatttgaaagttttcatgataaaaagtttttaaaaagagaaagggtaccttgcgtccaaacaagtctgtatttaactgaaaaaaaaaataattgcattcctaactggccttgaatagaagggaataaatgtcctgggagatagatggcatgtttgttgaaagaatgaagggtgaagagataggatcaatcaggcacccccaggacaaaaggaaaacttatacagcaagtaaagacatgtagctatcttgggctgaaaggtaagggaattaattggtcaagtccaggctcaactctggcccccaactcccaagtccatggtctcaactcatttcccacaaagccttcctggagctagcaagagaaggtgttccctcctgagactattccattttgcctgaacagcactatgaacaagacccaaaggcagagctatgcacggaggggcaggcctgggatgaggtaggcttctgtcctaagtttctcaacagcctcaagacatcaactggggaaaggaactttctctggtgaccctgtacttaaccagtaaagcttcaatcatcttaaatgatgtaacaaaatgtgcatatgtaagtttttacaccataccctaaatacaaggacctcagaaccctgaggagtatgggagatccacccagaaaatactccttgggcagcacagtgcaaggcctggggcactgggtgctcctgcattcaaagcccaaggagacctagctaggttctctgccactagctctctccaaaggggagagccaccagggaagacaagtgccctgtagccttggctaaaagaggagggcttgggaaatacggaccaaagcaagacaggcaagaacccatcattccttcactttgactgttacccctgtccttaggaagagggacaggaaatcaattttaagacacaactcctggacaggtttgtggacacatctggggatatgaacc

SEQ ID NO: 157273 - DNA, 1000 bp, Homo Sapiens
ccactccaagcaacatttattgagggtggcgggagccgcgctggacaggggtcggggctgccctcggcgtccagacgccaggctctatagaacacgtatgtacaggcacggggcggcaagggccgagacgctagctggggactgcgctccagcctcagacggcagacgccagcttccgcttggtgctctcgctgcagcggttcaggatgaggtcggcgctcggccgcgggggcaccgccggctgcggtttagagcgctgcgtctgccgctcctcctcgagcgggctcccggggctctgcggtcccggccgcgcctggcggcgtcgctgctgcagaaaacggacgctgttgcggcgataggcgtcctggctgaggcgcttccgcgaccgctgatggatgctgtgcgcgttgcggatggacgacctgcggggcggcgccccccgcttgatctggcgttgggcctgggacacgtcttgccccgacttttgcaggtacatggacggaaagtagcctgtgacgtcgtctttcctgatgacccaccagccgtccaggagcttgtgaatgacctcaacagcttcaccctcgagcagggacacctcgtccccctccacagcagtgtaggccttgatggcgacgtatggctcacctgcatagttgggctcagggtcttccgtctcgtcaggactgtccaggggctcgaggaaggatgctgggatccagcctcgctttgctttcatctgacagaaccaccaaccgctctcgctcttctccacgacctccaccacgtcccccgtggacagagccatctcggagcccgaggtcttctcgtagtcggcaatggcgcggtacgtctgcaggatgatggggccggtgatgtctgtcgcggtactcttgccatctttgggcatcaagtatgtctctggcttttttgtctggttgtctgtggggagcttgaggtcatcagggcgcaccttgaagaagtcgaggaggtggggacagcg

SEQ ID NO: 157274 - DNA, 1000 bp, Homo Sapiens
tccaagaggtattggattagtccttgtttggtctctggtgatttagataaggcagaactgagcccctcggaatgtattatctcaaagagctagtagcagctgctatgcaaagttctaaggcccgagtcaaatcctgggcatctccacagatgtgtggtagggcacgggctccagctcttgtgtaagaaagaacaggaatgagaacagctttattttgtagcgccaaggtctcactatgctcacacctgtaatcccagctttgagaagaggatctggcaccagaagggtctggtagaagaaagtgggaaaggtgaaggacaggaatcttttcctttctgctacaacctaaggacagaggcacatgactccagcaaggggccaaagaaggtagcagctacttgggtcttgtgtgggagatgccagacgactccaaggcaggtcaactggctttgtcagggagtggaatgctggccataagaatggagacaaactgttccaatttctgtgcagcttgtttgccagctgctaagacttcttcatggttggccttctccaggctttcataatccatgatgaccttgttagtgatgagtgagaagccaaagactcgaagtccacagtgccgtgcaacgataacttctggtactgtactcatgccaacagcgtctgctcccagcttctgcagcacacgacattctgccacagtctcaaagctggggcctgccaccatcacataggtgccttcctgtagctcacgttgctcccccatttgtttccaggtactgagagccctctgcctcatagtccggtcgtaggcatcagacatggcagggaaacgatctccaaacctttcatcattgggccctctgagagggttctgaccactgaaaccaggtaggttgatatggtcacggatcagcatgatatctccaacctcaaacttggggttcagccctcctgctgcattggtgactaccagggtgtccacacccagaaggtg

SEQ ID NO: 157275 - DNA, 1000 bp, Homo Sapiens
cattttaggaaaccttttattgcaaatgccattctgcatattgatttttgacagaaagtatcagaaatgcttctttcctgggaaaaggaatataaatgacagcaagacacattttacttgctactaaaggacagcattattttcaatcattttaagtcgctcatttaataagcaaggtataaaacagattaaaggtggtgcctgcaaaagggtaattaaaaaagtgtttcctccccgggaaacagcactgtttggtctgatcaaatgccgaagctgggatctgattctgggtgccgtctctcgctactggagtgctgaccagcaggctgcccatcacgaaaagaggttgcaaggccaggcccccaggtgcgctgggatttctggctggctctacttggggccagagaagggggtaaaggccttgtcacagcctgccatgcatgcttcaatctcttccacagtgcggggcacgcaggtcagcagctctatgccgctgtcgatcaccacgacgtcctcctcgatgcggaccccgccaaaaccgcgaaagcgctgcaggacctcgcggttaaggaaggaggcgcgggccgggtccgccagggcctcatccaggaggtggtcgatgaagtagatgcccggctccacggtgagcaccatgcctggctgcaggtgccgtgcagtgcgcaggctccgcaggccgggctcgtcgatgcgctccacgccctctgggtagcctcccacgtcgtgcacgtcaatgcccaggaagtggccaagcccgtgaggcataaacacggcccccaggtgagcctggaccatggcgtccacgctgccgctcaggatgcccatgtgggccagctcctccaggtggatgcggtcagccaggcggtcgatgtcaggccaccagtcacctggcttcatggcacccatgacggcacgggagctcagcagcactgcctcatagacggccttctggtctgcagtgaacttgccgttgcggggaaag

SEQ ID NO: 157276 - DNA, 1000 bp, Homo Sapiens
ttttttttttttttttttagggggcgggacatgctttattttcagccacagaactagccctctcagggcccaatccccagaacccaaggccctggccctcttcctgagtagatgggcctttctcttagagccggcctggaaggaggggcaagtaggcaggagatatctcttgagctgttgctgctgtctcaatgccactttgcaccctgggatctcctggagggaggtggcctccaggtgggttggcagcagcctgaggaggagcccttccttcccagatctctctgtgggctatcaaggtacctgcagccatgctgagcggggtcccagaccctggggggctcctagcaggcagcaaacttgcgctggatgcgcttgtaccggagcagctcctgctcactgactgagggttgcagccgggcggcagcctgcagcaagtcctccatggtgagcatcagtgctgagctaccttgttccagcccttcctccaggtcatgaaccctgcgtttgagggcagctgtcatagcatcagagcagagagagtagaggtccgcgcccgtcagctggggagggcagcaatctagcacgtttaccaggctcacagatggctctagcttgaatttgcgtgtgatggcacttagaacgcgtagctgggaggcccggtcctcatttgcccccacaaacaccagcttgtcaaatctgccaggccgcagaagggcagggtccaggagatctggtctgttggtggctccaatcacaaacacatcctgagtgctgtgcagcccatctagctcggcaaggagctgagacaccaccctgtccatcactcctccagaatctccacttcgcccccggcttggggccaaagagtccagttcatcaaagaagataatgcatggagctgcagccctggccctggcaaacacttcccgcacattctcctcactttggcccacatacatgttaatgagctctggccccttcacgctgaggaaggtaa

SEQ ID NO: 157277 - DNA, 1000 bp, Homo Sapiens
ttttttttttttttttttttttttttttttttttttttttttttttttttttttttttcacagtgaccagttggcatttattagtgtagttacaatttgtcactgtagtaaaagtagtagaggaaccaagactctttgttatcacaaagaaataaataaagcttatttttaggaaaattctaactgagtaagtgatatctagcagtagcactagaggtgcccagccttgtgtgacagataaagctggggcagaagtcatgttaaattctacctaaaaggagctcccacccactgcctgctcctccagctcctggccagaactggtcatggctgcaaggtacagaataaaaggaaacctaatgaaaaaaacagctaaaacactgagaagatgtggacttattagggtgtgagctgaccatgatcaggtaatctattcccctcactccagagaggtttagacggcagcttccccggaccgcttccgggtgatgtgctccaggtgggcatggtctgaagtgtccaagtcaatctcgtacttggctaggattttgaggatgggcctcagtttcagccaccactgttccttggggattcgatgctcaaaatctgtctggtccttcagctcagccactggttggaagaccagagccctcttacgcatccccagaacacagcccgaatctggagtattggcaaagatccgcccattacggtaactctctttgattttcccagacatccagttcatagccttggcgcccatcttagtggcaaaattcctatcaaatggggttgggctcccaccctgctgcatgtgaccaagcacattcttcctgctgtcgaagatgcccttcccctcctcagagtacaggttgaaaatgaagtcagtggtatagttctcattgcacttttcattccttaacaccaagccccttttcacagttgttttcatcttttgcaccagatgttcaacatttgcctgcaggtctcgaatggtgaa

SEQ ID NO: 157278 - DNA, 1000 bp, Homo Sapiens
ggagtctcgctctgtcacccaggctggtgtgcagtggcaggatttcagctcactgcaacctccgtctcctggttcaagcaattctcatgcctcagcctcctcagtagctgggtttaaaaggcatgcaccatcatgcctggctaatttttgtatttttagtagagacagggttttcaccatgttggctgggctggtcttgaactcctaacctcaagtgatccacctgcctcagcctcccgaagtgctaagatttcaggtgtgagctactgtgctgagcctaaatttaacatatttttgaacaatcatagacatgtcctatttttagcaggagctcaaagaaaatgtttgataaggtacagatttattatattttagtccaacccctatatttagcaaatacaaaaccacagtcatgtttacaatgtaaaaactgtagaatagctctgtatactaaaatattattaataatgcagtttttgagaaccaaaatatcagctggctgactttgcttttatgatgtatattaacatcttttagcatgacaataccactaagagaagttcaccattctttcagtatcttttgatttccagtatgcattactagttggcaaatttattttaatggcagtatggtaagaattcagtccaaagagcaaagattcattttgatgaactatttgatcatacaacatgcagcggcaaattttcaattcataaactatttttatcactcagtgaggattactattatagttggcataatcatgagaactttttcctgcttgattaaaagcatttaccattaccgttagattggctatgacatgcaagaggtccataaccccgccaaggatgtggcattcacctccccagcatgctcagttcgtatattaatggctgccttgattaagcttgaacatgaaacacaacacacttcagaacatgtgtctcaacagagcttcctacaccttccccactagctaatcagacacgggtca

SEQ ID NO: 157279 - DNA, 1000 bp, Homo Sapiens
ttttttttttttttttttgctactatatcaagtttttattaagaagtaaagtgctcagtattacacattaataacattcttgattgtcgagaaagacttgcgtatgtaatgtctttttaataataccagtacacagggaaagataatagggaagagatgagggggggagttctccatgactaaagaagaaaaatatatgtaatttatgggtagaaaggaggaattctgcaaaattttgcaagtgaaatgaaaaacagtacaataaaaagtatcataaagagactttctagtgaccataattgatatatggcacatggtcgatacacatggataccacataatagctgcacttcaaattgaagtttgtttacatgtaacaacatggtacatatacataaatatgtacagtcaatatccctggaatgcaaactttagtatgtagtaataaagaactttgtgtagcatattcaagagaaagtaaagatagagatgaagccatgaggaaaaacttacagaaacccagtatgtttcactttcaacctggaaaggtctatttgctcatgttctcattggagattggactgacattctaccagttaaatgaacaacttgtgaaattaaaatatagcattaaacgacaggattctcttggttctccaagtgagggttattcaacagcactgcatgctcttttgcttattagcgctcaaaatgtcaccttactcaacatttctgtaaaagaagatttttttttttgagaaatagatttctccccataaatttgggtgagaccctctcgtaaagaaaacagtgttgctaactcaaattttggctgatactgtctaatgtatgaacttttaataccaaaacctcttttttattagactgagctccatttgcattacaaattctagttttgaaacacaggatcaagaatacttgagtactatattttttatttttgcattttttgtagagatggagtttcgccacattgccc

SEQ ID NO: 157280 - DNA, 1000 bp, Homo Sapiens
ttttttttttcaaagaaacactagcaatttattgattttctctatttccaaaaaaagcaaatacattagtgtatcacacaaggaaactgggcctggccggcacaaggttcctctacaaacatgaagcaaggggaaggtgggctacagggaagctccaagatccctcacagcagcccccggcttcccttccctgcccaccccagccgcagtcttggtcctgccagccagttcagccagattccaaggtggacatgcagacagcaacactgcctcttgggtccccaggaggagtgtggagtcagggctgctagtgtggtccccactgcagaggtggctggtggccaatgactggatttgtcattggccgctagcacaggagatcccagggcagagtctgtgtccttcctcatttggccccaaattggaactccttattttgggcattggccctggtagtgtgaggccaatgtggacttaaaatcctgagacgtgtgtcggctacatgaagcctggcaagctccttgttctctttctctaggaaaagcccctctcagttttgcccctctcaaagtgacaggcctgggtcagaggcccgggtgacctgagctggcctgagagggaatgggcagtgtcaccaaagtcagccctgccctaatagtctgcctcagcccctgaggtctggaaggctgcctggttcccagggcaggggctgggcccatggggctcttcattctttgaaggtgggaggaacatgaggcgaggggatgcaggaggccagggtagtgctaaggggaaggggcatccgcctgggctggtaaggttcacatgcagcggtgcatttcccctcccgccctgaccggactgcacagcccccagccgggggagccctaaagccaaggacttgtgtctccactttcctccagaaaacataagccgcatgaggacagggatgtggtctgtgttcttccctgatgtagtctaagtgcttaggacactgccc

SEQ ID NO: 157281 - DNA, 1000 bp, Homo Sapiens
ttttttttttttttttttccttttcctttttcttttttttttctttttttccctgtttttcctcttggccccagccctgagtgggaaatcattcaaccacccatcttttggtccatctgtccatccactatgtcagcaggtccagcccccagcgcctggtcacatgactgtctcccactcttcctgtagcagggcaggtggccgctcaggcccagaggcctcctcgtccaggcctgagcaggagccgttgaggaacccatcgtccttgggagcagccatggcaggtggtgtggtctcgagggtctccagggctggggtccctggcttggcatggccaggcagctgagggtggccgttggtggtggcagtgggcagtaggcgggggctgaggggcaggccgagtcccacacgggggccgacattggtcacacttgtgtgggacaccatggggccgtagctatagctgctgctcccgctgcgtgcctttcgcttgaagtccagtgccagtgtccagcggctccaagatttcttgatctcagcttgtacctcgccattgcagaaacagtatatgattgcgacaaaaaatccctggaaggagttgaagagcatctcatagtgcatctggacttgccagagcgtccctgagacctcggtgtatggtgtggccatgaagacaatgtagtggacgccaaagaggggcatgagcaccagcgtggatttgagcagcttccggtactgctgccgtgtgtcacaccggccggcgttggtctcccgcagcttggtggcgagcacccggacgatattgatgaagaggatgaagttgagcacaatggaggccaggatgggcacctggatgatccactttttgttcccggagctcaagtcccagcacccggtgttggccagggtagctctgacactgacccacacagccacgaagacagcgggcagaccccagccgaagactgtgaagccccacaggtacttcttctctgagaag

SEQ ID NO: 157282 - DNA, 1000 bp, Homo Sapiens
tttttttttttttttttttctcagtattttctacttttattttctagagtaaatcaggtgccacttggcagggtccctacacctgatgcccttccatctctccaccacccctgccccagaggccagccaaggccaggaaggagaaaaccacatggcccacccgcctgttcctctctggggtggatggagactggcactgggagggaagtggcctgccaccaggagagggtgttccgaggggtcttcaggaccaggatcaggacaggtagggacgagggtaggaaccaggtgaagatacaatttattcctgtatcctgtaccagcaccgttgattcttcagagcccttggccagtaacggaccagttgccgctggcctctctgttgaaggacacaagctctggcctggagagctaccctcccgaccctttggagagggcaccatacagtgagtcctcgggcaacagtcttggctgctcagtgagtttcacccacccggggtggacaggggcagggttagatggcatcaccctcactgtcagactcgatgacgtccagcggctgcagacgcagggagtcatagttggggggcggggtgcctgggatgggcagggcctgctcactggggtagggcccagtgttggggctgcggggggccgtgtcaggctggaagccaaagttggtgtgggcctccaccagctcggccacggtgggcggtgggccagcgtagctggcttgggctcgccgctgccgtaggctcttggccaaggccaccagcttgatgatggtgatccacacaaagtcgatgatgatctccccaaactcgatgaggcacagcacagagccccccatccagaagccaaactggccacccagattcgagagcagccagacgatgttattggctgctgattcttcaatggtgcgatagttaaattcttggaagtagatgttgagcttgacaattcccttcctgctcagggtgatattggtgctttggtc

SEQ ID NO: 157283 - DNA, 1000 bp, Homo Sapiens
tttttttttttttttttgtgatgagtgcatttgcattttatttttccatgaaaatcacacacaacgcagacacacagacaaacatgcagaaaagcagatctgcttgaaatgagagcaatatggaggccaaagctgctagtgggatggcccggggtttctagttctggggtctggagaaggattttgtatttgtttggtttcaccatcaggtgttccaggtgagcaagtcagtttcggtttccttctgaaagacctctttctgaattcgctgcatgctcctcgtgtgtttgttttctgctgcagtggggtcatttacgctgggccagtccatttggatgaccatatgggcacaggctcctgcgcctccagctgcccagagttcctttctggctgcaggaacgagcggtgtgaaagatcagtcctgggcttgtcgactggctccagcagctcgagggtgcagagggaggtcatgactttcagtctgctgtttagcaaaatttacaaacacctggtccagtgtggtctgtgtgactgagtactcctcgatgagcaggctgtccttgtgggagaggaggagctggaagatcctcgccagggaggaggaggagacctggaactggagcatgttgtagtgcctctccctctgcacactgcctgggaagttcccctggaagaactgctccacagggttcaggtcaggaagcaggtcgtccttcggggatttgatcttcattgtgacgatatagccatctccaaatttggacttgagatgctgaatggtgcccatacatcgaaaggcgccctttaccatgatggccagccgggtacacagtgcctcacattcttccatgctgtgggatgtgaggaccacagccctcccttttctgatgatgctcacgatgacgttccacagcatgcggcgtgcctgggggtccatccctgtggtgggctcatccagcagcaccagcggtgggcagccaatgagtgcgatggctgtgga

SEQ ID NO: 157284 - DNA, 1000 bp, Homo Sapiens
aggaaataatcaaatctatttatttacaagtgatttacagttagaaaacccaggcaggggtatgggcagggtccgaatgtgggatggcacttgggctctggcaggtcacttgtctgcacggacgaaggaggcgaagacgctgtccttccggctgagcagcttctctggcttatcgaactcaaggatggcaccccgcttcaggacgatcaccaggtctgcactcaggatggtgtgcactcgatgcgcgatggtgaccacagtgcggtctgcgaaggctgtcatcaccaccttttggaggatgttttccgtggccatgtcaatggaagccgtggcctcgtccatgatgaagatgctggtcttcctcacgaaggcccgggccaggcagaacagctgcctctgtccctggctgaaattctccccgccttctgtgatgatggcatcgaggcctcctggcagtgccttcaccaccagcttcagctgggcgatttccagggcctcccacagtgtgctatctgagcacttcctctcagggtccaggttaaatcggatggtgccgctgaagaggacggggtcctgcaggatgatggagaggcgtgacggcagggtgtgcagcggcagtttgcggatgtcaatgccatcaatgatgatgtgcccttcgaacgtgtccaccatgcggaagaaggcaagagagaaggaggacttcccactgccggtgcggccgcagatcccgatcttctgtccaggggagatgagggcattgacgtgcttcagcaccggcttcagggagctgtcgtagcgcacgctcaggttctggatctggatcttcccttggtctggccagttctttgggatcagcgatggtgccaggagcccctcgtagctctctgcctcggttttcaggagcccatggatgcgcttcacagcccccagctggagctccatgtctgccaggttcctcaccatccagttgaggtagttggagaccattagggcgtaggta

SEQ ID NO: 157285 - DNA, 1000 bp, Homo Sapiens
ttttttgcaggtccacaggccatcaatgctttaattttgtcagaggcaggcactgagcagccctgctgaggtctccccagctactgtgccacaaccagctcggagctgccactctaacagcagagtggagagctggggtcagggccatagcccccgggctgaggaggccttcttgcaggaccccaaccacagaacgagtggtcttcacaacacctgcggcctgcggactccgttttttgccaaggagtctgagatgcttcatgcccatcagaccatggggtggccttcatgggagacctgcagggccaggctggccagacttggccagaaagacttcccagggaagatgcttggctctctgctccaaggtgggccatggtatagggccctcgaagggcttgtggctggggtgatcccagggggcattgctcaaagtgcacaggaggtggcagcagggtcaggcgagttcctgttccagggacatcaggagggagggtagaagcctagggagtgtgcgaggctgctgggatgagggagctcaggggctaccagctaaccagcctcagctcaatggtttctccatccttgggtctgtagtcagcaataccttgcaacagtggggtgttggggtctcggagaagctgccagaactccctttctccggccgctttccccatcacggaggttaagtaggggcctgacaaggaggcctgtgtttcatatgtgaatcctcctaactcatgggccttcttcaggacatcttccacggtggacccggccagaacagagatggactgtctgtacggcggcaagagactaagcacctgcagcgtgacactgatgatctcttgggtctgaggaatggtctcagcagctggttccaacatgactcgtggtgccagacagtctgggaagatcagatcaatgtaggtcttgtggttcagaacgggcagcagctgggaaatcatgagagcattctggaaggctccatcctgcagac

SEQ ID NO: 157286 - DNA, 1000 bp, Homo Sapiens
tttttttttttgtgatagaaataaaaccactttactgtttagaataaaggacacactataaaaagtgaacattatgcaacattacaagacaatatacattcacggaatataaaattcataaataacatggaggaaaactgtaaacagtgctacgaaatttagcaacaaatacattccttctagacagggttcgagatctcttgttggtttctctccatcacttctgggtttcaggacagcagactggctaaagggaaaggcggatgctgggagaatctaagaagcctctacccccaaagcaaaaactattctccaagttctccccttcctctcgcctccaaagagccaatttggaagttgttgtcacatccacctcccctactttccattttgttttgcttttgccatcagatttttataatgtttgtctctcataaaaatactctagtgacatgttaaccttaggtagccagaagccaaacacttgggtgccatcttggggtagtccagattgtcaattgtcacatgcaagacagaggtctggggcatggaagggtagtgtctcctgggggccacagtttgccctagacagggctattccaaaaagtcatttgtttctttaattgttcaagaaccatgttgccaccatgaggcaggtctggaacgaggggagggtaaaagacaggagtctcccagtattacctaccctggacagagcagagcactggcccgagagctgagagcctgagcatggagcttccttgattgggaggcagaagagatgcccaaaggaggaagcgagaacttggaattgtatctcccatggccctggattcttaggaaaatcatggcttcccaactggatgggcagcaggacttggggtgaagtaaatggtagactacccagggccgagtgacacagaacaagaacatgaatgtagtttaaacttttttcctactccaggagccattgggattccaatagggaggaggctggagg

SEQ ID NO: 157287 - DNA, 787 bp, Homo Sapiens
cagctcagagagaagctttattcctcagtggccctcctcagggcaggggcagtaggcaggaaggctcagctctcaaactttttcttgcggccctccattccactcagtgcatcgatgttcttccgccagtctcccacctcccggttttccttctcggtgtcctccttcttcacctgcttgaggtgggcccgcaggtccagggactccttagcccgggcccccagcagcgcctgcatcatggcatctgcagagatcctcactctccgcagggtgggccgcttaaacttgcctcgaaggtcaaagatcttctgagtcagatctgcaatctccgtgatgttcttggtgacttttgcctctatgtcgtatctctcttcatccaccttgtccacacgggcgtggagctgtcggcacaagtcctgcagctccgcgaagcccagcccggtcaactccagcggctggcagcgggtgctcagagcgcgccccttctctccgcgccgctcctccgcctctcgctccagctcttgctttgcaatctgcagcagcagagtcttcagctgcaattttctcgaggcggagatcttagattttttcttggcgtgcggctccgtggcataagcgcggtagttggaggagcggcgtctgattggggctggtgcagggcgaggttccctagccgcatcgctgctcccatccgccatgctgagactcaggccgggaatggcaggaggcagggcgaggacaggggcgtttggagggtcagtgagggggccgcccgggtgaccttcag

SEQ ID NO: 157288 - DNA, 1000 bp, Homo Sapiens
ttttttttttttttttttttttttttttttttttcctagtgccaggtttattccctcacatgggtggttcacatacacagcacagaggcacgggcaccatgggagagggcagcactcctgccttctgaggggatcttggcctcacggtgtaagaagggagaggatggtttctcttctgccctcactagggcctagggaacccaggagcaaatcccaccacgccttccatctctcagccaaggagaagccaccttggtgacgtttagttccaaccattatagtaagtggagaagggattggcctggtcccaaccattacagggtgaagatataaacagtaaaggaagatacagtttggatgaggccacaggaaggagcagatgacaccatcagaagcatatgcagggaaagggcagttactgggcttctgggctgcttagtccctggcttggcaggaagggtagggaagatggatggggctcattgtttggcattgatgatgtccacgaattcgggcttgagggaagcaccacccacaaggaagccatccacatcaggctggctggccagctccttgcaggttgccccagtcacagagcctccataaatgatacgggtgctctgagccaccgcatcagagacgttggacttcagccatcctcggagcttctcgtgtacttcctgggcctgttggggtgttgcagtcttgccagtaccaatggcccacacaggctcataggccaggacgaccttgctccagtccttcacgttatctgcgatgacctttgtctgctcgaaaacaaccttctcagtgatgccagcttccctttcatctagcttctccccaatgcaggcgattactccgagtccctctgccagagcatgggccactttctgcccaatcagctcatctgactccccaaagacatgccttctctctgagtgccccaggaccacccacgtggctccgcagtctttgatcatgccagggctgatctccc

SEQ ID NO: 157289 - DNA, 1000 bp, Homo Sapiens
atgataaagacataaaatgatttatagttggggagaatttatgatcaaaggattgtctccaatagggtatatctgaggttccataccaggagcgtcattaaaattgatgccaattttatgaaatatgttcattttgaagcagatgtgtattagtagacaagccaataatttaaacatactcaatgaaaattccatagtgcaattttatctaaggtattttatgattactctcttagagccacagttttaagcagctttttcctaaactaggctcgttattaattttcaacacttcatactatgatgaagacatcacatactttagacagccttaatagaacaaattattcaacaaagttgattatacgttctataaagtaaatcacattctctcattgagtgagctgagtctttttgagtgtggggacagagtccctgcagtcaggagctccaaggcatagaactgcctgccctgctctgtccagcaggtaatgctgcattccacaggcctcttcttcagccttgcccactcagcagagtacctcaggttgtgaccatgaacgactgatgagagtaacttctgacttgctcaggggatcctcttgccatcaattcccttcagtatgaccaaccgcagtggcttactcgcttcttgtccagaccatccaccatctgtctgccccatgatgctctcaaaccccaaagtcctaatatcccaggcctctttgtctgtgagaggaaatggttccctcactttaagttctgtaggctaatcagaaagggatctctctatagtttcaaaaagtgaaattttacttgcactacagaaataagaaacttacagatttgtccttgaagacctactaacctgcaactttagggtcctgaaagaggattagtatgtttataagtacttttattacagtattttttatttgtttcggagacagggtcttgctctgttgcccaagctgaagtgcagtggtgcaatcacagcctg

SEQ ID NO: 157290 - DNA, 1000 bp, Homo Sapiens
ctcatttagcaaagtttttattcaaaagcttctcagcaccatctagttatcagaaagaatggatatcaccttttcctgcccacccaatccccagttccacaggcagaagttaaaccatttggctagagttccccctaatgattatgactgagaccatgataagattttggttgttctcacccaactgtctctaagcctctactcaaacctgactcaagcagagatgtgcacaccccacagttcagaacaggaaggaatcatgtcagatctgatcaacctcccattcttgggctattagaggcacaagaaattaccttgaaaaaatggaattcagtgactgccatctaggaaagacagtgatactgtccagcagcatgcagttccgagagctcaactcttaggccaccctccctccactctactctaggaacaaggagcattaggtctgttttctctccatacacctcaatcgctcgtcctctcgtcttattaaaacacagacacagaaccaaactttttgacagttaaagacaaacaattacatctaattaaaatgctaagagatcctgagctgttagagatgaggagagtagatagtatgacctgatcttcccccctcttttttttcctttaacagtattctgtttcagcataaagcacactttctgaagaggttcctggtggagactggaaatctgactgtgtcctgtggcaacacacagtcccttgcataactttggcttcagtccctggatctgtcctttgcagctacgtcaggttccatggaaggaggaaagagctggagggcagtatcactcagccaaagctcccatggggtcccatgctggcaggataatgggttcctgctctaacacagctagcacctcttcagggacatgcttcctgtccaccaccacttcgtagacatactcagagaaccactcatctgtcatgcacaggtaacctttgtggccatggtcttcaccccatgaattctcca

SEQ ID NO: 157291 - DNA, 1000 bp, Homo Sapiens
attacctattttgccttataattgctgctgctttctaacatttctcaaacagtccttctatcaagtagactctgagaccagtcagaatttccaaagttgggtatccagtttggtgtatatccattattcagaggactcctctaggtttccaaggtttgtgctttccttgaaagtctccgagttagcctctggtatggcactggattctgaagcctctggctgtaaactgtctccatcaaggataatgtcttcaggatttggtggagggggacagaaatcttcattggggcagatttcctggaaaagtgtttcagcctgtttgactgcattatcatttcctaaaccacaatctgggccagagcagacataaacgttggatggtaaatcattataacagctcctgctgatgtctgacgaatctctcatattgaagtaaagagcccacagaattcttggcttttctacttgttcattttctatctccatttcagtatatggaacaaacaatttctgcacaactgattctaaatcttctcttgctgttttagaagatgtgcaagtcaaatgaaccaaataggtgcctttcatgcatgtcatcgttgaagaacataactcaatgacccgaacagcaaaagttcctggttcctctgctggcactgtcaaaatggaaatctgttgatctgaatctgtttttaggacagatctatctgtaatcagcactgccctggagatctgcctgtattgcacacgtgagcacatgttctcaggaaagtaactgtcctccacgaggaaatgctcagagattattctctgaccaaactgatctataattgctttacattttctggattctttgtccactacaaggcactgtactgaatggcgaagacaataaattccaccaaacacagcacacatcctgcagaaacactgggggagttctccttggccatataaaggaaacaaaaatggagtgttgccataccgcccaagacagtga

SEQ ID NO: 157292 - DNA, 1000 bp, Homo Sapiens
caatcgaggggtttctcaagtacctggtgacatttattttcttaacctgggtagtaggttcatgggtgttcacttatccttttttaaaacgtacattttatacacacttttgtatgtattctgtattttataaaaaataaaattaaataagaaattattcttatagtccttttctaacccatggggccttctgctagaattttgtgctgttcacattctcaatgccagcttccttagccataaagtaaaagggtccagggatttgtagcagttcttcagggctgccgcactctataatcttcccgttgtctaggaccattaccttgtcactgtccatgatggtgtgcagcctgtgggcgatggtgatcactgtgcagtgggcgaactcgttttggatggtcgtctgaatgaggttgtctgtctctagatccaccgcagcagtggcctcatccaggaccaggatcttggatttccgaagcagagccctgcccaggcacagcagctgcctctggcctatgctcaggttgccaccagcctctgtcacttcgtgggataacccaagttgcaggctggccacaaaagacttgaggtgagccagctccaaggccttccaaatctcctcatctgagtagttgttgaaagggtcgagattcatcctcaggcttccagagaacaggatggggtcctgggggatgatggtcagcttctctcggaggtcgtggagcccaatggaagcaatatctactccatcaatgataatctgaccaccggcagcctctaagattctgaagaggcagtttgtgagggatgactttccagctcctgtcctgcccaccacaccaatcttctccatgctaccgatgtcacaagtgatccctctgaggaccagatccagctcaggtcggtaccgcacttggtagttgttaaactggatcttgcctttgctgggccaatctggcggaggcctcttatcagtcacccagggtgcctcattttccac

SEQ ID NO: 157293 - DNA, 1000 bp, Homo Sapiens
tttttttttttttttgacatgacaaaagcgtgcatttaatttgatgctttgcagagatacatgaccaaagttgtatgcatggcttgtcttttgggatggtcccagctgtttattttaaaagaaaaaaattaaaatagagccaacaaatgcaattaagaaaaaaaaagtattgagacacaaggggacctacatgttctggtctaagaagcatgcaagtattacaaagcattccagatacagtatgacagaggaacagtgaacaagcattggaacgatgctctttctttcagaaacgggaagtctaacagttatgttttcacaatggtagtgattaaaccatctttatttttaaggaattttataggaagaattttagcaccatcattaaaggaaaaataataatacctttttagccctgcctatctccagtcttggaataataacagaagcatagcacctttcagtatctaaaatataaacaagaatagtaagtccatcccagcttctagagatgaggtagctcatgctaagaaatgttgggtcatttttcctatgaaagttcaaaggccaaatggtctaattccaatcatcacatttgattagagtcagctccacaactcagtttctagatctttttcttcattataggcttcaggatgatgagattgtacatgtggaagagtctcaatttagagtccttggacatatgtttgtaaagttctatatgtcaattattttgcattcaatatcttcttaaataagaaagtgtaaatgtattaaatggtatatactagtgtgacttctatcaatattgatagattgatcaagaggagaaagatatctttaaatttgaatgagaaagatgtctaaacttatagtcttttacaaaaatttaagaagtcgaagtaaattcactttgttctccaaaatgccactgaatatatactatttaaaaattctatttaagacagtgagaaacgttttttttttttaagattct

SEQ ID NO: 157294 - DNA, 1000 bp, Homo Sapiens
ttttttttttttttttttttttttttttttaatattagcaaagttttactttttttttttctgctcataaatgactctgaaaaagccaatacgcaagaggctaacacaactgtagtctaaaggcaacgtcgaggtcactgatatgtccctcagacaagaggcactgctcagaatccccctgtgctgggggtgagggaaggaggggacggtttaggacagaggaataaatacatgtggttgtgggagttctgccatcagggatggtggccccagcccaggaccccaaaaccctgaggcggtgcagtgggctgccaaccccccagctcggggttccccaaggctgcctcagtgtttggatgggctggaaggaaatgctgaggttctgggagggccccatggccagccccctcttcccactctagccagaggagagccaagctcccggctggccagggccctggggtagggagcagtgcccccaagagggctttctggtgtcaatgtctcatgcagcgtcaggtggtgaggcctgggcctggccctgaggcgggagtgggggtgacaggcgaggctggggtgggccctggcacctgcagctttgggctgcccatgtgtgtctgctgacatcccgactatggtccacggccgggaatggtgggcagacggggctgctggcagccctcagccttatagtgtgtgtggggggtggacgaggggtcatgaggacagggatggggctgggcgtctctggtaaggaccagtaagtgccaggcaggacgtactctgaaggctcagccgtggcccatctgggacacagccctgctcccgaaggggctccaggggaactgctcagccaggtgattcaccagggcacgggcaggccaggctgaacccggggccccagtgtgcgatgtggggaggtgactgggtgagcgtgaacagggcgtggggtgcgcggggcgggtggccgtgtgaccgtgcccggccctcagaagacgaa

SEQ ID NO: 157295 - DNA, 1000 bp, Homo Sapiens
ttttttttttttttttttgcagtattagtaaatgctgaaatttaatgatttaaatataccagcaactgttgcaaagcagttgtatagcagcatttaacgttagccagaacctccctggctaatgttaagtttataccaaaagaatgagagaaattttggcatccccttgggatgggggtcacaattcccacaacttttacgggtaccagctagagcgactccttgcatggctagtacagaccctctgtttttctctgacaatacctttaaaacattgactggatctaatcaggaagcaaacagattcctctggaggtttctgagtcatctgttcttaaaatggttatgatttgggaccttcttacgcttgatgcagagggtatcagacattcctcctggcgtgtgttcccagacatgggcagaagactgttgtcaggccaaagacggagttaaatatatcaagggagaaaggtggttccttggactatcaggaattggtgtttaagacacagtagaaaaaggaataaaaaataattttaatcatatcaaaaagccaaaccaaagaggaatagctcatggaactgacaggatcctgactcagcggctggtgctcttcctgtgcacaagcccagcactccaggtcccaaggcatttatcaaatcccaccaagatgtttggcttttgcaccgaattctgggtttggttccctgaaagaactcattgatgtaaataactaaaagtgaggtctgggtaccctttacatgattccccagacctcaaatgggctaacacgcttctcttctccagcagtcttcctgtccgtgaagtttccttccagattgttacatggaactgaaaacaaagggagcctcagctggatttaaatctggagcatgccacaaagtcttccacttggcattttcgagaagaacccatcagagatcataagaaatacaagaacagaggttgcatagctcgaggtgcttggatattcattcta

SEQ ID NO: 157296 - DNA, 1000 bp, Homo Sapiens
ttttttttttaactgtccgcaagttaaaaagatttattgctattccaggcttcaaatgagcccagaactcagggctggtgtgtgtttcagaagttgttatgatgtaacagggtggtagaaaaatccaggcagtttgatgtcgaggccaccctctcttccttggacccctgctccaaaagcagctgctggtgaggctctttcccatctgcctcattcacccaacaggactccaagactgaggcaggcagccttgtgatccccacagctcacaggtgagaggctgctcatacctctcctagcactggaagagccttgtccttgggaccggacactatggctttggccctgtggagggagaaacggtgccacaggagttgtcttaagaggacaaggcatgcacggtctgagatcagaggttgtgacgtggccacccatgagccagtccgtttgggacacatcacactgcacagctttttaaaaaaataattagctgccaatcttttaaaatggtaagatttcatatacaaatctggatttttggcttctctaggagtaaacattgaaactttttttttgagacagagtctcactctgtcaccaggctggagtattgccagtatctggcagttgtcttcacagactggctatgcactctccaactgactccagtccttgccacccttaattatatttccaactggagaccaggcctcagcagccttgtatcaatgggcacatgtgctgtgactttctgtgtaagaaatatttacattgtaatagcatctttaatcaaaaaggaaaaatcggctgggtgtagtggctcatgcctgtaatccagcgctttgcaaggccaaggtggacagatcacgaggtcaagagatcgagaccatcctggccaacatggtgaaaccccatctctactaaaaatacacaaattagccgggcgtggtggcagggcctgtagtccaagctacttgggaggctgaggcaggagaattgc

SEQ ID NO: 157297 - DNA, 955 bp, Homo Sapiens
ccagatcagaagggtttattcagcaccagagtttggaagggagacgcagcagggtctggaccgcattgtgccccatggtcctcccaagcctggaagtgcgggttcgcctccctcggggtagggtgggcaggagttctgtcccacgtggtctgggcctgcaggtggggtgggtctgagagattgggcagcggaggaggcggggaccggtccaggttggcgcgagggcccctcgggcagggtcctgtcgagtttgcaggcccgtgttgcccagcgccggttctctcctcaggacgcaccggttctctcctcaggactcgtcggttccggctcgctcggccaccagcgggtcggtcagcgacagccgggctgcggcgcgagcgcgggcccgggcccgcagcctccgcaggcggcacagcagcagcaccagcagcaacgcgtgcagcagcccaaggcccagcagcgcaagctgcgccgccagcgccccccagcagagcgggccgggagcgcaagcggcgcgcagctcgtcctcggccagatagggcagcaggcggccgcgcagcgctgggggcgccacgcaacgcaggtcgcggtagggcgcacgctcggggcggccggccagccaggcgcgcagcggcacaaggcggcagtcgcagcgccaggggttggcgcccaggtgtgcggtgcgcagcgcgggcagcgcgtccagcagccccggcggcagcgccgtcaggttgttgccggtcagcaccagctcggttgtgtcgacagggaaggcggtcggcagcgaggcccaagtcagcccgcggcgcccgcagtccacgagcgtccccgcgcagctacagggcgccgggcaacctgcggccgggcggctcggcggggccagcagcaggagcagtaagctcagcgccccgcgcggcccggagcccatggcgagaagacggcagcccggcttact

SEQ ID NO: 157298 - DNA, 1000 bp, Homo Sapiens
ttttttttttttttttttttttttttttttttttttttttttttttttttttttttttttttttttttttttttttttttttttttttttttttttttttttttctcttagcatattttattataatgatgtttgtctgtgtgtctcaccattagcctatgagttcctagaggatgaaaactgtcttctttgtacatctaacatctagcattagtacatagtaggcgctcagtaaatgcttgttgaagggaggcgtcaatcaatgaaatgcaaagcgcacaagtaggctccagggtcccccagggcagaatggatgtgtgattgcagcactgggattgaagctgcagccactggatctgcaggattccataagaggcctggaaaagctcagttctgcctcagagagtccacgtccagaagagcatggactggagaagctcagtggggaaagctgggaaaagctgggagaggagtcagaagggctagggggtcacccgacggcagagggatgttgaacagtgccccccagcaaggagtgctgccaccagctgtcactcagaggggccaggaaccatccttcactgttcctggctctggactcccacttctgcctctctgctgccaccatggaccctaaagaggcgagctaagcctctgagttcattagattctatctagggttaagacaagaacaccaccaacaggcaccaccataccaccccacccgctagtgcagaagcagccgggcggtgcactcagccggctgcctcagcggcctcgtcagccccctcctcgtcttgctcgccattctggagcctgcgcacgatgcgggtaaggtccaggcttcgtgtcagtgtgtccaggagcatctggtccttctggacgccctctataaactcttccagggagagttccccatccccgttgacgtcaatcttggagaacactgtatcggtgaactcctctgcagtcatggtggtatcgctgcaggggttaatgg

SEQ ID NO: 157299 - DNA, 1000 bp, Homo Sapiens
gatttttaaattttctttatttttgtagagatgggggtctcactgtgttgctctggctggtctccaactccggggcttgagcgatcctcctgcctccgcctcccaaagcgctggcattacaggcgacagccatcgcgcctagctgcgctggtaaaactggctaacgcgatctatcttaattagccacccacagctgctaccgccgccccatccccagggaccacacagacccaggggacaaagaagggcgcgggagacagcggctgaggaagcctttactgcggggcggccggaggatcgccgagctcagggtcccccaccgcactgcgcccggcctcgtcctctgccccaggcccggccccgcccccagcctcggccccagcctcggcctttgccggaacgtcgccgaacacttcccggtgcatggcggtgacgtagttggagccgctggggtcgtccaggcgcatccgcagcaggggcaggaagcgctcggtggtgaagtagcgcagggtcggcttcggggcgcgcaaagcggtgaggaagacctccgccacctcctcagggttctgcgccgcctcgcgaaagacttgcttgctgtgggcgaggtattggtagaagcggtggaaggtgtggatgtccgtgcggtccagcacctcctctgggctgcccaacaccttctccatgaaggcggtgtgcactgggccgcactcgatcaggctcaagtggaccccaaagggcagcagcagaaccgccagactctcgcataagccttcgagcgcgaacttgctggcgcaataaacgtcattgaaaggcagccccatcaatcctcccacgctcccggtcaccaacacgcgtcccgaaccgcgcctcttcatgtctggcaggaaggcctgcagcatccgcacagtccctactacattcacgtccagcacagaggccacggcgtcctcccccagcgcctccagcggccccagcaggcccaggcctgcgttacacacca

SEQ ID NO: 157300 - DNA, 1000 bp, Homo Sapiens
tttttttttttaaagagacaaagaaactttatttatacaaaactccaccccttctgttccactctcctcagcaaacacagataacaggtgatgaaactaaaacacacagacgagcattactcaacccaaggttcccgccttccctagcacctgaggtctgggccaacatgcagggtaactggtgccttatgcctgctgtctggattgcccggcccacagggtggctgagcatatttattctgggggttccatgcatacgaggagcccccagccatacagctgggcatgggtgtttggcagcaaattgtccctgctttagtcatagcaatttttcatgtcctctgttgctccccttaactgaacaccccttgacagccgggattctgcctccagcatcaacctaaggaagctctgttaaatgaatgagcacctctaggcaatgaccaccctccctgaagttcaatttctcatcgatttcccaaggccgcccaagtcattcccttgatggctgtgttagtttctaggctcggcttctagttcagtgagacagaggcaggtgggcctccacgtgggccatgatctggtgggcaaaacatgccttgggcagttacaacagggacagtctgctgcagaagctgtggagggagcagccaacaactcgttcacaagtcgaggtgcccaagggcctcagttttcctgcaggggcctgccgtggggcacggcgacccagtgccctctactctcatgggatgtggcgagcccagcccaatgctgggcggggtccagtctctgcagcccagtgttaggccaacgtcagtggggccaatcaccttcataccatggttcttcaagtcttttggaaatctgccagcctggctgccttccaggaggtggcatttcccaggcatggataagccctagtcctcatctgcagactcagcaacaagaggacatgcacctaagagaccctcatgtatgtgggtcccacggagacaaagtt

SEQ ID NO: 157301 - DNA, 813 bp, Homo Sapiens
tttttttttttttttttttttttttttttcagagaaatgtcgtgaccaaatacacgacctcctgtttattggaacatggcctctggatggatttccaactgtaggatgtgcggccacgaagtacccatagccacccaggctgcaaagaagatggaggtggataaatggggcagccacatggctaacagacaaggtagggacagaggcggtactcgggggagagagatgagggcagggaccactctgcaaagacgagcccagggtccacgagcgagccccctcctagtccttctcttctccgtgggtgatgatgtgcaccaggttcttgtagtccaagtttccagtcacgtcaggggggaaggcggcgaacatctggtcaacctcctccttggaaaacctctccgcctgcgtggtcagcatttcccgaacgtaatcagccttcagcacccctttgccttcagggtcaaacactttgaatgcgttgagaatggtttcctcagggtccgctcccttaagtttctccccaaacattgagaggaacacagtaaagttaattggacccggagcctccttgatcatttcatcaatttcttcatttttcacgttcactcgcccaagggcagcaaaggtgtctctcagatcgttcttgtcaatgaagccatccctgttctggtccatgatagtgaaggcctccttaaattcctggatttgggtctgttcgaacatggagaacacgttggagttggcgcccccggctctcttctttgctttcttaggtgccatggtggaaggacccagactgcctcccgagaa

SEQ ID NO: 157302 - DNA, 1000 bp, Homo Sapiens
ttttttttttttttttttgaaaaaagaaaacaaacaagtttatttgtatatgccttatgagtaacctataaggttacttcaagccttaagagccaattacagtaatggttcagaaacaggaatatttgtacttactccttgggcctggacttgggtgtcttgtttttgtaagatgctaggtttttttttattgtggtatgacacagaaaagtgcaccaaatgtacagcttgatgaatgtttacagtgtgaacacagctggctagctagcactcagagcaagaaacaggatcagtacctggaagactctctcgtgccctttccagacacttccatccacttttcctctcccctaactcctccattcacctgtccccatctcctcacccactgtgccccaggaaatcatcctgggtactcacatcattgtctagtaggttaaattttaacagggaataaatagttaacacttccaaactgtaatgtctcagtacagtatacagcagaagggtgctaaatcttacaaacaagtaatagggcttcattttcttcagctttgtagtttgtgaaacatcctagacttctctccgagtgctttccaaatctgtagttgcgcagtcttcaacaaaaactttggggaaaatgcccaccttccctttgcactccccttccagccattcttcattcacctttgataacaccaggattatatccccttcctgaaactccaggtcctctggttgggtagcctcataactgaagagtgcctccacttggctgcctttcttaagctgaggttctgttgtctggttattagcatcagctttttcactttccttgggttcatctggaaagccttggtcacccactgtgttctcacaccacagagtcaggcagtagtttttcacctggccccaggcatccttcatgctgtcttctgaaaggggcaccagctcattgctgtcccgaggccgatagctcagcttagtgtgttccagccgg

SEQ ID NO: 157303 - DNA, 1000 bp, Homo Sapiens
tttttttttttttttttttgagtgttaactattcctttattaggtggtgaggggagtggggggctgtacaatgcagggcttgggaattcagctacacagggattttgaccagaagccatattacaaaaatagcctaaaaatacctctattctgccataaggctgggccagaggattaccaggaagagaaagtaccactcaggcagctcctcttcttgtagtcccacatttacagggacataaaggaatgcatacatctgccctggctcccatttcccaccagcagccccctagttcccaaagggagatggccaagggtggggctggggcagagggagttggcagtgggcccttccccagcaaggctatggaacatgtccaatctggaatgcagtgaagtgagggaggtggggtggggaggaggctcccaacactcccccgacccctggccccagtgggtgcgcccaagggtgcctacttggtacatacctgggtcgtgtactcggtacacgggatcccagtcatgcctgtgtactaggtacacagaatccagcttggccgaatgggcccacagactcagccccacgggggcactggggggttcacagggggagggagcatctccatatatatattttgtaaaaaataataataataagtttgtttaaatgaatttgtttctatacaaaatgtaaaaaaaaaaagaaaaagaaaaataataataattcattcatgtcagagtgtaaggaaatgagaggccagaaggagagagaaaggaatgagggaagagagaagtggggaagaaggaggtcccagactcttcacaagactgagagggtgggtggtagcccccacccattataaataaaggaagactgaagccctgggctgatgacctatctcggtcacgctgcaaggcaaggatgcaggagggttggtggaaagagaagaggatgaaaaagactaaaaggaaggaagagacagagaaagaaaggaggcag

SEQ ID NO: 157304 - DNA, 1000 bp, Homo Sapiens
ttttttttttttttttcaagttttcaattaagaataatatttgctgatggcaccatcttcctgtctttcagccttcagcatggtagaggaaaagagaaagagtgtagacaaaaacagttgaagaacatctgtgcttgttccaccttcattttctgttttgtgcgttgcctgaatgaaccgtgtcttcaggttggtatttcacaggcggtgctcccaagtagtctggttttcccatttgtggagggcgaggtcatagaggggacagggggaggctgtctggtcagcactgtgtatttccaaagaacaaggactacccaaaactacaagcctttgaaggaccaaaggaaaagagaaaaaaccagcctctaaccaggccatgcgctagaaatgattgagtataaaaaagaaaattggtttctgtgtatgagggtgcatggaaaaggtctttatctctgcacaaaacaaaatattcaagtttcagaatatcccaatggccttgccctggatctcctcttgtgctcttccaatttccaaggatgttccaacttggtggaaggagtgtatgtgggaaattcaacagcccctctgtatctctttctacccaacattaacttagcaggatggatttaagaaccggcagcttagcctgaggaattgctgtgttctgtgggagcagggcaggttcataaataagtgcacagaggtcttgaaatacagggatcatctgttcttctcggaacatggatgtccttccagggatgtgcatctggccttgctgtctaagttccatcaagggagccttccgttctagagtatctgctttccacggcatcagggacagctttccggacttcactgtacactgtctctgtgtccttctttcctagatctttgtgagactcagctgaggacacttgaacttccgtgtactgcacgtctgagttcagaggctctttattatcatttattggtttcattgcatggtttccgacatcgtcat

SEQ ID NO: 157305 - DNA, 1000 bp, Homo Sapiens
acaatctaaactttatttacaatatacaacaaaatggcggacaataaccataatattaaggaaatattaaaatataaaaagtattgaaactcatatttcattttatttgaaaacatttgacatggaaatacaggtcccctgaatcaaataaatccattgcatcctggtacctgaattttctctgaaatacaaaaaaaaaaaggctcttggaagccattaaacaaaatgtaaggttatttgtaagaaaataaactgaagtgcaattctacaaaacaaaaaataatcaccaaaaatgatttctgaggtatatttatgtagattactgtagttaaaataagaaaatgtaaaatgggtacaatgtatctactcttacttaaaatcttttaacatcaaaagaatacatcatctgtcatacaatcactgaagacacacacatatttgcaatcaaaaaccacctgcatccaaataatggtttattcctcccaactaccactggcgcttatatatcctgcctcttatctgtgtggaatttgaactctgtttgatgtaatgcaagacccacactctcaaccaaaaaaatctttatcttcttctgtatcttgtgggaaaaaaatctgaggcaaaactaaattccagttcacctggaagaaaaagacatctttttctcctcctcttgcttctcagtgcatgtttattaatcccaaggctccttttgacctcactgaccaatcatcaattttcatcagccattatcactggtccctgcaatgcacctgagtggcttggcagaaaacttgtagattcaggtttcacaggagaaaaatacattgcacttctgaagtcccagatatacttcacacatacacacacaaatgctcgattcagtgtggtgaatttccctggagtatataattgcacttgcaataggcattgctaaaaataaaactctagtataaaactagggtctaggatattgcagtctcaacagtaagggcaaaaa

SEQ ID NO: 157306 - DNA, 1000 bp, Homo Sapiens
tggtatttaaaatgttttaatgtatatgtgttatgggtcataggtactcattagtatgcttcataatttattcacgttagatatactctttatagatatcaaatattacatattataatttcttaaaatctgctgtggtggaaataaatgaacacatgaagtctccctgaaagaaaatcagtgtttcttgggaagaaccaagattccctgacagaagctaccctatgtagaggacaaagtaggtcttcaataaatattagttggtttactgcttttcccaaggatacatctggagggtctgcattcctttctcattggtgccgcctgaccacagaactagctttttccgtgacatctaacctaaaccccgcagtcctaagtcctgacacgtatgacaagatgctgccacctggtggatacagaatagatttaatgaaatggctaggaagtctttcactctagttggtggaactggcaatagggtgagagggaagcaggaatgagaagacaaaaattaagaaacaggaaaaggaaggagctccatctctaatatggaggtagaaaaaaagggactatcatctaaatgagactgaagagtccctagaggagaatggcttccctctccttccttctgagactagaaacgaggaaagaggctacagcttgtattgagggaaatgcaagactgaggagaaaagaaagcaggtctagctgatctcaacttagcaagctaaaataagagtagcctggtgttagcggccacccaagcaactccctgctcctagtttccacttggggaatccatgtgattttggggaggctgacccccacccttttccccaaaggtgttgtccatgatatagaataagcaaattagcatgtatcatcctcctggccacagtgattggtcagggtggacatgtgacccaggcctaatcagtgtgaatattagggcttttgctgagatttctggtacaaagatgccttctttttctgattg

SEQ ID NO: 157307 - DNA, 981 bp, Homo Sapiens
ttttttttttttttttttagtttgaatttggattcttttaatagcctcataataagtgccatacagggtttttattcacaggcttgaatgacaaagaaattctgacaagtttaatacccatctgtgatttaagtctggcaaaatacaggtcattgaaacagacattttaactgagttttataaaactatacaaatcttccaagtgatcataaatcagtttctcactacaggtactttaaagcaactctgaaaaagtcacacaattacacttttaagattacagtgtttaatgtttatcaggatacatttctacagctagcaggataacagatgagttaaggggcctcagactacatccaagggaatgtttattgggcgatcccaattacaccacaagccaaacgacttccagcgtttcctgtctttgtactttcttcatttccacctttgcccaagtcatctgctttttcatggaccaccagtgtgcggccaatgatgcaatggtctcctgagagtgagatcacagaatcttcaatagacacatcggccacaccatctttgtcagcagtcacattgcccaagtctccaacatgcctctcttcatcctttggcccaccgtgttttctggatagaggattaaagtgaggacctgcactggtacagcctgctgtattatctccaaactcatgaacatggaatccatgcaggccttcagtcagtcctttaatgcttccccacaccttcactggtccattactttccttctgctcgaaattgatgatgccctgcactgggccgtcgcccttcagcacgcacacggccttcgtcgccataactcgctaggccacgccgaggtcctggttccgaggactgcaacggaaaccccagacgctgcaggagactacgacgcaaaccagcaccccgtctccgcgactactttataggccagacctccgcgcctcgcccactctggccccaaac

SEQ ID NO: 157308 - DNA, 1000 bp, Homo Sapiens
gattcaaagacaaatatgaatgactctacctatttgtaaaaatgtgaacattaaaaacagtacaatgactgggctctcacaaaccgtgcaaattcaatttgaaatgttcatctggtataatattcagctgtcaagaggaagcaactcaaaggacatcacacagtctataaaccagctcgaaggagccttccagactttgccctgccgaaccctctctgggtgataattacacaaatcttcatagatgatatactgtgtgcagaagcgctgatcagaatcgggtctcgcatggtatgcgactgtattgatggtctgagtcacgtcactgtctggcttgggctttctactgaggatctggcccccacctgcagtgacgagcttaataaggttgtcctttggatggtgtttgaaggttccccacaaatagaagtagcatccatcaaacagctttggcaacagctgttctctgttgagcctgcttctgcgtggaccttcaggaatttcatacttttcttcctgttcacatacttttcttcgtagacatgcttttacccattcaaattttagaatccagcatccattgagaatcccaagcatacacttcaaggtactttgaactgcatcaccaggaacaacaacatgagttactgtactgtcaaactcagtatattttttagccttaagaattactgcaagctcactgagcattttctgttgttctgaagacagcccactgcctataagtacaagaggtccatccctacgctgcccagtgttcattactgagcagtggctagctgaggatgattcattcttctctggtagcagcaatagcgatttcatactttcatcatctgtataatcgacaggccgcagaccaaatatattaacagcatttctggaggctccataggaaagtaacagcttgactatatccacgtgcccattcttggctgcatcgtgaagtggtgagtcattttgatacccggtggtgttcacc

SEQ ID NO: 157309 - DNA, 1000 bp, Homo Sapiens
ttttttttttttttttttttaaaaatattaagaaagtttattttaaaatattttacactcttttgcccacagctctttattcttccctcatggtgaactgcactactgcacttgtgtggcccacatgactttatatctttgtacagagcatttccagcatcatatcatccatgctgactgtgccgatgatgggcctgaagaacagttcagcaatgacattggcattgatgaatctcagcaggaaaagggtactattaagttcgatgaatctgtcatggggcccttggtgcgtcatcctggtgtgttcactgagtatttgctgagttccccactggagtccctgaatgtacttcacgcactgcaggcccggcacgtccgggttaaagagcacggtccccttgaggtaggcgtactccttggtactgatgttcagactccagcatttggaaagaaagcacttgatggcttggacctgggaggcggagggcaccttcctggcctccgccggcggtgccaaatggtgctgcagcgtgggcacgggcagtggctcgttgcccccggtctcccgccgcctggtggtgaggatcttctgcagcatgctgggctccgagacttccacagtctcgaactgcaagcggtcctgggccagctcaagcatgagcagggacgcccagcagttgcgcaccagcaccagctgctggtccaggggcagcacctggaagcagggcaagtacttgacgaagcgcagcgtcttcaacaggcccgctgaggctgcctcgcagaccacctgtggactcttgagcgccaccggccgcagcgcaccagaggaggtgtcccaccagggggccctcggccgctcctccggagccgcctgcgcttgatttgtgctcgtgggcacgcagtagagggtgctgccctgctgcgggtggtcttcaccgcaaaagcagcagcggtacagaagcgccgtggcccgcccgcctggtagcgcctctttaccccc

SEQ ID NO: 157310 - DNA, 1000 bp, Homo Sapiens
cattcattcatggttcattcattcatgtaaccaacatttctgagcatggcacttctggtgtgccagtgctgggacacagagttgaattagaccactgttccttggccttgaagagtttatttactcattcactcagcagcattcaccaagccctactgtgtccattggctgggcaaggggtggtgttgggggtagagtgagcgttgctggcagggggagccggggtggatgtgaagcagcccacaggtcaggcctccatatctggaaagagcaggaacccggaaaagatgctgttggcaccctccatgcccagtagtgagttcttgtcggtggcctgcaggaagacgttctccccctgctccagcttgaggaccatgccaccggtggtgacctggaaggtgttgtaggcatagtcacagaaggtgaccaccttctgtgcacgctcccggccacgcatgaggttcacgcacaggttccctcgagagctggcgtggtaggtgaagtagtagagaccgggcaccttgcaggtgaacttgccactgcggggctcataattgttgttcatgttggtgatcacgtggtcgaagcggatggtctggtcccggcgcagggggacgttgatggttcttgtggcagagaaggcgattttctgggtggccttgtagtctcccgattcacctttggggcctggggctccaggggcccctgggccacctttagggcccatggggcccttggggccgacttttcctggattcccaggaatccctgggtctcccttctctccgaactcaccatggtctccagccagccctggaagccctttctctccttttatccctggggtcccaggttggccatcggggccaggtgtcccagggatacccgggatgccagggatggctgggggcccggtgcagctgagctgggcctgggagatatcgattaggcccaggagcaggagcaagatcagtactgggatgctgccccatgggatctt

SEQ ID NO: 157311 - DNA, 1000 bp, Homo Sapiens
ttttttttttttttttttcttgaggcttaaggtttaatactgtttgtcacattcaattttggagttgcttgaaacttgttactcctttcttctttcctgtttctcctttctggaatgggaatgtttatcctatgcctctccaaccactgtattttggaagcacataacatgtttgatttcataggttcgcagcaagaacagttggactcaggataaattgtaccttgagtcttacccatgtttgactcagataacatttaaatcacactttggactacaattttaaagttgatgctaaaatgagttgatatttggggctactggggagaaatgcatgtattttgtatatgagaaggatgtagattttagagaaacagaagcagagtagtttaatctgaatttttgtgtccgcctccagaattcataggctgaaatctagtcaccaaggtgacgataatagcagggccgggcctttgaggggggaagggaatgcaggcagtgccctcttgaatggaactggcgtccttataaaagaggtctctgtgagctgtcttgcccttttccaccatgtgaggacacagcaagaaggttttatctatgaaacaagaggtgggtcctcaccagacacagaacctgctgacaccttgatcttagccttctaagccttcagaaccatgagaaatagaattctgatgtttgtcagcaacccagtctatggcgttttcttagagcatcctgaatagattaacacaaataactctagctaggtgtgctcccaacctggggcacttcatctccctgtacaggctgagtcctgcagggcgtcctggatctactgaccaccactggaatgatgccatagggatttcccctttcatgggggaacaaatgctctgatcctcatcagccaccaggagctggctgctgtgatctttgccctgatgaaaatccatggagataaagacagtctggctgggtacactctcaaactgggtgcttc

SEQ ID NO: 157312 - DNA, 1000 bp, Homo Sapiens
tcattttctcttccggccacaagctttccccaggcaggccccacctgggaaaatgggagacaatccgaagccaggtcttgctgccactcctccaagtgggaactgcccggcaccccctaggacacctccaaggccagcagcaccgtatttagctgctttagcggctgcagctggaggtatacctccaaggcccccaacacctggaactccaagccctccgactccgagtcctccgagcccagcggctcccactaggccaaactgggcggctttggcagcagctttggctgcggcagcggcggcggcgggtccggctcccaccacaccgcctgggatgcctactccaccgagagccccgagccctccaaggaccccaggcactgctgctccatatttggctgctttagcggcagccagggctccaggtaccctgggtgatgagggggtgctggggaggtgctgagaggaggagggatctccttccctgagctcaggggacaggctccgcctaactccctcatctgcacctgccccgaagccaggaacaccagcaccaactccaagtccaggaacaccagcaccaactccaagtccagggacgccgacaccaactccaagtccagggatgccagcaccaagcccagctgcagctcggagctgggctttggcagccaccttggcagcggattttgctgcagctgcaactccaccagggccaatgccgggagccacgccaacgccaggagccacaccaactccaggagccacgccaactccaggagccaagccaactccaggagccacaccgacaccaggagccacgccaactccaggagccacgccgacaccaggaactaacccaaactgggcggctttggcggctgctttagcagctgcagctgctggggtccccactccgtacttggcagccttggcggcagctgctgcctgagcttcgggggaaatgccaactcccgggacacctccgactccgggaaca

SEQ ID NO: 157313 - DNA, 1000 bp, Homo Sapiens
tttttttttttttttttttttttttttttttttttttttttttttttttttttttttttaaggaggaataagtttatttctcctccatccactcaaaatatatcttaacaccagtggcattatggagacagcatttggttagggagtgccaagcattctacagcatttgatggtggaaatagtcatgctttttatttctgctctctaggaatgtaaggtgcacagcaggtcagggtactgctgtgtgagacaaaaggtccaggtagaggcaattctccggatgcaggcagggcaggtgctcactgggcagagtgcttctcatacaccttcaggaactcgagcacgtcgtcgggggatcccaagatcaccggcgccctctggtgaatgtctgtgggaatgacgtctaacacggcctccttcccagtggtggccattcccccagccttctccatgacgtaggccatggggttgcattcgtacagcagtctcagctttccattggggctcttcttgttagcggggtacagaaatatccctccgtagaccagagtgcgatgaacatcagccaccatggagcccacataccgggccccataaggagctgaattatctggggggaacttcttcctctggatgtactcagtgacggcagggtcaaagtccctggcgtagccctcgttaaggctgtagattttacctttcttttttatcttcacatccttgtccaccaaaatgaactccccgatggccgggtccagcatgaagcagttgaccccacagtccatggcaaggaccagcatggtggcactgccatacagtgcgtagccggctgccaccaggttccggcctggttgcagagcatccttctcagaaggctcatcagttgatttctttctatagatgccaaaaatggttccaacggacacaaggcaatcgatgttggaagatccatcaaggggatcaaaacagaccacatatttaccccttttctccggttcca

SEQ ID NO: 157314 - DNA, 1000 bp, Homo Sapiens
cccatccgcaaagtcataattgtgtttattcatttatttatttataagagtcagggtatcactacgtcgtccaggccgcagtgcagtggctattcgcaagtccaatcacggtgcactatattccctaactcctggcatcaagcaatcctcccacctcagcctccctggtagctgggaatacccagctccatgactgtatgcacactggtgattaaaaaaaattattcctttgatgactgtgtaatggttacaaatgtatcctctgagagggaaggctgctgtggggggtttcactgcctgacatgtaaaacatgtgctgcaaccatttactgaaagaatgaacggaacgccctgaagttcactcagccaggctggtctctcagttctagcaatgatcatcccaggccctagaaagccaggattgaagaggcaggacctatggacttggatgcatgccagctacaagccaatatggcacatttgtgcaaactggaaaaaggctccacttccagatggactaactagaaaacagtgagctctagggccgggcgcagtggctaacacctgtaatcccagcaccttgggaggccgaggaaggcggatcatgaggtcaggagtttgagaccagcctgaccaacatggtgaaactccatttccactaaacgtacaaaattagctgggcgtggtggcacgcacctgcaatcccagccactcgggaggctgaggcaggagaatcgcctgaacctgggaggcggaggctgcagtgagccaagatcatgccactgcactccagcctgggggatgcagcaagactccatctcaaaaaaaaaaaaagaaaagaaaaagaaaagaaaacagtgagctctctgggtggacacaatgccaaggacacctggtttgatgagtagactgtgggtctgtttaaaccccacttgccttcttaaccaggggacttcctgcagtgaacaacctacacaacccctcagggcatctctgttgt

SEQ ID NO: 157315 - DNA, 1000 bp, Homo Sapiens
ttcaatcaataaaaatattttattcaaaaaagtctaatatcttattttacatgatttcaaaataaagttgattgtagtacagattgctgtggcctttttcccctccattttttacatgttctcatggttacaatatccagcataaagaggttgtgcagctattccacgttcgaccatcctgcagcggtgccttgtcagtctgtcataggcgtcatccatatctctgacatctttggaactccagagtctctcaccaacagcacttgcccgaggccataatcttggagtgaggttagttgcatccacatattctccccatagacaagcttctccaccaatgaaaagttgtttctgtttctgagtaccgccaaaatcaagaggttccactttatagtatttcctccaatcttgtccatagctaatcaaatctaagtaccaaggagcagaaaggattacagggaagccagatgctgtgactctactgagttcctcaggatatgcgctgtctttccatacttcaactattgtgcccggcgcaagctttgctttatcatcaaaaacctcctgccagacaatggatcccttgtttatggttgcaataatatccaaaaccttttgaatgtagaaagattctagtttcttaaaatctgtgccaaagcctttttgcctcatgaaatcttgaatttttggatttgattcccaacatttaaattccacttcatctcctcccaaatgaatgaattgatctggaaacacctcactaatttctttgaaaaatgtagtaaggaagctgtatgttgtattcagagtagggtttataggtccaaaagagtccaacttgttttgtctactgtaacatggagtcaggaggtctttctgaccttttccccaagatagtgtatgcccaggggtatcaaattctggcaggactcgaattcctcgtaatctggcatattcaatcaccatacggacatcatttggtgtataaacatgagacaaa

SEQ ID NO: 157316 - DNA, 1000 bp, Homo Sapiens
catttaagaaatttaattgatcacagtaagacattcaggctacaaaaaccttctatacagtggtttaaaaagtgacacccatctcccagaagccactcatacatacaacggggacatcattctcccaaaaagcgttgcacacagtccagttcgtgcaaataatctttgtacataaagaagaggcatttcagaggcaataaccccctacacagggccccgagaatagtcactgaacaaatacagcaaccagggtttgcaaaaataaatagattttatatatatgtgtgtatatatatatataagtgataacagtttcaaccaatatacaaagtgcaaacataacaaaaaatccccactatctgtacagggacgcatttacgtgctccgaaaccagaaaggcttatcacggttccctgcactgggggggacacagtgttttgtccctggggacaattgccaatcccttgtgacatcttcacgcgggagtctgacggaggctgtcactgtctctccggacatcagtgcaacagtaacacggcgatttcagaaagaacctgaagtcccgtcaaacgatccagactggaggatttatttattttttttatagttgtatttctgaaatagggtcttcatctgttgcccaggctggagtgcagtggctcgatcatggctcactgcaacctccacctcctgggctcaggcgatcctcctgcctcagcctcccaagtagctgggatcacaggcacgtgccaccatacccagctgatttttaactttttggtttttgtagagatgggatctcgctttgttgctcaggcctggtctccaactcctgaactcaagtgatccagctcagcctcccaaagtgctgggattacaggcgtgaggcacctgtgtctggccaaattcattttttaagagatggggtcttactatgttgcccaggctggaaagcagtggcataatcatagctcacgacagcctcaaatgcctgagctca

SEQ ID NO: 157317 - DNA, 1000 bp, Homo Sapiens
tttttttgacctgagtcttagtagtagcgttttaatggcagcagccccaagaggagagtcagagtctggtctgcccccggagcaggaggcttgggcttggagggcccatcccagcagacctaaccatccacctccttccattgaactgaggccaggaaagtgcggatttccatgggttccagcgtgatgttggccgggtccagctggtacggagtttggtggggtgtggggcctgtgtttgttgtccacttgagcctggaggctgcctcgcggagctggttggccaccagcgtggtctcctgcaggcgggtgatggtgaaggtggagaacaggtccctcaagttcaaggtaacgggggcgctcaggttacgtccggaatcctctcctacggcaaactggtgctccaagcgcagcagcaccatttcggggccccagctggccagcgtgagcaggtgcaccgagggcggcaggtccctgcgcagccctgagaactgcgtgcgcggaggagccccgagattgtaggcggcgccgccacccggggccagcaccacctgaggggccaggacctcctgctccgccaggagccggtgtccggcggctgcagcctgggctgtgtccagcagcaccaggtggcgccctcgcacccacgcccccgacccgttctccattagtggctccgatactccgcgtccatcgtccttcagcagccttcggtgcaccatgagctccagcgagccatctctcaggctgctgcccccctgggagcggtcagtcagcacagtcagctgcatgtttccatccgtgatgtaaatccgggtgttgactggatagtagtttcctgccacgggctccgtctggttcagtttccaggtgggtcgataatcccgcctcctctccaggatctcccggccattgctgtctgtgtagaagcgtccctttgtctccagcggtgtgtcaaaacggctgatgacctccttcccccaggtgtcgcccacaggta

SEQ ID NO: 157318 - DNA, 1000 bp, Homo Sapiens
tttttttttttttttttttttttttttttttttttttcataaaagagaataggactttattagcattggtgcagacattgtattacacaggaatgggtccctagcttgcacaaccccagctgagctttcagcagataaatcacagcagaaatagaatcaccctaggactttcaatcaaaagctggaagtccaccttacagaaagacaaaaagaaacccctttttatatcttaacaaagcaatagctctcaagcagcagagcatctcgaggaagaaagcttgcccggtcgccatcccatcatgccagagcgtgcagtgtccacccttgactacgctggggaattgctgattttttgaaaaagcttaacttaacaatttctgatgtctatcttttagagttctgtatgttcccattttttattcttctgaattttgaattgcaagtagctgtaaaatccaatctttgagtgcatgggggtgggtgtgaggcggggctcagcttcaaccccctgtcctgtaaagcagtggctggtttttcctgagcccagccctgggaggtcgtggtaggtgtggaggctgcagagctcctccagatgctgccctcgctgtgcctcacaccagagaggatggaagtgggctctggtgtcagactgtggttgagctgagacagacaaggccgacacagggctgggggcccgtggtccaccagtggaagtgactgccgaggaagggcggtgaggagggcggtgtgggagctgaggcttcttttcagcctggcagctggcgagggccagggagcaggggaagagcctggtcaccatggtcccagagcccgtctcacttggcttttcctttgcagctggacagctgagttctcatcaaaggtcggggctgtggatacactggagagggctggacatggtcccacacaccccgagggcctggcaggtggtgtgggcatcccagcccctgggcaccagggtcagcagctggggcgtgtg

SEQ ID NO: 157319 - DNA, 1000 bp, Homo Sapiens
tttttttttttttttggagtccaagtctcttatctttattttaacagactggcagcatcaggtcgcagcagcagtacagggttcctggctgggcagcacaggcctggggcgacagctcctgtcttgtctgcccagggcagtgtcaacttaggcctctactccatggctgtgaaaggacagcagcctcaaggcagtctagctcctgggcacaggcagccaaaccccctcccatatccagctaaaccagctccaggaaaggagaaggtcctgtttccccggcatccttggggcccagggactggttctttcaccggatgatcttgcctggttgaaccacagcagcatttgggctttttcaccctttcctacatcaagaactttcccaaatgtgggccctggggccctagcaaaacagtggccttggccacaggctctgggcctctgggaggctcccatctggcatcaggtggcggcacagagcagggctgtcagcacgggcagagagctgggcacaaagagtagccagacggcagggcgtgccacagggctccgagggtgggtggcccttatggtagagaaaccagaaggtctggaaaagttgcatgtcgccccgcatgcgatataccaggttgtgccaggcggtaggcagtgtgttgggcagcccataggtttctcgagccctgtagagaagctgccagtgcggtatggctcccggtatgtttgcctgggtcagattcaggatgtaggtctcatggtccaggaccacgtgagagctcccggagtagtttccatctatttggtacacacggtaaccaggattaaggccgatgtaggtagttgcactgggtgccaggaaggctacagccagcggccggctcagagtctcttcatcatagaagacctcaaattcatccacatgagtgtggccaaagaactgagcagccagggtgttctcatacctggctacaattcggtaataattccagctccagctcttcag

SEQ ID NO: 157320 - DNA, 1000 bp, Homo Sapiens
taaaatagaatactacatagccatatatttttaatttaaaaaataaagttcagaacagtgaacttagacagctgctgtttgcgaaaatactgagcaagaataaagatatacatatttgcttaatacacagtaaacttctctggaaagataaacacaaagctggaagaacggattgcctatgcaagaggaattagcaaaccttgagaaggattgagagtgaggctttcctctgtatacttctttgtgtcttttgaatttcaaaccacattcatatattgcttatttaaataaataaataatatattttaaaaagaggatagtaggaagataagtggagtcagggagtataggcaactcttttgaggagttttatgcaaagctgggcaagtccacctcttccttagctatgtgacccaggcaagttagtaaatgtttctaaaactccattttctcactcttagaattgagatagtaatacctgccacatagaattatcttgaaaaataaggtaagaagacaggtttcagatacttggcacagcaatagcacatagtaagcaccagtgaatgcttagtagtagtagtagtctaattcctaagagtccatggaactctaggttcaaaacccagtttcttctgggaccattagatggcatcagactcaagcaggtgctcctctagctgacagctctaaaacacaaggaagatctttgttttccttattccctagtcctttccccacaaaattctgacaattacgcatttcctgcttgtttcacaattgccatgtggattacaagtggctatccctgggtggaggcataaaggacttgaaactcaatgctgtttccacatagggccgggcagacaggctatggaggtgttttggcatccaaggaaatctatcagtttcccaagctttcccctctccattcatactttcctttagaaagaataaggcatgcctgggtgggaaagatactgcaggtaagcgacaagaa

SEQ ID NO: 157321 - DNA, 1000 bp, Homo Sapiens
tggcagcaaagttttattgtaaaataagagatcgatataaaaatgggatataaaaagggagaaggaggggaagggtggggtgaaaatgcagatgtgcttgcagaatgtaaaagatgttgacccttccagctccacgtggtggctcacaattgtaatcccagcactctgggaggctgagacaggtggatcgcctgagcccaggagtttgagaccagcctgggcaacactgtgagaccccatctctacaaaacatgcaaaagttggctggccatggtggcatgaacctgtggtcccagctactccggaggctgaggcaggactgctcgagccggggaggcaaaggctgcagtaagccaagatcacgccactccactccagcctgggcaacaaagcgagacccagtctcaaagaaaaagaaaaaaaaaaaaaaaaaagaaaaaagaaattgaccctgagcataaaacaagtcttggtggatccagatcatcatatacaagagatgaaatcctccagggtgtgggatggggtgagatttccttttaggtactaaggtcgaccaagaggttgtcagacagggtttggctgggccagcaagacttgacaactccctctacctaaccagctgcccaactgtagaaactaccaacccaccagccaacagggagagggagagggaacaggcaccctcaagggggtcaagttttagaccccatgtaataaaaggtggtttcaaggccagatgtacattatttcattaaccctcacaatgcactctgtgaggtaggtgcaaatgccagcatttcacagatatgggccttgaagttagagaaaattcaacatgagggacagcttccctggttagtacggtgaagtgggcccctacctacctagaatgtggctgattgtaaactaacccttaactgcaagaacatttcttacatctcccaaacatccctcacagtaaaaaccttaaaatctaagctggtatgtcctactcccc

SEQ ID NO: 157322 - DNA, 1000 bp, Homo Sapiens
attgtgggctcagaagggcacaagagcagaacatgcagcaagataagagctcagcctttattgtgggctcagaagggcacaagagcagaacatgcagaggactggcagcactctggcctggccatcaggccaaggcaggcagcagcaggcacccatgcagctgcagcagcctcacttgctgcacttcctgggggagcatttgcactccatggcattgagaacctcatggtacacaacagagccattggtgcagtgcagggccacctgcatgggctccgtccgtgtcggagagcagcaggagcactggtcctgcacatcgttgatgtcaatggagtacatggctttgctggcacatttgccctggcagtagtggatatccacctctacttcagacttacagcttcccaccttgacatactgcagcctggcagtgatgtcgttgcactcaggctcctcacatgtgtcacagcaggtgcctggaattttcataattttacctccctcagccagacacttgtgttcatcaaagggtgggcagcctgtgaccctcttctcccagaagtactctcctctctcattgaccttgcagaagtgagtatcacagccatcctggagcgtctcatcacgcttcagtgtcatgatctgtcctcctcttagctgaatggtgcaagccgtaggcaaacatctcccacaacattcacctgtgttattttcttccttgtaacccagggggcaggggttgcaggtggtcttcctgcactccagcttgaatccagagatgacccccacctgcaccatgcagcggcaggtcgtgcacacatcgatcatcacagtcttcccgggcccaatgacagtgccattgagcatgcaggcctccatgcgctcacagcgacagcttgggcagcacgctgaggtcttacagctcagctgaaagcccgaggggcagacagggacctccagctgggggcaggagacgttcctttgttgtataaagacctcc

SEQ ID NO: 157323 - DNA, 1000 bp, Homo Sapiens
tttttttttttttttttttttttttttttttttttttttttttttttttttttttttttttttttttttttttttttttttttttttttttttgtgtcatactcctcctgttttttttccctaaacttttagtagagtcatttacatagttcagtttttacctcagctatgttacacagtggcaggaaaatattttgtctccaaactacagcccaagtatgagagcagcgtatcctgaagctaattagtaaccagaaaatcaggaaggtaaagcaaatctctggaggcaagatctggactctatggtatcgccgcttctccccacttgaagcgtctctttgcagtgccgcacttggagatttggacttaatcgttaaacaaacagaacagttacattctgccttcctacagggcaggggcctaggactggcagcatttttgttgtctctagaaatagaggggttatgagagagcctcaaaagagagggcaagaataacacatccatttctcatcatgagttacccccttgtatgcctagaacgcgtatggagacattctcttttagtaaagtcaaagagaaaagccatgaactaagtatcctgaacacagaggcgtgagccctctcagtctcacagtcccttaggagtcatttgtaagtactatttccttccttattgtctatactattccctcttgtctccctgaaatctacccactcctggctgtgtgtgtgtctctttctgtctgtttctctgtcttaatcttctgtacatatgcacccactcacctttttaccttgttctgagaaataaaatactatttttcaaactatgtaataggattatcaggctaggcttgacttgtaagtttttcaagaattctttagagtaggcctcatttcaagtcatctttgatgaccacatttccaaatgtatcccagttgaagtcagttcatttatttgctttaagagttacataccatgagacacacagttctgg

SEQ ID NO: 157324 - DNA, 921 bp, Homo Sapiens
tttttttttttttttttttctgctgacacccggcactttattagtggggaaactcgccttggtctggcagagactgggatcaacaggaccagcacccatctcgaggtggtattttctgtaagatcaggtgttcctccctcgtaggtttagaggaaacaccctcatagatgaaaacccccccgagacagcagcactgcaactgccaagcagccggggtaggaggggcgccctaggcacagctgggcccttgagacagcagggcttcgatgtcaggctcgatgtcaatggtctggaagcggcggctgtacctgcgtaggggcacaccgtcagggcccaccaggaacttctcaaagttccaggcaacatcgttgcgacacaccggagaccaggtgatgagcttggggtcggtcataagcgcggtggcgtcgtcgctgggagctggcagggcctcccgcaggaaggcgaagagagggtgcgcccccgcaccgttcacctcgcacttctcgaagagcatgaagttgggctcgaacccaccaccaggccggacgtacttgagggaattcagaatctcttcgttcttggcgttctcctgatgcccaaactggttgcacgggaagccgagcaccaccaggccccggggtccgaggcgccgctgcagctcgttcatctgggtgtagtcccggaccgtggtgcctcagagggacgccacattctcgataagtagtaccttgccccgcagggagcccaggctcacaggctccccgccggccagcgggcgcgccgagaaggcatacaccgactgggccgccgccgccgccgccgctagccgagcagcacacatggcgcaattgtccaagaagccagcggagcgccccgaacaagcactgtaaggggaggccagcaggcgcctccttttaactg

SEQ ID NO: 157325 - DNA, 1000 bp, Homo Sapiens
ttttttttttttttttttttttttctgaagaatagcatctttaatgagtgttctaatccttgtcatctgaagttttgaaatatatttaccagggtcagaacaatacagagatagtatttgtataatatagcttattttaaatttcatttaagccctctcatttctcctcccacagctgctgttttgttttgatgaaagagaaataaggaataaataaaaggtcaatgcttcaaactaatctacctgtgtactccctgaaaactctgggactgtatccacagaatagggaaaactattctcaaatgcacagtcactcatgcctcaggcatgaactgatgttctttcaaaagaaaaaagaacaggggcaaacttccagtcctatgtttgacacatactaaaaccccaaagagaagactgaattgtatttgttctcagacaagacacccctgtgaccacagcataatgaattctgctctaacattttagtggttcaatctcccgacaagagtaagtattccagccaggcgtggtggttcatgtctgtaatcccagcactttgggaggccaaggcaggcggattacctgaggtcaggagttggagacgagcgtggccaacatggtgaaaccccatctctactaaaaatgcaaaaattagctgggcgtggtggcgggcacctgtaatcccagctgcttgggaagctgaggcacaagaatcgcttgaacccaggaggcggaggttgcagggagatgagatcaccccactgcgctccagcctgggcaacaaagtgagactctgtcttaaaaaaattaaaaaaagaataaggaattcctatctgtggtggttgactctataggatgaagtgtgagattactactcaggatagaaatagtttgtatctgtcatttttgttcaagtcctctttatatttggttccattgaggaaaaccaccctctctaatcaggagatcacgttctttctgttatcctagtcattttgta

SEQ ID NO: 157326 - DNA, 1000 bp, Homo Sapiens
tttacttttccttcctttaatcttatgcaaaagggacacaggggttcaaaaataaaaatttctcttccccctccccaaacctgtaccccagctccccgaccacaacccccttcctcccccggggaaagcaagaaggagcaggtgtggcatctgcagctgggaagagagaggccggggaggtgccgagctcggtgctggtctctttccaaatataaatacgtgtgtcagaactggaaaatcctccagcacccaccacccaagcactctccgttttctgccggtgtttggagaggggcggggggcaggggcgccaggcaccggctggctgcggtctactgcatccgctgggtgtgcaccccgcgagcctcctgctgctcattgtagaagagatgacactcggggtccccccggatggtgggggctccctggatcagcttcccggtgttggggttcacacaccagcactccccacgctgcccgttcagagacatcttgcactgtttgaggttgtacaggccatgcttgtcacagttggggatgtgcagggagtagaggtgctccagagggccccgctcatccggaaggcgcatggtggagatccgctccaggacctggtccagttcctgttggcagggagtcctggcagggggtggtcgcagcttcttgggctcctccaggccaaggtgatgcttgccacccttgcccatctgccggtgctgctcagtgaccttctcccggaacacggccagctccttcatacccgacttgaggggcttccggccagcactgcctcccccgcccaacatgttcatggtgctgtccacgtggttctccaccaggcctccttctgagtggtcatcgccattgtctgcaacctgctccgggctggcgccatactcggcgtcccggcgcttctcacaagtgccctcgcccatgaccagcgcctgcaggggcagctcggagcccgggtggggatagcagcgcagcccctggccgcagc

SEQ ID NO: 157327 - DNA, 1000 bp, Homo Sapiens
tttttttttttttttttttttttttttttttttttttttttttttttttttttttttttttttttttttttttttttttaactgaatgcataactttattaaataaatgctttgtcatgacaaaagacaaagatcaaggagtaacataaattataagttgaataaatagtatacagcaatcttcactttttaagaaaatgtgagatcctttgttggttttttatttccttaagtacaaaatgctaaacgggagccgagctcttccgcattcaggtgttttttttttttttttcggcttttttttttttttctcacaaactggttgcatttgttgatttatttttccatccttttcaccagtaaagattatcatcgtttatttttgtttttaaagttgaaaacaaaaaagaggagagaacagagttatggtatgaatgtatgtaaaactatagagaactacagtaatatgtactgtggttattgctgtcttcaaaaaaaaaaagaaaaagaaaaacaacaacaacaacaacgaaaacaaccggtaggcaactcggaatctgaaggaatcttgtctgacaactgtgctatccatgtgggctacggtgtgacagtggcggtagagaggagactccggctggcgaccggggactggtggagtggggtgagcgggcacagggaagctggggtccccttcccctcggaccctccccaccttccctttccccatccaaaaggatttcaggagaggaggccagagtctgtgaaatgactaaactatatactccattagaaaaccaagaaagtatgtttgaaatagaaacaaaagcctaagagaaaataaaaagtggagaaacagtgcaatgtaattcttgcactttagtggttttaaaaacacagacagtacaaggcccaggttgctggctggtgaaacccctgtccctcgtccctcctccactttgcaaaacggagcctcctttctcttggaagccagacatatcct

SEQ ID NO: 157328 - DNA, 857 bp, Homo Sapiens
ggagacatttaataagtaggtaccactccacccactgtcctctggggcagccggcagaagatcccctgccctgggtggcagggccctgatctgaggctggtttcacggaggacaggcagcgggcaccccactggtggggtcgtctctcggggcactgacttctcagcactggagctgtgtgccggcctcacctcctcacttcgtccaggacgtggaactggtctgcagcctcgcagaagccgtacttggggaagtagaagatctggtcctcagtcaggtgggcctcctggacccgctgctcaaacccactcaggaccgagtcgctcacagggagcgagcgggcgtagagcttcactgacagctgccccgcccgctccaggtacaggacagcgaaactctggtagtcggtctcagcgacaaccacgtgcacagcccctcgggcgcctcgggcttgaagcaggaagcggccgaggacccctgtgtctccatagagctggcgcacctgccagcagatcccatccagctttcggaaggtactgacagccatggctgtgccctggggagccacatgcagtgtggtggcctcggcccggtggccctgctcctgcaggaaacggcaagcggagcccacagccacaaggagccaggtccctgcaaactgctgagcatcaaaattggccttgggctggatggtgctgatgggggatgcgggccggcgtggcctctgaggcttctggcccagcgagccagctgccaggagcagagtcaagagggtcgcagtcccagggggcagcatggtggcggcagcagggtggcaggactctgggaggccaagggtagcaccaccaaagtcccag

SEQ ID NO: 157329 - DNA, 1000 bp, Homo Sapiens
ggaaaaagaaatttttttttaattagaaaccaagtttacatacggttaaatggttactaaaagctcagttgtaaccactcctaacaccactagcagaacctcaagggagccaagagctcttcccttttcccctgttaatttccagtataatgtagcagcacaattatttcatgtcacatttaagaagaacaagaaccaatttatataaagtacaattgtatatccttaaacattccacataaacacactgtcaaaactcactggatatgctggaattggaggacttaaatttctacatattatttattgcacccagagtactggttaaaatgcactttctgtgaagatcaaatgcaataacgtatgagggtatttttaacactgtgaagtacacacataatattataaaatgccatttaattggaaggagttttctatcattgcaagtcataaatataacttttaaaagaatactagcagcttttacctaggctcctaaatgcttgtaaatctgagactgactggacccacccagacccagggcaaagatacatgttaccatatcatctttataaagaattttttttttgtcgtcagtttggcctttcctactgcagccaggtgagagcttaagatgtcagtccccaatatcttcacagagtgcctttatgaccagtttggagaattacgatggtaaggggaagaggcagatatgaagaggaatggttaggggaattgtcattcataactctgtgctatattacttgaggggctaagaaaaatgtatggtcagtgaaacacagtagtgtacccttaaatgccttataaaagaccatccatccagtctgcgcttttgactgtgtgcaagtatcagtaataatgcttttgggggctcagatgaacagcgaacaccaatcagccaggactctggaaggaaagctccaaaaatgagaagtccttcaacaccattttccattactgttctcaccaaatcaatgac

SEQ ID NO: 157330 - DNA, 1000 bp, Homo Sapiens
gtgatagggtctcactctgttgcccaggaggaaatggcagtggtgtgaacttggctcactgcagccttgagcttctgggctcaagtgatccttgcgtctcagcctcccctgtagctgggaccacagttgtgtgccacaaggatcagataattttttgattttttttgtagagacagggaggtctcactttgttacccaggttggtctcaaactcttggcctcaagtgatcctcccatctcagcctcccaaagtgctaggattacatgcacgagcctccgtgcctggccgagccatttcgtttgaaggcaaggattttgttttaattatttttatatttctcatatctagaaatttgcttcacacataaatgtacactcaatagatgattgtggaaccaagcagaatggttttaataaatagtataaaccgatggatctgaaagcatcagtttacctgatgagtgtcataggaaagtcacctgctttttacagagatgtcctaggactctaccactgtcagtagccggaaacctgagttcatcctcaatcctgacacagttacatcaatatacatttactgctcaaaagagtgcatgcatgatgcagtcatttcacagcaagttaccaaatacctcgatagtgctgttttagagaagcaattgctagaaaggcatttggtaatgttaaatcatccttttgctagtttacctagaggaacaaatattaaacaagaccacactggaaattcagagtaaagcacaagaagtagaagagaaagcagcaatagttattgaataacatttgaagtctttttcacttctgagaattaacttgaaatgcagcaaatgccagcaaccttgtgaatatttcaaaatggtatctatgaaaaagcaggaatgaaaaatgttgtcaagtatttcatttaattatcttagcaatacagattttataacactgaccttagtggctttttttttctcctttcaaaatatataccata

SEQ ID NO: 157331 - DNA, 1000 bp, Homo Sapiens
tttttttcttgggcattagggatgatttatttattatttgtgtccttgtccactgtaaaaaagggaagcttaaaaacacaagtgtgtgttcaggttcccagcctgaatacaaattgtattcaatttccgagtgaaatgtgtccagacagcaggagagatctacttatctgtgagactgaagagcctccttggaacgaactaatcctgaaagaagaactacttgtgaagggcaaacagtttagttcaagaaagcaaggctatgcaataccacagcaaacttcattcaatgaagactgagctccagccatgtcttaagagcgggaagaaaaagcagcaaacaggctctatctccacaggctctggggacagtgacggctgcagtggctccttcaggatgctcaaccctgggctctggaacaccaagcacaggcctcagctcttccatgatgaataccttttaaaggcatcagctgcagcatctctgttgcatacaaattcactaagtacaaaaaaactcctagacttttgggcccattgcttattacataaaattgtttccagcagtagggtttaagacaaaacacaagtgaaataaaatgtacaagtttgttccatagaaacactgaaaacacggttatgtccttctacaattcagtaaaacaaacactgccacaaacaccctcaggttcacagtttagatttcattcattcaataattattttctaagtactttcattactggggatgcagtaatgaataataaggtccctgttttcttggagcctctgttccagcagtggggcaggggagacagacagcaaacaaaataaatcaatataccacgttagtagtcacatggttactgggtagggaaaggaaagcttctgcacacctaaaccccttaagagcaatttgaggctgctgcaaatatcacggcctcttttaggggaagataaaaactctaagttttatatatatatatataaatagagatggggt

SEQ ID NO: 157332 - DNA, 1000 bp, Homo Sapiens
ggtgggcggatcacctgaaggtgggagtttgagaccagcctgaccaacatggagaaaccccatgtctactaaaaatacaaaattagtcaggcatggtggtgcgtgcctgtaattccagctattcgggaggctaaggcaggagaatcacttgaacccaggaggcagaggttgtggtgagctgaaatagcaccaccgcactccagcctgggcaatgagagcaaaactctgtctcaaaaaaaaaaaaaaaaaaagtagcaagttctattcattcaagtacattaagttaattgtacttcacaaagctttatatttgggatgaggctaaaacagaaaaaaaaaactagcacagagctgttaataaaaaaaaaacttgaaaatattaattactgtgagatgtgatcaaatgaaaatcaatcctggataacactacaaatttctaactccataaataagttctattatgtactaaaaatttccactatcagaagatcctgattaaaataaagaaatacataaaactcaaacagtaagtcaatgtgattatttgtttcatttcagaagatctatgggtcccactgcccgccacacgtgtctcctggttctcaacgaagtgtgaccagctcttctgaagaggtagggtgaatggcgactgtgttgtcaaagtctgccttcgttgctcccatcttcactgcaacagcaaaaccctgcagcatttcatcacacccaagtccctgcatatggatcccaaccaccttttcttccttgttagcacagaccattttcatcacacattttgttttccttttggtaactgcgtgatacatcggggtaaagctcgttgaataggtcttcacattttctattccatatttatgaatggcttcatcttccgtgagtcccactgtcccaataggggggtggctgaagaccacagttgggatgttgttataatctaatttggaatcttccttatattcaaaaagtcgatgggcaagttttc

SEQ ID NO: 157333 - DNA, 1000 bp, Homo Sapiens
cgacctttagaaaatatttttattttcttaacacacagaggtaacaatgacatttgcctactagacacagtagttcaagacatatcagaaatggatcacaattcacatgttacaatattcatcaatatgaccagtctcatgttttcccaattatctttgaaaacttattaaaataccacagcatactaaactggtaaattcatttatcatgttaaagagtaattttgattttgattagtgaaaaaccaaggcatagtccattgttgaaatacaataccttatccagcatcactcaagtatgaagcattctaccgaaacgtttagtcaaatgacacctgttaaaaatctaattctgtattttaactaccatagaggaaataatgtttaacatgccttcttaaactttaaaatataccacgcagaatataacaatgttctttcattaatcttcctcattagaaatatgaaccacttagttttctagtgcaacacaatatcctaaaaatttaccaacgtgggtatctgccttactagagataaccccaaatggctacattaaaaaaattgtgaacttttaatttttttggtcacatttaactgtcagcgattacttcttgctttgattaaatatgctggttttctgttacctttcctacctccctgaatatcaaagttagggtacagcaacaaaactacataaacctttgataaactaatggttctctcaaggacagtcattccttttacccgcacagtttagagaagggtatatattgaacaaggaaggaactgaagagaaagggagatttggaaaccaatgtccaatgtatttatagatagtggtcagattactgtcacaactgtccttaaatttgtaggatttaatctattttagttttggaaaccagaaaactaagctagttaaaactatttctaaagcaaggtcagctttgaagaagagcaggcagataatcttaaagtaaattacacgagctttcaa

SEQ ID NO: 157334 - DNA, 1000 bp, Homo Sapiens
gatctaactacagtagtgttccccactggtcccctgtgccttgatgccgggcaaaggaatagtgcagacaggcaggaggaggcagagagggagagagagggagtgggagtgggggaacgtcagggatggagaccccaggcaggcgcccaatgacacagagatccgcagtcctctctccatctttaatggggccccaggtgggcttggggcacgggtgtccttaaatacagcccccatgggcaaggcagcgggggcggggcggggtggggccgggcctgccggggcggggcggggcggggcgggacctcagctgcacttgcaggagcgcacgatcatgttggacagctgctccaccttgggcttgcggcccacgtagtacacgatgggcagcggctccagcgcctgcggcacgcagcacggcgccgccgaggcgcccgggttatgctggttgtacagggccaggaccttgctgtactgcgtgtccaggctccaaatgtaggggcagggcccgaggcagaagttggcatggtagcccttgggctcgtggatccacttccagccgaggtccttgcggaagtcaatgtacagctgccgcacgcagcagttcttctccgtggagctgaagcaatagttggtgtccagggctcggcggtgccgggagctttgcagatgctgggccctctccagcggggtggccatgagaagcaggaaaggccggttcatgccatgaatggtggccaggtcacctcggcggccggtagtgaacccgttgatgtccacttgcagtgtgttatccctgctgtcacaggagcagtgggcgctaaggcgaaagccctcaatttcccctccacggctcaaccactgccgcacaactccggtgacatcaaaagataaccactctggcgagtcgctgggtgccagcagccggttgctgaggtatcgccaggaattgttgctgtatttctggtacagctccacgtgctgctccacttttaacttg

SEQ ID NO: 157335 - DNA, 1000 bp, Homo Sapiens
tttttttttttttttttcatttggacaagcttaaaacacgatgtggctcgtttttattttatctcagaaaaaaacattccctttagaaggaaaggcagttagacaaggcctctcactgggtagctctgcgctactcagcacatgccagtggcctgccagccccaacctctcccctgggacctgggcccatgctctggcactgctctgttacaactccctatccttgatcccagctttgtcactccaagagatggccctgggactgagaagtggatggcagctgtgacagcaggagaggactgcctgaggctccccgggcagaggctctggtgccaggttagcagcaggaccgacggcagacccagcagccagagagtgaaaggtaataaaataaaaagggtttcctcacacttacatttttcctggaaaaaagtcaaatgtcacctctgggcccagcagctcctgaaccctaggagagtctagggagagtggtgtgtgggtggcaggaggctattggagccactccccagtctcagggccaggccagtctgctgtgcccaagctgctctgtggagacaaggtggtgcttccagatgcttctgcagtggagggctgggcctgcccagcaaagatgctgctggtgctgtggcccccacctggtgcaaggcctcacagcatgaaacatctgcttcctcagaacccaagcccttcttgctgggcctcatgctgctccagcctggggctcccttctctcagtccaaagtaggaaccggctgccctcagggtctcctggcactctctctcttctcccaacgtgactggtcaagccaaccagaaagataaagatctccttcccttaggaaggggcaaactccatgaatcatcaggacactcctgctccatcctgggccagggggtcatctaggccagggggctctgggcacactcccttgagctcatggctaaggagctccacgtctgggaggcccgtgttcccctg

SEQ ID NO: 157336 - DNA, 1000 bp, Homo Sapiens
tttttttttttttttttttttttttttttttttttttttttttttttaagagcagctagtttttaatgaatcttagcccagaatacaaagcagggtgtagcagttgccttaatggtgatataattgtaaacaatagctttttcttcccctataaactcgagttataggaagcgtttcagagagaggataacacatttgaatctattttttaaaaatcatcctgaaagctagcagtattgttgtcgtttaaaaggttcctcatatactcttaccctcagccaacccaccatgtttatcaattcaaattctagaactttcttgacccaagagattttgtaggaaaaatttctcttttcagatattcagcacgcaaggatcatttttcttggttttgttgctgatcttgctgaactttccatcaatggctgagggaggaagcttgcatgattcttatgagttcttctgaggcactttgactgtgacagttttcacttcagtgtatgcctgcagcccgtactcgcccaactcccggccactccccgacatcttgtagccaccaaagggtgactgggctccaaacacatcatagcagttgacccacacagtgcccgcctggagggcctgggacaggtaattggccttgtccaaatcctttgtgaagacagctgcggccagcccgtacgtggaattgttggctctcccaacaacctcctctatggtcttgaacttcaggatctgcatcactggcccgaagatctcctccttggcgatggtcatgccatcctgcacatctccaaacacagtgggctggatgaagtaaccacggtcagcagcaatgcccccaccacacagcagcttcgccccctcttgcttccccgtgttgatgtagccgaggatcttcttaaactgagtttcatccacctgcggcccctgctcggtcttgctatcaaaggggttcccgaccacccgagacttggcccgggcaacgctccgctccaca

SEQ ID NO: 157337 - DNA, 1000 bp, Homo Sapiens
ttttttttttttttttttttttttttttttttttttttttttttttttttttttttttttttttttttttttttttttttttttgctgagttagaaaattgtattcgtctctttattggtctagaaaggggtggagacttggaatggtgaggcctgggcccatgtgggagtggggtgtgcacaggtcagcaggtcagcagaggagtggggctgggctggggctgcaggagcgattctcccagggccaggagagccagtgagggtggtccgcactccgatgggacacagtatggccaggccaggcggagcaacccctcctcagtgctgggtcatcttggccgggctcggggggtatctgaccttcaggccttcatcattcatcagaggcctcaccaggcaagagcggcggtgagagaaagtctcgaagctcttcttgccatggtaggatcccatgccgctgttccccacgcccccgaagggcagagagtgcaaggtgatgtggacgatgacatcgttggccgccaccccaccactggatgtctctgcaatcatcttcttaatcaccttgtcgttgctggagaacatgtagagggccaggggcttctcacgctggttgatgaactggatggcctcctccaggctgcgcacgcacacgatgggcagcacaggcccgaagatctcctcttgcatcaccggggactgggggtccacgtccgtgaggatggtgggggctatgtagcgagtggcggcatccccggtgcccccataagccaccttctggccctcaatcaggcccatcaccctctggaagtgccgggcactaatgattcttccatagtcccgggatttcttagcatcttccccgtagaactctttcagtgacttcttgagcttctccacaatttggttctggatcgaggggtcacagaggatgtagtcaggggccacgcaggtctggccactgttcatgaatttcccccaggcgatgcgtcggcaggcc

SEQ ID NO: 157338 - DNA, 1000 bp, Homo Sapiens
tctcaaatatccaattttattttatcattctcgcattgtgggatgcgatctgcagctaggatcggaattcccaggcctatagatttttaaaccacaccacaggggtaaaccttaaaagaagtgaaacctaacactatatatatttccatttctaaatacagtatattacagaagtttaaatataccacctctgtgtacttacaactataaaaagatacaataactctaccaattataaataatgtagcatttcatattaaagacattatcgtacaatggaagaataggaaccctctaacgtatcactatcaaggttagtgtctatatctacttgagataaaatactgaaaattcagtgtatgaagccaaatcctgatttaacaagttattggtagtataagtgataagtgttagctgatgaagggaagccaaatgtggtaatttatatctctgacaagggtgataggcccattttatacatggttttcgttatacacacactggttctgttacgggccctcattttattattgccctccccaacttaatttgcaaacttaagcactactttcccaattaggaaagtactagttagtaaccataaaagtatccgtcggataacacatttgtttttgtttttgaagctatatgggaacactttcagtttcccaagttaaaacatgaaattgcacatcatcatttggattcccaaagaggaaaagaaaaattcacaacctgccagtgaaatactcaggccacttggatgaagaccgaggtcctccatagaatccaggtgttatttactaactaatcagaaattaatatcaaaataggacttaaaaataacaaggctgtgttattacagcagtctttccagttgtgtacgctttactaatctaaattgggtaacagaactggagaaaaggaagactacacagacttatcataagctgttagtgaacgtgatagaaatgcgtaatttgttaaagtgaattacagc

SEQ ID NO: 157339 - DNA, 1000 bp, Homo Sapiens
tttttttttttttttttttttttttttttttttttttttttgccagggaagaaggctttattcaggtgacatcagccagagagacaggagacgaaactcaggtccacccctgtccctcttcccgactaaagttgtaggttgatatagtctaaaaagaaagcaggagccaaggaagaggaggtggcccgcaggccgcaggagcagcctctcattgtccaaatgtaggtttctcaagcatccggcttgttaggaaattgggccagtttcagaatcatcagcttgttcaaaagtgggacttgggaggtgagaagggttgtcaggcaggaaaccctgcattctgctttggctgagtggatggggcccaggaggatgagcagcatggggaagagtatgactcgtagtgggcaccatgaggataaagagttacaagctcctctggcatgggctggagggaagggagaccctatcgcataaccacagccccacctgcctggagagaagagggaggcggccccgctccgtgccaccccactgagaaagataggacacctggagctccagctcagcaatccctcaatccctcaatccttcatttcatccttgcaacagtcccaggaggttttttttttttttttttttaaggcagagcctccttctgtcacccaggccggagttcagtgacgcaatctcagctcacggcaacctccacctcccgggttcaagcgattctcctgccttagcctcctgagtagctgggattacaggcatgcgccaccacgccaggctaatttttgtatttttagtagagacggggtttcgccatgttagccaggctgatcttgaactcctgatttcaggtgatccgcctgcctcggcctcccaaagtgctgggattacaggtgtgagccgcctcacccagccaggaggtatcaatggttaattctctccactgaacaaatggaaaaactgagactcagagagggcaggaatggccttggat

SEQ ID NO: 157340 - DNA, 1000 bp, Homo Sapiens
gtgtccataaagttttattggaacatagtcacactcatttccatgttgtctgtggctgccttcatgctgcagcaggagagctgagtagttgagacagtgactatgcggtctgcaaagcgtaaaaaaggatctagtctttgcagagaaagtttactgctcccctgggctagtgggatactaatgtagggggtttaactgggggaggaaatagagccttagcagcagagactttaggaaagcatgaaattcaagatagaaatgtcagtcctaaagctgatgtgaaatcttgcaggtagagtcactctagggctcagatggtgacactgttctctatgcagctgggcttcagatattcatagggccagtcaagttgctcattccgggctgtaatctccttttccagcttttccaaatctgttcggaattggtttagcacagctttgggcttggggcctgagaaatatttttctttgtggtgccccagaggcaccatgtctggctggcggcgactcagatgccatgagatggccatttgaagacaggcctgccggacatcaggtagtgaccccatcactgtggccatcgtcacatcttccttggtggtgggtgggggcatccgcattgtgcatggagcattagggacccaggcataccagtccagctggccctggttgatggcggcatgctgggcagtgcacgtgaagacgcacatggtgaggaaatggcagagttgactctgggactggaaggagacagggaaacctcggtcctgggcctggcacagccccacctccgtgatctcccgacaccaggcctgcagctcagggtcccccttcactatgtcatccctttggtagaagaggtggacgatcccctccacatacctggcaatgatctcccagagccgtaaagcatcatgggcatagagagcacctgggagtcccagcaggccccggtcagccaggtcgtcaggaggacagagggagcagtaggtcagctg

SEQ ID NO: 157341 - DNA, 1000 bp, Homo Sapiens
tttttttttttttttccattataatagccatctttatttgtaaaaatccagatataaaatgtattctttcagtctttccgggtgttccttttttacaaaaacaaaaaggcacataaaaaccttccccgctgtcatttccacagatggatggttttcaggcagccctcccccctccccccatagagctacatgcttcattccaggacgtcttgcttccccacatgctgcggtgctttcctaccagggtagagttccaaactccaagactgaagtacacaaagagggggtgggtgtcggatgcagagtgtgtggcctgatgctccacggcgtgcaggacggggggctaatagtaggtttccttctccacccagccgccagggcgtcgcctgatgatgagttttctgacttcgtcatatacgaagatgagaagagagtaggggaaggcacagaaccaccaggtaggtttgaggggatacatcctaagagcaacacccattccagggcagtaggaaaggaaagcagccagggctgtctcttcaaagaggccaaatatcaagatcttgttcttcatcccctgctggaagaccgaattcctcctggtcttacagatgaccaagtcggcccactgcaccaccacgatactgacgaagaaggctgtgtggcaggtgaactccacgattttcctctgctcataggtccactgctgcccgtagctgtcttccacatcgttgatccagcggtcatcccagtccactcggaggcccaacaggtgaattgggaggaagccgttctcagccagaatcacaaagtaagtaaagaagcctcccagggcctggatcattccaatctgcccataggccatgctgatcagccgctcattcacaagtttgtctgttttgggatttctgggctgtctcttcatgatgtcactctcagcctgctcataagccagggagatggcaggaaccatgtcagtgcccaagtcaatgcagaggatggt

SEQ ID NO: 157342 - DNA, 1000 bp, Homo Sapiens
tttttttttttttttcttgtttccccaacatgtttaattttaagaatagagataatggtcaactcttgagaagaaccaaatgctggtgccatcttggaagtgctacatcacctcctcctcttacttccttgaacagcaatatttctggatttcttctgcaagccccaggcagtgcaggatgcgtttcttttcagcagccagttccttctcagagaactggcccaagagtttctggacaaatatattttgatctttcagaaatatgttcttattcactcctacatttggcacattctccaaggacccagacttgaaatggaagcttaaatatctgtttcgttttagaccaggtcctttttcttcaatccatgacagtggacttttcttctctgtctccagacacactgtcattttcatatactgatcttcctttcgctcttccaaagtggcagacacaagagaaagctccccaaagagggagaccagccaggtcaggcgagagatgccgctgaatgcagggaagccaaaccgctcttcttccaacgggccagctgtgaagaggagcgaccctttcagcaggtctttccccaccacttcttttttcaggaaagcgaattcctccatcaagagttcaacatgctcctcgtgcaagacttttcctttctgctcagccagctcccacagttcctgagcggccgccaatgacagtgtcatggggtattccacaaggacgtgcttgccagcattaaggaactgcctgatgtagtcctcatggctggagctctcactgcagatataggcgacctccacctcttggctggaaagagcatcctccaaagaaatctgctggactccatcaatgctcccgagctcccttctcgacacgaagccaatcaggttcaggaacgctgaggaagggtgtggattccgcaagtccctcatccgcacggagccggctcggccaacaccaaccaccaccacgccaaacttcctctcgggc

SEQ ID NO: 157343 - DNA, 1000 bp, Homo Sapiens
gcggtacgtacactcaagcaacagggctttattcgtcgtctagagtaaaagaggggaggagggggagggaggggccacaggagcctcaccaaggtgggcaaggcctcccccgagggccgactgccccgtgtggatgataaaactcatccactggaacacacgcctgctgcatgcaggcgtctgagcggtcacggtgcagctagcaccagtggtcttggtcagggtggtggtagctgtgccgtgctcggccacccgagctgagtcccagggtgcagtggtaaccgttgggcacgcggcggagagggtgagactgggaggtcagggaggacacgtaggaagtcctggaggagcggcccgagttggtggccacagcctcctcgaaagtgagcgtgtcctcaggcagggcgtggacagaggcctcactgtccagacgctgccccaggtaagggtcagagccaattcgagagccaggggccaggggctggctgagggggtctctctgcagcagggcgttgtgttcggaaagcccacggctgagccggcctggggagaaggcagggaggctggtctgagccccggcgaagtggatgggtgaggagttggccgtcttgtaggtgatgctggggcggggagtcaggggcgtctgggggagctgcctccgcccaccgcggccgggggtgctagcaccagatgttgacagcaaggggctcccattcacggaaccactgccctgtgggtggggtcccggctcctggccagctgttggcgacgttgggtggctgctgagggagggcttgggcttcgggggctcacggcccccaaagcggtcgcaggagtagaagcgctgcttctccgaggaggaggatgagggctgcctccgctcctgggaccggccccgctcctgccggcgctctcgttcccgccggcagcctgtaggcccctctcccgggggcagccccggccccacagcactgcttggtgcgccatccatatcggcaga

SEQ ID NO: 157344 - DNA, 1000 bp, Homo Sapiens
tttttttttttttttttttttttttttttttttttttttttttttttttttttttttcttaacaaaattttaataaatttaatctaataacatatcaaaagaataataccaaatgactagagtttttttcaggaatgaaaggttggtttaacatatcgtgccatcaatgtaatgtaccatattaacagactaaaaaagtaaaaccatattatcatctcaatggatgcagggtaagcacttgacgagacccaacatctatttttgataaaaattctcagcaaactagaaagaaaagaactagctcaatctgttaaaggacatctaagaaaaacccacagctaatgtacttaaagatgaaagacaatgctttcctcctaagatcatgaacaagacaaggatgtcctctctccacttctattcaacattgtactggaggttctagccagtgcaataagccaagaaacagaaacaaaaagcacccagataggaaagaaaacaaactgtttttgttcacagacaacatgattgtctatgtagaatactcaacggtcttacaaaaagttactagaattaataagtgagtgtagcagttttgctttttgttttgattaatattcaaaaattaattgtatttttatatactagtaataaacaattggaaatttaaaaaattttaataccatatatagcctggtacagtggctcacacctatagtcccagcactttgggaggtcaaggtgggaggatcgcttcagtacaggagtccaagaccagcctaggcaacatagtgagatcccgtgtctacacaaaaataaaaatattcaggcatagtggcacatgtctgtagtgccagagctacttgagaagctgaggtgggaggagatgaaggaagaaacaggtaggtaggagggcgagatcccaagcaagtcaggacaactcccacgccttgcccaggagccttaagaagcccaggcacctgctgagtgaaagaggatatat

SEQ ID NO: 157345 - DNA, 1000 bp, Homo Sapiens
ttttttttttttttttttgcaattctgtccattttatttttgcacaggaaaaactagtgagacaagattcaaacagtctctctctgtgaatcatctgtcagtggtgatgatcacgttaagtttcagaagtgtagtacatgatactcttaacaatttgtctaaagcaatgtttctcaaccaggggcaattttgctcctaaggggacatttaacaatggagacattcttggttatcataactggtgaagaagcaaggtatgtcattggcatctagtgagttgaggctagggtactgctaaagatcctacaatgcacaggatacccccattctgtaccaacacatatttatccagcccaaaatgtccgtagtgctaaggctgagaaaccctgttctaaaggttcatgctgtggtccaaatgtgtcctcccccaattcatatgttgaaacctattcccagcgtgattgtcttagatagaaggtggggccttggaaaggtgattaggccatgggggctctgctctcatgaatggggttagtgcccttataaaatagaccccacagagatagctagtcccttcagtcatgtgaggacacagctagaaggcaccctttgaggaagaggaccctcaccagacaccaaatttgctggtgccttgaccttggacctcccaacctccaaaactgagaagtttctgttgtttataatccacccagtttatggtgtactaagacagttatattaacaatgaataactaggcatgatttctcatagtataatttagaagtatgcaagagaagtagttgaagctctctgaaatggaggcatagccctttagacccagtaaagaacgagaaatgcatggtaagaaatgggtaacgatgggggattgctgaattagtataaaccttcaaagagattatgggctaaataagaaaaattactgggagatctgtagtgataactgaatgacttttcatatttctgaacagcatttttcta

SEQ ID NO: 157346 - DNA, 1000 bp, Homo Sapiens
tcaggaaataagagctgctattattactactctttgtagcatactgtaaggtttcccttcctctcatcacagctctgaaggacatcatcaaggtgaactgagccccttctgtttcttctgttccctctaaccacctctccccttccttcccccactgcccccattcttagccccgcccctcccacaagccccgcccctgccccggccgtttccctggccccgcccaccagccctgcaccagcacagccctcgctcagcggggcaggaagctcatggtgtagtttcgtgggatcgtggcaaagcccacgtgtttgggggacacgtcgatatccttaggcgactgaggggacttgaagcgaaagttctgcatgatggtggtgaagaagagaaagagctccattctggccaggccttctccaaaacagtaccgctttccgatggaaaagggcacaaaagcatcactcttcttaaactgccccttcttatccaggaagtgctggggattgaagtcccgggggttggagaagaacctggggtctctcagcacggagcccagcatagggaacacttcagtgcccttagggaggaagaaatcccgaaacttggtgtccttgttgaccctgtgggccaaacccatggggagcatgtctccaaatctttggatctcgtggatcactgcctctgtgtagggcatcttggcccggtcctcaaacttgggctgccggttcttgccgatcactctgtcaatctcctcatggaccttggcctccacctctgggtgcttcatgagcagcaggaaaccgtagcgcagggtggtgctcacggtctcagtgcccgcaaagaagaggttcagggtggtcatcaccaggttcttcaagtagaactctgtgttggggttcttctcctcctcctgcatgcggatgagaaaggagtcgatgaagtcccgtggggaattgggatccagcgtgcgctggttgtgctccaccttcttggcgatgaa

SEQ ID NO: 157347 - DNA, 1000 bp, Homo Sapiens
ttttttttttttttttttttatagatagaacttttatgatgtgttttatggtttacaaaccacttaaagctcaccatttcttttgattcttacaagaactttctttatggaaggaaacattatcctcttttcatctcctagataaaaaggtaaattatttagcatataaatgattttcccaaggctaattcggacgagacagtagagctgggatttggatctagttttctctgagtcaaattcctctgatctttcttgaaagtcactttcattttgtcccaacacatctgagcagacaccagtggtttcagaacacgtgccatgtcttcttactttccttgcccctttctttcttaacaatattacacctgaggaacagcgcagaggcggtgactgactggggaaatggtgatacccattctaaacttcaggctcagcttctcattgtttgggggcctgaaggtaaatttttgcataagggaagtgaagaaaataaacagctcagtcctggccaactgttctccgaggcatgcccgctttcctattgagaaaggcataaaggcttcccttttcttaaactgtccattctccagaaaatggtccggattgaatgtgtcaggggtggcccactctgtggggtccctgtgcagcgccgtcaaattggtcaggatcatggtacccttgggcaggtggtacccagccaaagtggtatcaactgtcacttccctgggaacgttcagggggatgatgttgcccattctctgcacctcatggatgacagcattggtgtagggcatggactcccgggcggctgtgctcggctgctgcccctggccaatcactctgtcaatctcagcttgtactttttcttggatttctgggtagagggccatataaagcagagcccatcgcagagttgtggaagttgtctcggttccggcaaagaagaggtccagggtgctgcagatgaggttttcttcatggaaacttgaagtaggat

SEQ ID NO: 157348 - DNA, 1000 bp, Homo Sapiens
tttttttttttttttacccaggggtcctggaaggtgactcgtcaaagttttattagtttggtgcatggatagtgatgttacagagtctaggccccaggggctctcccaagctgcagcttcccctccttcctcagggcagggccaggccaggccagatggttttcagcagcctcttagccgtgggctcctctaaggcagaggcagtggaagggaagggaaacaggagagaggaaaggccagaaggaatagaaaaggaaagtggttttgcgtcagagtgtggcagaggcagtccctcaaagaacctctgatgtcccctagcccaggcccagatagagttccagggcctgacctccctgccaggccccaggctggccagcatgtgctgtgagaagggatacattgcagggccgtcagaaggcagcagggtgggctaggccaaggagttcctctccccatagaccctcctgggcccttcaagatgagggctcctcttctcagagcatgtggaaaccacttggggagctgtaacggggtgaggtgggtccggactagcctggaaagtagaggtccacatcggggtgcgggagggagctaaggtttttggcttgggaatctctggggtccaacctgcagtctggtatttacatgggtctcccaggactgaagttgcctggctcctcggcaagagagcttgcttgcctcctgtgggccttgcagggtgtgaactgtccatctctccccaccgcctgctccacgccaagccccacaaagagaaaactcagcctctgggccctgactcaggctccagcaaccctagagccccagaggaaggtcaaggaaggcggctgcatctttggtgccaaggatagggggactggaggtgggaggggggactctatgagctgcccctgagctggggggcccagccccagggctggtaccatgcccagctcactagcactgccctggcagagtgagggtgtgcgggcagtgaggagca

SEQ ID NO: 157349 - DNA, 1000 bp, Homo Sapiens
gggaaggaatttgtttaattaacgtacaaaagcgccctccccatctccttggtccctgaggcctggccatcaggccggggggcgtccgggggtgcccggctcagcagcaggcacgcagggccttgcggaagacgttgcggaactcggcgttgaagacagtgtagatgacggggttgagggcgctgttgacgtagcccagccaggtgacggcgctgaccagccgcgggggcacggagcaggcaggacacagcgcctgcgtgatgtgcaccacgaagaagggcgtccagcacagcaggaaggccccgaccaccaccggcaggaccctcatggccttgcgctcccggccggtgatcttggcacgccgcctcctgcgggtctgcggtggagtctggggtgggagcgcggcggctctgacggcgtcggggggagcacagttggagccgcaggggtccggggggaggccgggcgcggggggcgcacagtcggggccacaggggtcctgggggaggctgggcgcggcgggcgcacagtcggggccgcagggaccccggggaaggccgggcgcggggggcgcacagtcggggccgcaggggtcctgggggaggcggggcgcgggtggcgtgggggaaggcgggccagggccgctgggtcggcggggcgcgcggccgtgcagcttggcgcgacgtgccacctcccagcgctgcaggccgcggaacgtggcccagtagagcagcagcatgagcgggcagggtaggaagaaggagcacacggacgagtagaccacgtagtcgcggtcctccaggcggcacacggcggggtcgcggccgcgcacgtcgttgaggccgcacagtacgggcgccgccaccgccgcggacagcagccacgtggcgccgatgagcagcagctgccggcggctcccaccctgccggttgtagcgcagcggcacggccacggccacgaacctgtccacgctgatggcgcacaggttgaagatggaggc

SEQ ID NO: 157350 - DNA, 1000 bp, Homo Sapiens
tttttttttttttttttttattagaaaacagtctgtttattagaagtgactcttggccccaccatggagcagcaacagactgggtgacagagggttaggtgactaatagaagcatgcttaaggggctgtcatttgtgggagctgagctgagcccagcctggttatccaagctgagggcaggtagtctgggaggactgaactcagccaaggagccagagttgcagcatcagggccagactgagcaggagacccccagtcccatgaagcatctcaccagcattcacatgcatggctgcagcatagaacctcgccacttcctcgttggggttgccctgggctgaatcaaaccacatctggatgcagcggccgctccctcggctgtagttgctgaccttgtatgagtgactccagaggccttcacaaagggcagctggagtggggaagtaggactcaaaggtgcggcagagagccccagctgggcacttgttaactcctgaggtccagtcccatcctctgtgccagttgctcttgcacgtgtgggaggtgtgacaatcctcccaccagcgctgacagtcctctttgcataagggcacatccaggaagcgttcttttcgccacgtctgattcacctgctggatccagggccccaggttgggtgagcactcatagagacaggtgtcctggatgaagtggcgcttgcaggcgggctccatcttgccgcagtggtcccagttaaagttgtacaggcgggaggtgtccttgtgcagctcctggctggtgctggctgtgcagcaggcattcttcttccagggactgcattggtcatgcagcttgtcctcaggacctggctttgtcttgtggtgcttggcatccatacagacattgaggagatcagtcctgtcctgggcactgcacatggtggctacacagaccagaagcagcagaagtggcatccatttccagaccatgtctttctgtccctgcaggcggagctgaacct

SEQ ID NO: 157351 - DNA, 1000 bp, Homo Sapiens
ttttttttttttttttgttcaaattctccatggagaatatttttatttatttatattcttcttgcatactctaaaacgcacagtgtgaatttcccttcttcaaaaacagttgtgagcctggtcactttatctgagatcttcagaaggtcttcggaaatgttgccttaggtttcagctaagcgagtcacagagattggtcatcaactactacaaaattacaggagatctagttattatccaacagttgctagaaaagcattgagaacaccagacgtacagccagacagagagcgtaagagaagagcagatgctatttaagtaacaggatttccatatatatgactttatgtacaatcttagaattctcttacagacagtaaaatgcttaaatcattattttaagggcactctaatataaatacaaatctcactaattttaatcttttctctttggctcacaaatgcacgaaaataccataaacagttttcagaacttacttcatatataaataagatacattacaaatgggaagaaaatacaagacgcctctttaacatggtacatctctgaatataaataagcaaatatttcattgacctacaattaaacaatcattgaaatcatgacacatagtctccccctcccaccaccaaggtcagacaacaggaatttacacaatctacacaaattaatctctaaaaatacagccatagtacacctgtaacaatgactctgctactattttcccctaacaggatactaatggggagggtgtgacttgtcatttggtggtgttttttctcatccatcatcacttcaggtggagaaacgctgacagtgaggtcgattctcaccaacagcatttcccttggcccctaggacatggcgttttgaaaaacagttttcctggagttgttggacaagctggttggcagcatgtttagctcctcggtaactgctgaaggtaaagtgaattctcttggagcgggaaacatgccg

SEQ ID NO: 157352 - DNA, 1000 bp, Homo Sapiens
tttttttttttttttttttttttagtgagtctctatttattaaaaaaatagatgaagtaagggtgaggtcttttttgtcttttagcagtttttcttttgggccaagtccatgataaaaaaccaccatgcaaacagcaaataattctttctaaactggccccatttctgaattaaaaggcttcattcctctttaacccaacagatcttgccattttctccaagctgtacagttccactggccaccagctgaagggctgcaggaaatattttatgttctgctaattttactctttcagaaagagttgcgacagtatcacccctcttcacgggaacagcttcttgcaaaataatctgtccagcatccacatcttcagctacaaagtgtacagtgcacccagtaactgtgactccggtttccagggcttgctcatgggcatttgaacccttaaaagaagggagcaaggatgggtggatattgagcatttttccattccacttttggacaaaggggccagaaagaattctcatgaatcctgcaagacagactatgtctatggagaactcttcaaggactaggtcaattgcactgtcaaattctacacgatttttatacagtttatgattaattactctagtgggaataccagctctttccgctttatctaacccagctactgcggctttgttggagataacaatatcaatttgtgcagagctatttggttcccgagtactgtctataagtgcttgcaggttcgatcctgttccagatattaagacagccactctggccttttttttttcaaaagagaaatgatttgtcagggagccattcttcaacactgacccatttatttgcatgctttcaatcagattcttgactttcacacgtggggaaccttcagctcgtgcaaccacactgccaatcacccaggcttcttccttgtgctgctggatatccctcagaatctgctctgtctgctcctttgataccacaagg

SEQ ID NO: 157353 - DNA, 1000 bp, Homo Sapiens
gagagtgagtagggcagagtagaatttattgggaaaaaggaaagctctcagcaaagacaggggtcttgaaagcaggttgccagtaaggcgtctgtgttctgtgtcttttatgtggcagaagctgggaagtcttctgtgggttttgcccagatgagagaagtaacattttcttcttggggtactacagctgtgcatgcctaagttttgccaaagggactccatcttggttattacccatgagtgcctaagcaaaacccatgggggtgctaaaaccacaatgctaatgtcatgtttaatgacattataatgagctgggttaaattagggacatttaggctgatttattgtgcccgcaccaaagttgggatggtcacttctgagcaacatcctagcttaagggtaacttcttccgtttttcctattaactgtagaggcagtataggcactgtcttgccgttgttcttgtgaacatagttcctttctatcccttctcctgagaccttccctctctatgtgcctatccatcccttaactacctcctctcttaacagtgttacacagcaataaataatgcattccctttttgatttctggtcatatcatcgatctagccccaggggcatcctcaatttctctgtcctgccttaaatacacaagggtagagcataccgctccctcacactatggaaattatatcaatagttatcagactgaaaaacttctgagctttatacctcttctggccaaaggctcccccatgcccaagatactggcctgaacacctaatccctgctcacagggggtggcaaaacatggcagttgaattgtctgcttagcaccttctgtctgtactattcctcctgacatcactgggtatccctgccatttgggccctctgaccatcactagagagatccttggcttctggtccataggggatggcaatctggcccacaggcctatctctgaagactattcagactctgctctgtgaaaggag

SEQ ID NO: 157354 - DNA, 1000 bp, Homo Sapiens
tggtattaacttccttttcattatttactgaaactagaaaaaagtattctataacaaaatgtatacaatttagtaattgtacaaaacattaatccagcaagatattaattacagtcacttttttgaacactcaacatatttttcactgccacttccatgaaaagctcagaaaaagtcactggctaaaaagtcacaacaaaagtaatttaagctttacgtacaacagaaaaggtaaatcttccacaataacaatgcagacacaatcactaagaggctctccatgctgccatggtttcctggaatgtttttcagagtcatctctacaagagacatcatcagctttccaagagcaacacttaagcattagatgtaatacaaaataaggagttctttattatttatacaaaacttgtacattaaaaaaaattaagattcaataactctgctgaccccctgagaaagctaagagcgttcgtgggtccatccaagagccctgtgtgaatgtttcagtcaccaacctcctggccacaggaactaggcacagttctagggccattcacgtggctccttcactggctctgaaagctgactttccctttcattaggctcggcaagcaagccagggtttcctgacaacattaaagaacattatcttctctggcccaggctagagtattttatcagtacacaagttgatttttatttcttgaacacttccaataaactagcataagttttattacaacatatacagatttggtacagtttacaaaaaaaactagatttttcaactaaataaaaatgtcttttaagcaattaaagttggcttagagacatggtaaaaatctttcaaaactgtgtttctacaatgatttctaaggtcccagtcttgcttgtacttgacagtcaccctcatctaagcaacattaagagctctgatatctttagtaaagaatacaaaaccctgtgtttcttaaaagcctaatgctgaaagacatgt

SEQ ID NO: 157355 - DNA, 1000 bp, Homo Sapiens
gccggttcagcttctccccaccttcactgagagaaagacctattgtgtccagttcccccaaataataatctagtcagaagcaatgagacctgtgtgcctgtggccttgagcagcacagcaggggcagtcggatggacggagtgtgtcgccagcgtgtctctcaaatggagcaaccagctgccatgctcacccatgcctccggacacgaggaatcagcgccgggccgatgagggagaaagttcaggattttggcaaaattaggcagcgttaaaatggtaacagccttggatgaacgatggccctttgtaaatttcatgtccctagaaaggtgaaagataaaggtaaaaatttccatctccacgtgtttttttgtaatgacccacggtgtcaggcgggtgtgtacagtggttggatggggccacagggacagccacttcctcaaactgataaaaagggcttcccagctggacttgtggcaattatttttccgttatgaagcagagaggagagagaaagggagaacagggaaggacagggacagagtgaggagactggttctcaagtgctctgttgctattaagtgttgtcattaaggttcttaaaggcccatgtcagttaagggtttgggcagggaataaaaagctgcttgcatattgaaaaaaggaacatcccaaatgtgttttactgcagagaagctgtctcccgcgggcagcaagggcagaactgaagatccactgaggtacaggaggcttgtgaatggattgttaaaactctctctccccccccaccccgctgcgcgtgcgcacacgttactgtttgcacagattcaggatccaaggatcagcaggtcgaagactggggcagcggcaaggcccgctcgttcttgcggcccccgttcatgtgggcgtaaggctgtctctcgtcgaagctggcgcggaggaccagcaccccagggccggggccgttctcggccttgtgtcctgagtgtctgtcgggcagt

SEQ ID NO: 157356 - DNA, 1000 bp, Homo Sapiens
ttttaataatttatcttttattgaaattgttgaatactttatattacagtaaagttgattgaaaaaaaaatgaagagaaaaatcaattttaaaaaatacactcatgttgaaatcaaacaagccagccaaaccggtacaggctgagggatgctgcagggcggtttgcttctcagcaatagaacaccagagtctatatacaattctacaatgcgagaaaagtcattcactaaacatggcaggaaaggcgctgccgccagaataagaacaccagcagcgcctccctcctcctccatgctgtgaccgcccggcctccctcctcctccacgccatgcccgcctggcctccctcctcctccgcgctgtacccgcccagcctccctccagcatgaggccaagtgcaatgctagggccgaggctctggcccatgatttttcatgcagtttctgtaagtcacacactgtgcaaattaaggcttcttataggtcgaatggttgatcaacacttttttcttaaaaaaataagcacagtaaaggtggtatcatgagaacctgaagagatgagacctataccccaaatctggaaaaaattcattttctctgacacctcaactccactcacacacacacacacacacacacacacacacaaacacacaaatcaatctttgggcaggttgtttgaattcaccagccggcaaaaatactgacaaatgtgctctgtacgcccaggcttgaagatatcatgcaaaaaggtgcagccattcctgactaaaggcatagaacaggcaaactctccaaaacctaggcactcggggaccctgtgcacgtatgtgtgtgtgtgctcgcacgcacgtgtgtgtgcccttaagaaacagaaagcaaaagagaaaagagacagaatgagctccaactcaggggacacattaatgaccagttcaacatcccgccggaagctgccccatacactgacagcctcaccatctcaagatggacaaactggta

SEQ ID NO: 157357 - DNA, 1000 bp, Homo Sapiens
tttttttttttttttttttttttctttctaaacttttattgaaaaaaaaaccgaggaggtgtgctggatcccttttcagaaaagccgcttctcatacgaatggaggctatggacgccaccttccacctgggctgaggacgttctcttctcaaacttaagctccccagagtacatcatggctcggacttgggtcaagctcttggcaccaatgtcctggcatgagtgttggatgccagcaatcaggtaagggacaaatttgtggattgaccctttgtcctgcacagcaccagacactccctgggccactttgattttgtcagcttcactgaaatatctgttctggctgctgaggtgcttgtccatggcatcgagagaacccataccgcgatatttctttagccggatcccatcggaaaagaagtattcaccaggggcctcagtggtggcagccaggagagagcccatcatgactgtggaggccccaagggccaaggctttcgcaatatgacccacattttggattcctccatcagcaatgaccggaacaccaaagcgccgtgcatactctgacaccttgtacactgctgttgcttggggccgcccacaggccagcacttcctgcgtaatgcagatggagccacttcccatgcccacccgcagggcatccacacctgcatcaatgaggttcttggcctgggcagcagtgaccacattgcctccaatgacttggagattagggtatttgtctttgatgtacttgatcatattgatctggaagatggaatttccctgggaagagtccaaaaccactacatccacaccagcctgggcgagcaagtccagcctatacttgtcatcctcatgagtgccaatggctgccccacacagcagctgtttcttggcatctttggaggctagtgggtagtcccgattcttcttcaggtctgtccgggcaatgatggccacaagctcatcatcttcatttacaatgggcaacttt

SEQ ID NO: 157358 - DNA, 1000 bp, Homo Sapiens
tttttttttttttttttcacagaaggcttttttatttttagacctttgacatatttcccaagagcggtagatgcatctttttgtgcatgttttaatttattaacacaaacatttaaagtacgctttttaaaaaaataatcatgtcttggcattttttcaggtactatattcatagcctcaaaaaatagaagtggttgggtctcttctgcccctggggctgggtgagctgcagccgcaccggggccatgtccctccctagagggcgctcctcccttccagccagcaatgttgcccaacgcgggaggccagctgtgcagaacccagcatgcaggcatctcactcccaattcagcctgggaaatcggaactgagagccccacgatgaagccctgagctgatgctgacatgacactaattcactggaaacgagggtgatgggggcacagagcctctcatgctgtgcgccctgaagcccaccctctgggatggaaggggacttctcacgcgaagctggagagttcagacattgtcctgagggtaatggggagctgttgaagacaggtggggatgagcagcatattcagaactgtattttagaaagatcgggccgggcgaggtggcgtgtgcctgtagtcccagctactcaggaggctgagacagcagaattacttgaacccgggaggcggaggttgcagtgagccgagatcacgccattgcactccagcctgggtgacagagcgagactccgtctcaaaaaaaaaaaaaagaaaagaaaaaaaaaaaaaaagaaaggaaagaaagatcattcgtgcctcatgggagaagggagactgaggcctgggggtattgtccatgtatttctaggtagaaattgcaagtcaagtcctttggggaacacagcagggaccctgtcctaagggtttccagttggaaccttgacaagacaaaggccccttcccaagcaagacgttttctcccaaagacaggaagcaggcccatcc

SEQ ID NO: 157359 - DNA, 1000 bp, Homo Sapiens
gttttttttttttttgagatggagtctcgctctgtcgcccaggctggagtgcagtggcatgatcttggctcactgcaacctccacctcccaggttcatgccattcttctgcctcagcttcccgagtagctgggactacaggcacctgccaccatgcctggctaattttttgtattttcagtagagacggggtttcaccgtgttagccaggatggtctcgatctcctgacctcatgatccacccgcctcggcctcccaaaatgctgggatcacaggcgtgagccatcttgcctggcccagatgctgatttttaaatgctcctggctctcctttctctttgccccattcctgtttcagggccaactggctcatcatgtcccctgacactcaactttctccccaggtcacaccgcaggctggctgagattgtgaaaaaaacaaaacaaaacaaaacaaaacaaaacaaaacaaaacaaaacacaaaaactactgtgatgattagaagcactctgagattcttgggccaaaaagcactcgaaaagccccagctgctggggttcccccttggtgggaggtgcagggcacagtgtgattgggagtaggccaggaagctgctgatgccactatgcatgtgctcagaggggctgtctagtcccaggccaccttctaagagtcactctaatgagaccgattctccaataggctacactggacacacagaacacagcagaggaaaaacacacacatttggcagataacagcagagaacaccaagggctgtacgctctgtacctctcagtaatgggtcgttggtatctgatttaaaaggaattgcctatgtgatatggatggatcttaactcatgagggctctgtgagctcatcccagactagaggtttgagctctcatcaggtaagtctcctctctgagtccacagcaagcctcagggtggaaggaatgagggacaaggtgatggttctctctaggtgtcagcccctgga

SEQ ID NO: 157360 - DNA, 771 bp, Homo Sapiens
tttctcggtcactagaactttaatgatagagactaggatgcggaagcgagcgcccctccccggggcagctggaggctccggctcttctttcccggctccgtcggcccgggggccttggtctcaggcccacggcagcagcgtccggagccgtccgaggagcgcggcgcgcagcgcggccgggaggaagtgggcgagcaggccgagcgcagccagcgccaccagcagccagagggcgcgcgcgctcgcgtacagcggtgccagcctgagctgcgcggagcgcgcgtagccctggaagtagcggaggcgcgcgaacaggtagaccaggccgcacagggccgccgccccttcatgaaagaagatgccggcgacccagagcgtggcgaggaacagcgggaagtactcgctgcagttcaccctgcggtgggcgggtgggatgagcgcgccggccgggatggtcctgcgacccggacccgcctggggctcgctccccgccccgcgccctcccgccgcgcctcactgggctcggtagacgcgctcgaactcgggtgggccggtggtgagcggcggcgacacgcggaaggccctgcgcgccgagatcacctgcagggagaagtaggcttgcagcaggactcccaggagggtgacagcagccagtagagctacctcgtccttcatggtaccgtcggtgtggtggcacgggctgtgtgtgaaggcgagctggggaacgcttagccccgtctgctgctcagaggacggcccaggagaggaaga

SEQ ID NO: 157361 - DNA, 1000 bp, Homo Sapiens
ttttttttttttatggtcaatcaacttttatttttaattacccaagtgtgtactgtcctttgtatgaagatacaatggaggatacaaaaggaagaagagataaaatttctaccatcaaaaaagttaaaatcagctggagacacaccgcacaaaacagtaagacttaaggctatatactgagtagcatttgagaagtgtaagacaacttagcacagagtaaacccacacaacgggacaccatcggtaactatgacagggagtgaaggaggataattggggaaaacatccaaagaggtgggaaaagcgttggatttgtgttctagtcccccagataccagtggcttattgtggctcttaggtaattaagttccacctctgtgggcttcagtttgctcaactctaaaacagaaggtgaggactaaatggtctttactgtctttcagctgtaacaatacagtattctaaggacgaatgcaaagaactagggaaggtgaggctattacaggtaagaggaagaacaagcacaaagccataatggtaggaaaaaattcattccttgtgcatgggcaaggtgtgttgtggggcagcaagaaccttaaacaagccaatttaactattctaaagattttgagggcaataaacttggaaactggtgaaacagaacgctaagccaggtaagggacactaagcaggggccacaacggagaaagagataccatgtattttacagtcagagttggatttatcttcatgctccccgcctcactccacactatttgtcttcatggaactttactgcaactctttccccaaactcatatcccaaatacagtaagaagagagtgtgattacagacaccctctctctttagactctcacaagtagcccccttttgtgggccaggaagccaagagccgttgctgaaaagatggtggtcaatccaatcagcctgagcaggcctggcacggagggcaaatgtctctccaaaaaggtggtggtg

SEQ ID NO: 157362 - DNA, 1000 bp, Homo Sapiens
aaagtaaaggatttattgtaatctgcttacagtcctttgcaaagacagacatatgtttttgcataaagatataaattgcttcattttaaactaatttagtgtttctttaaattatatgaactttttggtgaattatgaactgtaccaaaccaagatttttaagagcaatatggtacaaaaataagagcagacagacaatttggactgggacaggcattcaacagtgaatttagaatatggctttgctgtttaatcaagcaaagttacctggagacacacaaagagccagtaactttgttaatacaaaaagctgatgcagaccatctccatcccaaacctggttaagtaagtcagaattctcattttataaaaactaagtctgaactaaaagctgcttttgtaagtaagccatttgtttgctagcaactcccagtctgcatgctgtgtatttattaccttcaaagtgtggctttcatattactgtgcaccgtaagttgactgtatttaaagatctgcctataaattaaattcctgaaattgcaaattatgtaagaaagactcctccctctgagtgcagctttcacaggtttccccttgcactaaggcaggtgtcttttgaaagacaaggtaatgttgcctgcatggtgaaccctggagaaaagtgttgatctaattaattgctgcttcctcgtggccatgggcttctccagctacagcttttagattttggaaaataattaatatgatttcactgagtaaacctgatgattatcatcatttttaaaagattaatttggcctctattcaaagtagtttatttagtgcaatcatattgttagtttccccaaagatacatatgtttgtgatttggggcaagagaaaagccatacattgcatcagtgccaaacaaacagattaatgaattaaacattttagtgccactgtcttgcttatatgatctgtaatttttctccaaaactgtttatgtataaaacttatt

SEQ ID NO: 157363 - DNA, 976 bp, Homo Sapiens
ccaggtagctatgttgtaattttatttcatgacagcaccatcttctctttgcctgcgcctgggcctcctagtgtgctgcttacgtgatgcccacgtgccacagagttattgcccgaagtgccagtgggctgtgcaggggatgggctcttccttccagatggtctgcagcctctgggaccacgcagccaccatcccctttctttcttcttcggatgcaatttcaggagcaaagctgatctgaggggcaaggactttaaatccacagaagtgtaatgtgccatgctggagtggccacaggaagtatcgagaatctccattgactcctgtcttcgtgtacatctcggccgtgcctcccgtggttacggaaaggagcgctagtttaccctggagcaaaccggaatcgtagaatcctgggatgtcaaaggcaaagccctggcacagcaccctatccatccagcccttcaggatggccggcacgctgaaccagtacagcgggaactgaaatatcactaggtcagcctcccgaacctttttctgctcatcagtgatgtcgctagccagagacctttgcttgtaggcttcgtgggtttccactccataattgaaaacctcaggattagaaagagtaccagtgatatctttgtctgtggccctcggctcaaagttcatggcatacaaatcagacactgtgacggtgcagccctgcctgctcagttcatctacagccacattcttcaaggatccgttgaaagacttgggttcctggtgtgcatagacaatgagtactttcttacctgccatagcgtaagaaggtggattccttctctctgatttgatgggtggctggggctttcctgcgtagtctctcttcagcgagtccagcaatcttccgaccagcgcactccccagtaggagccgcaggactgggacccgcgtctccccaaggaccgctctaggagttgcgccaggttccggg

SEQ ID NO: 157364 - DNA, 1000 bp, Homo Sapiens
tttttttttaaaatgtaagcaacatttaatcttcaaaatgaaaaaatagacaaatttttctaataccaaaatataagattaaaatacttgtaaaataaaatgttagtgcgaaatagggctttttttttttacatcaaaaaggaaatatttttgacttgcttttcttctgtaaatcctcccatctcactaatatttacaacaatccagagtagcgtttatgagacactgaaaaagacagggaggaaatcctttttcaagatatgaagtcagaacctgaatgtagacatcggacagagaagtcctcaaccacaaacctgtcctccagctctagagagagtaaggctgtatttccaaccttgagatttttcattacattttcccctttttgggtgttaaattctttccaagaatgctgtacttgtaaaaatgattttattctagctacaaaacatttcatttaagaaaaccgcattttatatccttgtgtgaaatgctcccaaaagccatcaagatatggagacaacagattttaaaaacataaatctaatcatatgggcttgaaacagtatgaacatttaacagagtgacacgatatcattattatatttgtttgtcatgagatgaaaggcctggaggcagatggtgattaatcataattcctgagcttctacagaaattttaaaatgaaattactaactgcttaaaattatgaattcttcaagaacgccccttctgtttcattgatgtctttcaacccgtctatctccttaaagaatctcaggcagaaaaaaaaaaagtggggggcttcctttaagctactgaaaaatgggatctgatggaatcttcccgtaattcccgatgttttccaaggttactttcttcttgctgggttcgcctctcaatggttattctgtatttcttcctgaaaaagtagaaggccattagcaagccagctcctagtaaagcccccacgacaattcctgtcactgccgattcttct

SEQ ID NO: 157365 - DNA, 1000 bp, Homo Sapiens
ttttttttttttttttggtggtaaaatttcaactttatttggccaatgtgttcaattcgattgtgaaatagaaatgcctgaagaactgtcagcgtctgattcagctccagcatccttggccacctccccacccgggagtcaagggtcgtggttctgccttgaacaggccacaggccgtgctgtagagaggccagtggtcacaatgagcccacgacaggaggaggagccctggcttgagggaaggggaaggcccaggcctgtgccgggccccagggctggcagccaccagctcctcttccaggcatgggggacaccctgacaggatccggaagtctccatttacccaaaaatgcaagagccatgatcagtcatggcgacactgcaggcggtactgagtgaccatgtccagtccggctccgtccctcccacacgggggacaagcttctccgaggaggcctggccaaggtggaacaaataccctgatgtcgaaaaatgtctaaaaatcccacagacggaattttcaaaaagaggagaaacctcccgcgggagggaggcagcgagactccgaacacggtagcaagcactctggacagactcatgtatgaaaaagtacatcatggtttcaggaaacaagccccaccagggtgggctgcctggagatggatccctttccaaaaaccgaaaagcagaaggaagagacgggggtgaacggacggtgtgtaggggtgaggtgtcacttcagagaggttccctgggtttccggcgacgccctccttcaagcgaggccgcaggcttcggaggcgtgcgctgctgctgggtgtgcagcccccgaggggtctcggcagcgcccgggtctggctttgcgtattacagttcatctttcacagctttctgatcatcgtcttcctccatgtctggctcctctgcttcttccaggtcctcgagatcgtcatcatcccctgccccatcctggccaccgctctccaggaatttcttaaaa

SEQ ID NO: 157366 - DNA, 1000 bp, Homo Sapiens
tttttttttttttttgctctgaaaacactttattacacaaattacattcagattctgaaaatagtgttctaacagtgtaaccatctaaaaataagacatcccaaaaacacaccaactgaagaaaatttaaaaaagaatttaaatagagacttttttatttccttcattgcaatataatgttagtgattttaaaaaaataggagatttagcagctttgtcgtcatgtagcacaaagtttctctttactgccacaggctaagaatgctgaacaggaaaggcaccaaagaaagacactggcaatgaaagtgctattgggaaaatactgtgttcaagcaaagaatggggttatttacatccaccaaaaagtctcaaaagtgtaaatgggcaaatcttccattgttagattagaattatgatggaaaaagaggacggtttctctagtctatgttcatataaagacaatggcactgttatgaacttttaggaaactcctcaactagaaacagaagccaacttaaccaaaacgaagtaaataaagtgtgtacagtcccacacagactagtacagtttacaattaaatacacagaactttaaacgtgctaaagggaaaggaatctgacattctgggtaaatcttactcaatctaaatcaaagcttggttttcaggaggaggaaggtgcgagcgcaggcagaggtgctgaatactcctcttctgattcacttccatcatcctctttctcttggtcactgccctcagtgctaagccggtcaaacccttttcgactgtagcccttacggcttgcaaagaaattaccaaggtttaagcctccacttccctttcctctaaatcttcccagtactcttcctgaactcgtctcgagtttgtgttcagaatctgctccaaaggcccttgattttttccaccgaataaatatggcaatggccagcaggacaaccaccggaataaccagaagggttgtaatgagaacaacaggcactc

SEQ ID NO: 157367 - DNA, 1000 bp, Homo Sapiens
ggaaaaactgtgaaaaatatatctgaatttattaagtacagtataaaacagggttgtggcaacagaaagtaaaaactaacatggattgctataaatatgctgaagcctagttgttcaaatgatacaattctctcatgctactctaaagtttataaagaaaaaggatttacactttacacactgtacacaaaaggaataccttctgagagccagggagtggggaaaggggaaggagacttgacgtcaagggtgcttttgaggaacatgacgggccagccagcctgccccaactttgaggccctgctgggctcttgtgactataaatatactgtctatttctaatgcaatccgtctttcctgaaagatcttgttatcttttactattgagacatgctttcatttttgtggtcctgtttccaaagctgctcacggtgacaggtcaggaggttgggctttagctgaaaacagggtggcatggccactttctgcccagggaggaggcattcctggagaggctagtgtgcattcatgtcttcccatctgacagagtatcctgaaatcagaccaagtcctgaaaacttccaaaatgggaagtatctgggaaaatgcactcttccctctcctgtagggtctcgtcccgcttctgcggtgtggtgggtctggagaagtctgtagagaagcactgcgcctttgcagtgtcttctgaagaagaagaggcgggatctcatttgcttttgaggagtcgggtgttcctggtcacggtcgcatgttgtcacgaatccagtctaggtagttggtaaccttggtgtacacacccgggacatccttctgtccacagcccaggccccagctgatgatgcccaccaaagtcatgcggccatcgttcagacacaccagggggcctcccgaatcgccctggcaggcgtcgtgcaagtttgcctggggcccgccgctccgagtgtctccagcacacagcatgttgtcggtgactgttctgtta

SEQ ID NO: 157368 - DNA, 1000 bp, Homo Sapiens
ggtcaaaattagtaaactttatttaaacttcaaaaaaataaaataacagacaaaaggcagctttagctttgttcttcccgaggatcagctgtaaccactcacagcaggaactacccctaagttaaaataccctttacccgccccgcatcaagccacaggcaaggaaggatcttcaatttggggacaggcagggggtgggtggggtaggaggtagaacaccactgggccagtgagttctaacagcacaagtggagaacaagacaagaatctgcatcagaaacgggatccagaagttcaccgggagctctgtcacaaggtatttatgtacaacggagctgggctgggggtgacgccccgtgagggaggcaagaactgcacggcagcacgggcaagctgccctgggccctagcccgctgccgcaccccacgtgccctcagttctcctcgtcactgtcatccgggctgatagccgggcttgtgagactgtaggtggggctggtgggcgagtaaccaggggaagtgggagagtaggttgagcctttgggggaggtgggcgagtaggtggggctggtgggcgagtacttgggggaagtgggcgagtaagtggggctagtaggtgagtacttgggagaggttggggtgtagactggagaggttggggaataagtaggagatgttggggagtattttggggtggtgggtgaataggtgggactggtaggcgagtacttgggagaggtgggtgaatatttgggactggtaggtgagtacttgggagaggttggggtatactctggggagctgggactataagaaggactggttggggtgtacttgggtgaggttgggctgtagctgggcgaactggggctgtagctgggtgagcttggggtataggttggagactgtggtgtgtatcgtgggctggaaggggagtaacttggtgaggtcggggaatagctgggtgatgttggagagtagcttggagaggttgggctgta

SEQ ID NO: 157369 - DNA, 1000 bp, Homo Sapiens
tttttttttttttttacagaaaacagaactttattccaagggccagaggttatttaaaattatttacactcactggaaatcatgtggaggggctgggcccagctcagcagagagaaagagcccttctgtgcagccaccgagggccagaggcctccagaggcatggagcccggtgcccccatgcaggccctgggctgtgctgccaggggccggtggacctcacctggcctgggggctgaggaggatgcaccccaggcccagaggagtctttgtcactgggcctgcgcccatgccaaggccaagccaaacacacccaggagactacgggagggagccaggagagctgattacaggccggagtctgtggggtgggtggggcaggcaggcccctagctccacacgtccagggagtagcggcccttggtcatcagtttcttgatgtagtccaccgcctgcgcgtgctccatggccccgagctcagccacgatgtcgtagaaggtgttctgcacatccctggccatgttccgtgcatccccacagacgtagatgtgggcaccgccttcgatcaacttccacaggtgctctcggtcttgctttagcaggtgctggacgtagaccttgtgggactgctcccgggagaaggccacgttgagctgggtgagcgcaccgtccctgtggaactgcgccagctcctcccggtacaggtagtcctcatccgagcggcggcagccgtagtacagcagcgtctcccccacctccttgccctgctgtcgcagccaggcccgctcctggatgaagcctatgaagggtgccaccccggtgccggggcccaccatgatgacaggcgtggtggccttgaagggcaggcggaactgggacttgcgcacgaacatgggcaccagcgcacggccgccgttctccccgacaggctccttggcccgcagccagttggtggccacgcccttgttgatgcggccggccttggtctcgtactccacaac

SEQ ID NO: 157370 - DNA, 1000 bp, Homo Sapiens
ttttttttttttttttttttacttattttaatgtcaaatgtttatttctatgccatagttgcctcagcacaatttgtaaaagaaaggaatccaaaaaaatgaaatttttttagtcaggatattttctctgcagttataagaaagaaaataaacaccatgataccagaatcaccatttctttcacatcatcactctagtaagttgcatctaaatattttccttggttgccactttttttaggatggagaaatatccacaggaaaaaatgtctgaattcattaaaataaccttgggatagtctttgccagactgtatcgagaacatctttgtttgggtatgctatatcgctaattgccatattcttattatttaatataacaggcatactttattatataaaacaaagtgcactaaagatgaacaatgttacaaacaaactgaaatttggtgtatcttaaatcttcgggtgatgattagatagtagctgaagcgtgggtatacaaatttcttgttaatacaaatgcaactcttttctgtgatgaaaatgcacttagtagcctagtactttttgctttagcagatagatagggcatccaatacaactgaaacaacctgataacaaattaattttatttttcaataaaaaggaatgctctggttttttaactggctccttgaggaagccagaagatggcatctgctctttaaacaggcttctcttatctgatttgagacacaaatccaccaagattctttcttacagtggaagtaggcaccacccctcagatcacgaggcccctaggaagaagcctgtggaaatcagcctgtgatgtgtggtggtgggccagcacctagaagacacatggtggttgtgcacataaatcccttcagcggactcagtggaaggatgagaattctgtaagttcatgcacattttattgagtagtaatataaaatgctttttctttttcattgttacaagtgcatgctttgattgcca

SEQ ID NO: 157371 - DNA, 1000 bp, Homo Sapiens
ttttttttttttttttttttttttttgagatggaatctcgctctgttgccaggctagagtgcaatggtgcaatctaggttcactgcaacctctgcctcccaggttcaagcgattctcctgcctcagcctcctgagtagctgggactacaggcgtgtgccaccatgcccggctaatttttgtatgttttagtagagatggggttttacaatgttggccaggatggtctcgatctcttgacccatgatctgcccacctcggcctcccaaagtgctgggattacaggtgtgagccactgcgcccactcccccaaagctttagaccgatgccccatcggggagaactaggtggtttaaagtcttcccccaaggtctgcacctggccctgacattccttccggccccataagattaagggactcaggataaagtcatcagtcacagttactgtagtatgcgcccacaggcggatgaaggggctcatttgagttctggattttccaacagcctggctctgccatcatccctgcccaggtgaggtagcctccaaatctaatggcccaccagtgcccacagaggtggtgcccagaccacagtagatatcccttcttcccccagctcagtccatgatgttcatggaggagaagacttcaggcctggaagcagggactaatttttgagggaattgccagggatctggttgaatggcacaaccacttcagtgaccgtatccgtggtggcccgggagcatttccggctactgcgcatgctgtagaacttttcggtgaggtgcttgcggaacttcttggtgaggaaacagtagataacagggtctaagacacagttggtgctaaggaggcagagggtgacctgatgtgcatcattaatggcctggtggaatttgctgtcctggaagcccagctcagcaagggtccagggcagctgcaccacgtggtggggcacgaagcagatgatgaacaccgccaagaccgtgcacaccatc

SEQ ID NO: 157372 - DNA, 1000 bp, Homo Sapiens
gagtttccatcactttattttgcaaaaatagaaaactcagcaatatgcgatacagcggggtagaggggagatgtaaacagaggggaggggacagcaccctgaccccccaagagaacacagggagccaatgggaatcttatttggcagctaaatacaaactggggattggaggaagaaaggaggggtcacaggggccctgggctcccccacccaagacccctggaggaaggggtcaattccacggtgtaaacaaaagctaataaataaatagaggcttcctctgggtcagggcgggatcagctaagcagcatcccccctccctgggccaagctgctctggggagtaaagggtggaaggcactagggagagagggatcccctggcccctctgtagtgtaggagggtccctgccccaatggctgagatggagggcaggaggagcccaaggcacatgacagggctgggggagggacttataacggagggcacagggtgaactctgcacccgagccaagaggtgcagaatggacctgcatctatctgtccctttcaccctctgttcctgccccagaaatgcagggcccagcctgcccccaccttgacctggcacaaggacggggcacagaggctagcacacaccctgcaggtgcatcacacagcattaggcaccaagggtaggagcaagaaggtgggctcagcccttctcctttgtcccctttttggtctctagtgttcctgtttgctctcagagagccaagcacctggcagaggaaggggctgtggaatggcagggtcttcctcttgccctgggaagtctaggacccatggggcagtgctgagattttagagtccaaacccaggctcatccctttgccctctctcctggtgggagcagggcaggcccccgggactggcgagggagccggttagatcaggaaggggatgaacacagaggcacccctagaaactttggcaaaaacaaggagctcattggaaggggt

SEQ ID NO: 157373 - DNA, 1000 bp, Homo Sapiens
ttttttttttttttttttcagtggaaaataacttttattgagaccccaccaactgcaaaatctgttcctggcattaagctccttcttcctttgcaattcggtctttcttcagtggtcccatgaatgctttcttctcctccatggtctggaagcggccatggccaaacttggaggtggtgtcaatgaacttaaggtcaatcttctccagagcccgccgcttcgtctgcaccagcaaggacttgcggagggtgagcacccgcttcttggttcccaccacacagcctttcagcatgacaaagtcattggtcacttcaccatagtggacaaagccacccagagggttgatgctcttgtcagataggtcatagtcagtggaggcattgttcttgatcagcttgccgtccttgataaggtagccctggccaatcttataaatcttcttgttgatctcagtgcggtgatggtagcctttctgcccagcgcgtgccacagagaaggctacacgagcaggatgccatgccccaatacaggccaccttgcgcaggcctcggtgggtcttgcggggcagcttcttggtgtgccaacgactggtgacccctttgtagcctttgcccttggtcaccccgatgacgtcgatcatctcatcctgcccaaacacttggttcacaggtacctgctgctcaagcctctcgcgggcccagtccagcttctcggccacagtgcctccgttcacctggatctccatcaggtgggccttcttctggcgcagaggaagcaggcgcatctgggtgtgggcaatgacacggatgacttggcagtacttcttcatgctgctgaagtccttctccagctgcttcttgccatcctcatcctgccatttcttgcagtacttggtaaaggccttcttcttagatttatgccaattcttatagaaacgcctcttgcattcatcactgatgtgctcagcaaagacagtcttgaaggtccggaggcctcgagg

SEQ ID NO: 157374 - DNA, 890 bp, Homo Sapiens
gaaggaaaatttgtattatttcaattatttttatgtacagaaaactcaacagtgtacatttaacccagtttagtggcaagttctttagcctttgccttttcgagcttggcgatacgagccacagacttaggacccaggacattgccaccccagtgacggcggatctcatcgtatctgtcattgtaattggtcctgatagcttccaccagcttagccaaagcgcctttgtcttccgagttcacctgtgtgaaggcgacagtggtgcaggtcttcctgtggactagacgtcccagtcttgcctttcccttgataatgcagtaagggacccccattttacgacacagggcaggcaagaagacaaccagctcgatgggatccacgtcgtgtgcaatcaccaccagctgagctttcttgttctccaccaaggtggtgacggtgttaactcctgctcgaaggacaggtggtctcttcgttgggacgtcccctttgccagcagccttcttctcggcccgggccaacagtctctgcttcttctcttgctttgtctctggtctgtacttgtgggccagcttaagcagctgagtagctgtttggcggtccagggcctgggtgaactggttaatcgcaggaggcactttcagccgcttatagaggatggctctctgccgctgcaacctgatatagcggggccatttcacaaagcgggtgaggtctcttttgggctggatgtcctgtccaatgccaaaattcttaggccttttctcaaacaggggattcaccactttcttagcctcctgcttcttcacgacagctggggccggagccaccttctttcccttggccttctttcctttcggcatcttgggcggcgggaggagagagaaaggaaa

SEQ ID NO: 157375 - DNA, 1000 bp, Homo Sapiens
tttttttttttttttttttttttttcatggctgatttctttatttttagtagttctgacatgttggccaggctggtcttgaactcccagccaacctcaaagtgctgggattacagctgtgagcaccagcccaaccttgcctctttaaaaagaaaaaacacaagtccactctgaagtcagcctctgtaacctccccacaagaaaaccgttttacatcagtcactaaccaaacaaccaacagtgcttcaacacagaaagtaaagcattatccagggcttggactgtctttcaagaaagccccaaatcccctggcaggaggaagtcacagcagtgaagccccatcccaggcccagttgttcccacgaaacacaccacgtggagacccagcatgactgccgactgattccaagtccccaggagggctttattttttcttttcaacatcctgttctgcggcttccttggctctttttgcccgtatgccgaagagccgggcgttggcacgggccatacggagactagcgaaggctttgaaattcttctcttcctcagtgatgactcgagctttctccttcttatagacgttccggacgggcatgaccggtccggtcagctgggtggccagtttcagttcttcagcagaactgtctcccttcttgggggccgagggcttcctggggaagaggatgagtttggagcggtactccttcagccgctgcacgttggcctgcagggactccgtggacttgttccgcctcctcggatccacagaaatgccgatggtccgggccaccttcttgtgaatgccggccaccctgagctcctccaggctgaagccgcggccggcgcgcaccttcgtgtggtaccgaaccgtggggcagcgcacgatgggccggatgggacccgacgcggggcgcggggcgatgcggcgcgccttggcttgccgggccttacgtctgcggatcttacgggccggctggttgaaccacgtggccacgcgc

SEQ ID NO: 157376 - DNA, 493 bp, Homo Sapiens
aatgggtttagtttttttttattttttacaaatatactggagaatcatgcaatgctgccagcattggatgcaatccggggccacaagtctgcacactcctttgctactggtcctgtaatggcagaacctttcatctcgcctttattgttcactatgactcctgcattatcttcaaaataaagaaacacgccatcttttctacggtatgactttcgttgtcgaatgaccactgctggatgtaccttttttctgagctctggtttgcctttcttgactgtggccatcaccatgtcacccacaccagcagcgggaagtctgttcagccgtcccttgatccccttcacggagatgatatacaggtttttggctcctgtgttgtcagcacaattgattacagctcctaccggaagacccaaggaaatccggaatttcgcaccagaggacccaccacgtcctcgcttcgacatcttgaacgccggaaaaaagaaaaaag

SEQ ID NO: 157377 - DNA, 648 bp, Homo Sapiens
ttttttttgtcagcaaaaatctttttaataagagagtaggatccagggttagtttttgtagcctcggctggcccgtcggcctctggcacgctcgaacttccggcccttggagcggacgtagggtttggtgtggctgtgcggggttcctggggccttgccgaaatgccggtacacctctcggcccttgcgaggaccggagagcaggacagtgccacagcccttaggggagtccagggccagctggtcgaaagtgaggatcttgccccctgccctgaggatgcggctgcgggcccggctggtcacgcgcagtgcacataccttcagtttgggtacctcctgaacccgcacatcatcagttatggtccccacaaccacggccgtcttgttttcccggccaggaagcttcatcttccggatcatccgggaaagggacagaggcggccggttggtgcgactcataaacaacctcttcaacacaacctggttgaatgtggagttggttcttctggccagaaacctgtataacttgaccaacagcctcaggtagatatcctggctcttgggctccttgcgccgaacctttcggtccttgttatggcggatgtccactcccatgatggcgcctcctgctcggccaggtccggaaag

SEQ ID NO: 157378 - DNA, 618 bp, Homo Sapiens
accggggcgttcctgagtttatttggggcacacccggacgagggccctgcacctagaagaaggtgttgggcctcttggtggtgaagcgtggcttgtgctgacggcgcaggacccggtggggcagcgggaacttgatcttggagtcgtggaactgcttgacagccggccggcggcacttgctggccgcgatctcctccaccttcatgatctgaatggagtgggctcgggcgcggtgccgggcacccatgtctcggtagcactgggtgacagcgcctgcggtggtcaggtcccggtattcccggtacatgttgtgggtgccgctccgggagtcatagcgcagccagatcccgaagttcttcacccgcaggggggacttctcaaacacctgcccacagtagacaatctcccctgaagacttcttcatcttctttaactgagatacaaagtaccagaagcgggacttggcgacgacatgattaggcgcaaagattcgcatgcggtagaggggcggcgtgtggcatttgggggtgggcaggcagcgacccactaccttgtactctcgtagcgtgcccgaggccttcatggcgtgctctccgcgttcgccgccacccgcaaaag

SEQ ID NO: 157379 - DNA, 748 bp, Homo Sapiens
ttttttttttttttttgcagattaaggcttgttttattttaatggctgatctatgtaatcacagaggccagtatgtacagacaaagtgggaggttttatttcttggtctcttcctccttggataaagtcttgatgatctcctccttcttggcctggaggcgctcttcacggcgcttgcgtgcttccttggtcttagacctgcgggcctcagcctggtcagccaggagcttcttgcgggccttgtctgccttcagcttgtggatgtgttccatgagaatccgcttgtttttgaacacattccccttcaccttcaggtacaggctgtgatacatgtggcgatcgatcttcttagattcacggtatcttctgagcagccggcgcaaaatcctcattctcctcatccatgtgaccttctctggcattcgggcattggctgtacccttccgcttacctatgcccatgtgcctgcccttccggcgggccaaggtgtttttccggcatcgagcccgggaatggaccgtcacaggcttgcggatgatcagcccatctttgatgagcttccggatctgctgacgggagttggcattggcgatttcattggtctcattggggtctaaccagaccttcttcttgccacagcggaggacactagaggcgagcctcttctgaagcctgagcatactcatggctgcggccgcagcagcgaaaggaaagagctcgctcgggcccggctcctcccattatctgc

SEQ ID NO: 157380 - DNA, 1000 bp, Homo Sapiens
tttttttttttttttttttttttttttttttttcctctgaagtccttgtcctttattgggcaaggggtgagggaagcagacagaccggttggacatagtagatgggtgtgtgaggacaaaatgctaccagagagccagccaatccacactcccctgaaatggatgctaacacccttcaaaccctgggcattggtttcatacacagcctcttccagggataaaaggggttcttgtacagcttgttactcaaccatggaggcaagttctgagttctggttttcctaggacactaactctagtcacaaagatctctggaatgatcatacatggtggagtggcagggtgaggtatttcaaaaggataagtagaacaggagtcttgcccaagccctgtcatgtcagtgtgtgtgtgtggcctcccagcccaaccagaaattgacagacaggcatgtatatggtgaaaagatatatatatatatatattcagaattaggcagctggactcagtttagatgatcccaattttgttggcaacatccaaagcatcgtaatcaggagccagtcgaacatatgccttcttctctccatcaggccgaatcagggtgttgaccttggccacatcaatgtcatacagcttcttcacagcctgtttaatctggtgcttgttggctttaacatccacaatgaacacaagtgtgttgttgtcttctatcttcttcatggcagactcagtggtcagcggaaacttgatgatagcatagtggtcaagcttgtttctcctgggagcgctcttccgaggatatttgggctgtctccggagtcgcagtgtcttcggccgccggaaggtgggtgacgtgcggatcttcttctttttgtggctgtggacacctttcaacactgccttcttggcctttaaagccttcgctttggcttcagctttaggaggggcaggagcttccttcttcgctttcggcgccatcttgtgaaaagggtctccaatg

SEQ ID NO: 157381 - DNA, 737 bp, Homo Sapiens
tttttttttttttttttttttttttttttttttttttttttttcctgcctcaggtttatttgtacaaatagcacaggaggaccccagccccatgcagatggtagcccaggggcgggggtggggggtcgcaccagtccttctgtcctcatgttggcagagatatctactctgaagcctttgtaggggcctgggtacgtttgggagcctgagctggaactgaagctggggctgcagcctgggccttggtttgatccttggccttggccttggccttggcctttggccggcacagcctgagccccttggcaatacgggcacgagcacgcttcccaagcttggggtgggcaatgtaggcaagtcgatcgagcttgcggctgacaccctttgggatcttgggcttaacctccttgggctttacgagggccttgatagcctcggcacgtgcactcatggccttggcattgttggcctgcatcttctttaggccctttttgttgtgcttcttggcaaagcgcatgttcctcaggaacttggggtccacccccttaagagattcgtatctttgtgatcggggtttcttgataccatttctgtgccattttcgggactggttgtgtgtggtgtggttcttggacttggccatgtctgcaccataagccgcggctcccgaagcgcctagaaccggaagagaaaggggctgcggtgcagcacgggaaatagggtcaacaacgccggaa

SEQ ID NO: 157382 - DNA, 1000 bp, Homo Sapiens
ttttttttttttttttttgaccagtttgcattataaatatttatgactaggttttgaacaggagacaatctgtaagattcctgtctagactagaagtagaaaagctttattatacccagcgcagcatttctgctaagttgaccaggatggttacagaaaaacatcctgtaagcatttctgtctcataagtaccacatcccatatccctcatgacctatatactacagaagatgcctgtaatcccagtactttgggaggctgaagcaggattgcttgagctcaggagttcgggagcctaggcaacatggctagaccacctctacaaaaaaacttcaaaaactacccaggtttggaggtgtgcatctgtagtcccagctacttggaaggctgaggtgggaagatcacctgagcctggggaggtcaaggctgtagtcagtgtgccactgcactcccagcctgggtgagagcaagaccccgtctccaaaaaaaatcaggaccacgtgtcactaaattctgagtaccagtcaagaggctcaattgtcaccagttaggtccccgccttggcaaactgctgtaacattatacctgaagcagcagctggtgggagggttataggagactgaaagtgcttttccagttaaccgtggtggattacctggaagagcaatttgtacatcatcctgttctttttggacagaagttacaggatgcaatttaggcatcccgtaagaatctgtgtaagaaattcatctggatatttccatgcatattttctcaattctcacaagcatcacatggaataacttgtcacctaactttacaaaagcaaggctaagaatgactacttgtggcttgggagccacaagcttcttcaagtgtctcagaacctacctggtgtgagggccaagtctgtacccctcatacccagcctcaactggagatgactaaggctagtctgtgcacttgaggccacattcccctgttcaaggactgagtgtcc

SEQ ID NO: 157383 - DNA, 1000 bp, Homo Sapiens
tatttcattgtacaatatctttattaaagaaatgcattccagcaacactgtcagcatctttattaccaaagaaatacataactttaacagataatctctgtatcttagtttttgcctttgcaaaacaaatggagatatatcaactctcatacaattctaaaagcattgtgctgtgctgcctcacaggggtacgttcccagaggtttctctctctagagcaatccctaataggacaattgttcactctgaggcttctggcttcttatctctcctctcttggggagctgctgcttctctgtaggttgcttccctgtgacgcagggaccatagtttctgctctaataacaccttttccactctgacgtagctgagccatacactacattgccttagtcctgttcaccctttggtgattctgttccatttgccacctggcctcttcctcctcagtcacttttttctttttttgagacagtctcgctgtcactgaggctggagtgcagtggtgcaatctcagctcactgcagtctcaacttcctgggctcaggtgatcctcctgcctcagccttcggagtagctgggattacaggtgtgtgccactgcacctggctaatttttgtatttttagtggagacggggtttcgccatgttggccaggctggtctcaaactcctgacctcaggtgatctacccgcctcagagcctcccaaggcgtgtgggattacagatgtgagcctccgcacccggccgctcctcagtcaattctaaacaactgtcctcacttgaggaagctggcctttctcctgtactgttttaccagttgtctttttaaaaaataactttcctccaaataacttactaattttattcatataacactcctcaggagttcaaataattttaatcatttttaaggcaaagaaaatactttttacatttgctagatgtttatttgcagagctacataaatataaccttattagaatgggatttttcctac

SEQ ID NO: 157384 - DNA, 1000 bp, Homo Sapiens
tttttttttttttttttctgtttcctttagtcttttaatgttagccttttaatattttccaataagtgctttcaactcagcaatatacatatcatgctttcctcattattattgatccatcaataaatatacaaaaaccagaggaagggtgtgctctgaaaagtcaaagtaacaataacagtggtcattgtacagcacaagaatgaacaatgggctattctttgaaaactcaaaacaaatgatttacacaaagacatatctataacataaaggtgaatggaccatgttattcttattcttaagtacattttgcttttccagataagtcaaatgtttcctctctcctactcctctgatataacagtattgaatgaatgttggctacaaaatcaattcttggtgttgttatgaatctcaatataaaacttttggaaaggttctgctagaaaagccaattctaccaggcttgaaatatggattcgaagatgtcttttgtctcttttgatttttcactcagagctaattttaagggaagtcttcaggagacacaaaagatttacaattgcaagaaaaattacatctttagctcttaggttgctttgcaaaataattaaatgttggccttttacttttataaagacccagtttaaatgacttagcccaggtcacctgaaaatcattggtaaaaatgacgtgtagtcaagctgtgcttccagagttacgcccttgagatcaagggagtgagaatacatcttattccataaacttcaggcaatgttgcaagggtttgtgaagacttggccagctctccgttgacaatggccaaggaatagaagctctagacctcccttatttctatcgtgaaaacagaggtatatccaagtgagggactacaacagtaataaagggaaaaaagtatttaattccaaaataaaattgaaaataacctcctgtctcagcctctttttgggaatatctagaaggagtggaaaaccatctc

SEQ ID NO: 157385 - DNA, 1000 bp, Homo Sapiens; identical to SEQ ID NO: 157384

SEQ ID NO: 157386 - DNA, 1000 bp, Homo Sapiens; identical to SEQ ID NO: 157384

SEQ ID NO: 157387 - DNA, 1000 bp, Homo Sapiens
agtgtaacaccccttttattaaaaacataaatccaaatgtaaaaaagtgaatgaaagaatccagcagatatttattaagcaagatgaaagtgaaattacaaacacaggtcaacttttaaactcagcactctgttggagtggaggtgcacggtccttcatcataggcagcctatgcgagatgcatcttaggaagggagctttcgctgctcagaaatcaaagctccatcggaggtgtcctactggaggcatcagacaacaagctaaatgacgttagggctacacaacacaaaggggaaagttgacaacaattcaggggctttgagtagtcaagacaattagcttagtacttcaggtcaataaatgctacaatttatgggcaattagctgtaaaatggcctacagctgaaacactattcttgtcttatttcacgatttcatggagattaaagataatctaaacagattaaggccttaatctttaatccaggtgagtaattttgtttgtagtaaaaagcataagaaataattctcagcatattatgtaaaagaaaaagcagtgaaaaccttgtttggtcttccagtggcaaggatagttgaacaacttcaagaagctgagagaagtttgttcccaatttacaagtattttgacatatagataaacaaaagcaaaaccagttaaaccttaaaagatcatctgaataagatcctgacaattataattttacatccatgtgaatttcaagcaattgttaatggggaccagcagggctgcattaagaaaaccacttttcactgatctctcccccacatatttttaatttgtcttgctttgtttattttggttatgcaagtcctttctcttcatgaaacaagtgtaaggctctaaggctaaaataatagttatttttgtgggccccaaatagctacttttgaatttctttctttagtatatctcaaatctggggaacatggaacttgaagactcctaaccatgaagcat

SEQ ID NO: 157388 - DNA, 1000 bp, Homo Sapiens
ttttttttttttcttggcctgcagcttcatttgcgagagcgccgaggcaggacacagagcacagctgtgctggaagtgtggggagaacccggacagctcagtcctgccagcagccgcaaagagccgaggctgccaggcccatttatgtccctcatgtctctagattttctcgtcacccagcctcaaaaatatatgtgtctgcaaccctcagtctctctgccgtttcttgattcctttccaaacctcagccggggccctggcctcagccccccgtccctgcgtctgctcctcttcacagcagctgctgctggctcctccgcgctcggcgccaggccctgggtcctcagacgcatcactgtcatcagtgtccgagggcagccgggtgctggccacaggcctgttggggtttccaaactctctccctgaatccacatcgaagggatcgatctcctcctcctgggggctctccttggcattggccaagaactcctgctccgcctgcagcacctcctccgggctgccgcaggccgcgtacttgtccaggagctggcggttcaggtccaagaagcccttgccccatttaaacttccgcagcaaaatgacagcaaggtctggaaagcctacgatgcagaaggtggcagcaaacgcttccacgcaggaaagtctgtagggccggccatagttcacggggttggcggccaccaggtagggcaacaggcgcaagtggctccctcgcatcttcccaaacggtgtctcgtccagcctggcccaggagcagtcgatgacggcgaccccagactgcgccaccagctgtctgtctgcgggggacgcgtactgcttgcccacggggctcagcaccagaccgccgaatctgtggcccaggcgcaggcagcgcaccagccccaggcgggccagcttgcggcccgtgcagcgccgggggtcgcagtggcccaactcccacatggccagcgtgcagggcagcgccgccgggcccgggccg

SEQ ID NO: 157389 - DNA, 1000 bp, Homo Sapiens
gcaggttttgaggtttattaaagtaaagaattagcaaacaatatgcaaaaacaaagttcttaagagttatggctttcaaaagcacaatatagtaaaacctaatacattttcataagtatcaaaataacagaattgaagcatgttgctagaatttcagcttctacaacataaacagaagcacaacaaatacaaataagcagcagacctacagtgcagccactagcttggtcttcattatctgtatatgaaatatctttttaagaaaatgtgggcaggtagatacaaacattctatttccatgattacaatcctcttcgattttaaaataagtgaatttcaaaatacaacttacgccaaccatatttaaaaaaaaaatcacttgcctaaccattatcttctagagttcctatagttaaaatactttatgaataaatcaatgcaacatcatcttcaatgatattagaagggaaaatctgaccctaaaagattttttttttttttccacaaagaacttgggattctttggccttactggagttttgttatagctaacaccagtctgtattaattaagaaggcactattaatgagggacggaaaaatctacctgtacacaaaattctgtactttaacagcatcttcaaataaacctttaaaggataatggtttacgatcattttaagaattttaagaactgagttatttggacaagaaccatacaaacctttttcactctgccatgaatgatcgaagaatcctgctctaggactggatcttttcagagaaaataacttatcacctgttttactgcagttgctactagcaattattatatagcatgtgctcttcaaaacagaaataaaaattgatgtgtgaaatccctttcattggttttggtaaaccatccaattttgggctgtcatttcaattataatacagttgtattttaagagagaagataatccaatataacaaaggcttgataaatattgtcactctgt

SEQ ID NO: 157390 - DNA, 1000 bp, Homo Sapiens
tttttttttttttttttttttttttttggtttcaatattaaggtttattttttcttccagattgaaagtaacaatttaaataattatcaggatatagaaacaaatatccattcagataaaacattactgcttaaaagtggctaagaaatattttgcatgtaataaatatatttcatgtttaggttaacaggcaccatcttgagagcagtttgttttttttttttagctaataaataaattacattcaagaaaacaaggtgtttatatctgagtatatcattaaatgtttttcttcatatagcacccaaacttcaaactgtctagaaagtatctcctaaaatataactcataccttaagtaataaaaataaaggccaagaaaaaaaatcaatttaagacaaaatttacagtttatattcttaattccccattcaataaaatatcgattgccaatttaataaaagtaaatgaactgtatatatgcaatctgttagcactgaaaatctgaaatatatatttttaaaaatcactctttctgacagtatttaaaatattgcatctctggtggcaaacctgaaaacaatcaagcatcttattaccctagttttcatacctaccccataccccatcactttttatcctttaacatccatccagcatttttgttggtttttttttgttgttggcaaatacacttacttatatcccaaacacaaaacactgacaatactccttggtaaacaaggaaatcccagaacagtccaagcctacacagctttgctcccgaagtgtggcacaggctaaacgacaggcgagaaagaaacaatcgatggcccttattgatgcagtcagaatgctcctgagagtccataactgtttgagaatttgctgatgttatcctgacagaagtttcagcagattttgcaaacaagtatcagagaataagtctttgattgataatttttctatttatttctgccaaggcgactgaaaacacgaaa

SEQ ID NO: 157391 - DNA, 1000 bp, Homo Sapiens
tttttttttttttttttgaaagtcagagaaatttattctttagtatcaaatcaaaccgaggcttttgccatctttggaagaaaagattattcataacccaatgcacaaaggtttaatttgagctgctgcatacgtcaccaaggggacactaggtgaggccttcaaatgattactacaagtctgtggcctgaggttattttaaaattaacaatttcgcatatagcctatatgacaacagagtgtttatattttatacaaatatctgctaaacatgcacacatatactcacacacacatatatatattagatgaaatgttttatttatgtataaaacatatacatataaaacatttatatatatggctttattccacagggcacagtggctgtatagcctcaaaattttaatataaaaaagtgtatgcatatatacacacacaaacatgcacaaattatttaacttattttgggttaaaatatattttgaatgacaatatatggagtagcaaaaacagttaaaatgacttctctttaagagttatccagaaaattaattgtattaggtcaaaatgccctttatttcacaggtctgtaagttaaggctatggttgctctattaccatatgccaatcaatactttaactgcattctgtgacagactgttaatatgaggactgcagacaccaagtggctctcctttgcagtgtttatgaattacatgcatttgagctatcaatttttttttcttttttctcaggtggagtgaagctgacagtacagtagatttggagagtaatacaaatcctttctttctggttagaacacactgccaaaagccatctctttcatctaaggaaaagattaaaaatgcatgttgatatctcctaactatcacacaacttccactattacaatgaaaaatctgttcccctttcattgcctctgaaaactctttgacgagtagatttcaaaaacagagattttaaaaatttgcttgct

SEQ ID NO: 157392 - DNA, 1000 bp, Homo Sapiens
ttttttaaggaagaacatattttaatggttgaaacctgtctttatgaggcgattatgacagcaaaaaatattataatgaataacaatgcatagtctacgctttgtaatatttcatacaataattcctttatcatttacatctcttaatgctagaaaagcattctgaagatgccaagcgtaagttgcaactgagtaaaaaaaaaaaagcaaaatttactcaatttccagaagaggtgcagaacagagaatgaaggtccttaaaatataaaccgctagtgtgctaaaatgatgtccatttgcaggatcagtgacaaaatatttaagcccataaagaaaagagttatacctgctgtatgaaggtattcatagagaaatatgagtcataagccaattatttataaatgtctttcaaaatatttggtgcacatgaaatgcagtatactgatggtcctggagactgttgcagttgaatagggcagctactgggatgatggtgtttcccccggatgaggatgacaggaatgcagggcctaggatttgttgagcatgtacactcttcttctgaattggccacccagaaaccaattattgaatcagaacaacacaaattggtttgtgcttgagccaggtttattttattgttttcgatctgcatgcacaatatgaaatcataaaagcaacaaacatcaccacaccaacactgagtaagatcatttctatcaggccaaggaggtttatttttccagttacttgacttctgaacatgtttgccttctcatcaccaatggtcccagtctcattaagccaaagaataggcacaatatagttcctcttcagattctttaatacttgaattttttctgatggcttgaccaataggttgacctgcagccgttttgcaaattgtaaagtgaatccagttataggttcaatatccaagtatgtcctatgttcttcttcatttgggtttaatccatcaataggttctgaaacatcagga

SEQ ID NO: 157393 - DNA, 1000 bp, Homo Sapiens
ttttttttttttttttttgaagaacactgtattaatgtttatttctaattacaagaaacagaacatcagtcccttatttgtacaaaaatacctgaaagtttacaattaggttcacgagccaaagagctatgtacagaatgaagcaaagcacatggaataaaggttttgtctcttcattaataccttctgcattccctgaaaacgtttatacacgccaggccaatttacagtcactgcagtttgcactgtgacatcacaaatctaccgccagcttgcccgcccccagaaaggcgcagagatcggtcatactgtcaggtattaagtgcagaaaagagaagacaaaacatctaggctgaggcacatgtttcttcaaggtttagcaaacaaaagaacattctggaactctaacacctagtgtaacagagcttacctattaaactctaataaccaaagcatttggcgttttccttctcaacttcgtcctggttgctacatggagtttcatttagaaaagaaaatcacaggcagagatacaaagtcaacaggctccaaaacaaccctgagctgtcccctttacattcatgtcaattaaatacaaaaataaaagtcaaatgtccttccgtccccggtttgcgggacttgttctcaggtggaattcccagccgcccagcgcgaggccagcgagctggggccttaggaagtctgccgccacgtggaggcggtttacattctccaacaattcacttcggcagggaaaatacaaaagactacgtcaaaccagctacatacaaaactgtgaatcagagtcaagcttttgttctccttttaaataaacgcatatttataaatatgaaatactgcaaatacaagctgtctattggagagaggcgtgtgagagagagattatacactgatgggactggtctacgtacacagaaaaaagaaatcctagagttgtttttccttgaaaagggtttacctcgagccagtgaagaggaag

SEQ ID NO: 157394 - DNA, 1000 bp, Homo Sapiens
ttttttttttttttttttttttccaggaaaaacgacgttttattttcataaatactcctgctctcactcacacactgaccccacttctgaccacggacagatggatggacagacgtaagacacccataggaggccccagcagaggccaatgaatgaaggagacacaccgagaactctaggtgccccacagcccctcgctggggccatgggcctctggcattacccttgagcccccacagtccctcagggggcccaatggcaaagggaaacccccaggagtacgggccaggtgaggttcccccagcctggccccctgaggctgtgaccacagggccaatccggaagaaaagcagagtcaaaccacacaccagagtgcaaatagctgggggtgtaggcgtcaccccccagtcactgggttcctatggaggaggcctaagctggtccccagctccagcatggcccccgagttatggctgggccttcccataaggcataagagacaggtggggaagaccccaccccagctggggttggggctgggcctgaggtcctggcccttccccaacagctgtgcttcctccccatgacccaagttcttccaaggctacacagcccctccctctccaggtcccggtgatggagaccccagcggcacaaacccaggcccagcctcctactgggtttggctcagcaggggcggggccggagcaggagggggaagagtcacttgaggcctacaggggtgtggggagaagcaccaggcctgggggtgaatggccatgggcaacaaagggtgtccttggccaccaatgcctccctccaggctggacagtgaccggtccctctgccccttcctctccccagcccctctgttctagaggctaccccaggtttcaggtggggggaactggtccacatcccccatctcgttgtaggtctggtcacccatggtgaaggtgagcttgtagcggaggcgaaccttctccttctgggggttggc

SEQ ID NO: 157395 - DNA, 1000 bp, Homo Sapiens
gctccaccacgcccagctaattttgtatttttagcagagatggggtttctccatgttgaggctggtcttgaactcctgacctcaggcgatccacccacctcagcctcccaaagtgctgggattacaggcgtgagccactgcgccccgctaggagccaacattttaaaatagggagatttaatataaaaatccctattttagctgggcacagtagctcacacctggaatcccagcgccttgggaggccaaagcaggaagattgcttaagactaggagtttgagaccagcttgggcaccaagaccccatctctacaaaaaaaaaatttgtttaaattagctgggtatggtagcacgcacctgtagtccccaggagggtactcaggaggctgaggcaggagggtcacttggagatcacttgagccgggaggtcaaggctgttgtaagctaagatcacatcaatgcactccagcctgggcaacagtgagaccctgtctcaaaaaaaaaaaaaaaatattcccaagttcttgcttcttttgaacaactggcgtgtcaagcaactccaggccccctttaccccagggccacactggctggagccaaccagcagctggcctgttgagaggggtaatctctggtccaccagaggcccactaggcccataacacattctctccacagtagcctggcagctacctgtctttaaagccaagtgccatcctctcttcccttctccacagatgaggagtctgtggtcagagggagatgtatttttcacagatcacgcaacacacaggaagacacagcgagggtttttagattccgagaccagggtgaaaaatctgctctgatccaacaaagcacccccactgtgcttggcagccgatcagccactgtgggacgatgacccaagagtcccggacctcaccctgatgcccccatctggagactctcgggacacagcaggtgtggcgtctgggatgtactttattggacaagtggt

SEQ ID NO: 157396 - DNA, 861 bp, Homo Sapiens
ttttttttttttttttttttttttttttttcttgttattgcttttattattattgcttttattatcattaaaactctagttcttgttttgtctctccgaatgaagaagtatgtattttcattaggccaagtctgcgggaaggctggggcagcagcatgaagtgtttgaggaagtgggttgggtatgtcagtttccatctcctctctgagcctgtcagggtgtttctggagtgcagagcaggagcaccctgctggagaggccaaggcatagctgtgggcaggctcgggcttcagtttttccatgcccaccatttgcccctttgtcctagggtactttgaccagcagggtatgttggtgctcatactccccaccctacatgttcccaggttctgtcccatggcacaggtgatggtctccctctcagctctgggtccatctccctggcctagttctccagcatctgctcacaggttcgagccacatcactgagcttgaggcgggcatagtccactcgcttcagagccatctgacagtccttcctcgaagagtagctggagccctcatggggctgccctgtggccacctgggtgaggtagcggatctgagctgacagctccgcctccacgtgttgcactgaagcggtgaaggccgccgcctgccggtctaggagccgctcgttagttttttccttggacaattctaggatcacagtacctgcattctgaaggatggcgccgatttcccgttcaatgtcttccagagcgcgtagtctctcgttcgccaggctgtaggtagccattatcactctgggaattctcaccaagagtttctcctcagaaacgcgacgcttgttccggaagt

SEQ ID NO: 157397 - DNA, 1000 bp, Homo Sapiens
ttttttttctggttgtcagaactagggttttgtttattaaactggaaattatattaacaatgaaacaaatcacacggggcgggggtcgtcaggaagaggttttgaggctggggtgggaggcagccgggtttggctgcggctgctgtgaaccacaatgtcgtcgtattcatcctgggggcaaaggggaccaggcagaggggctcaggcggctgtcactttgcccaccacccatgtcctcatagagcaccctaagaattaggtctcgcctcaaagcccaagttcccctgctcctggctcaacctcccagtttcctagctctcagaactccattttcttttctttcttttttttttttttttttttaagatggagtctcgctctgttgcccaggctggaatgcagtggcgtgatctaggttcactgcaacctccacctcccaggttcaagcaattctcctacctcagcctcccaagtagctgggattataggcatgcgccaccacgcccagctaatttttgtatttttagtagagacagggtcttgccatgttggccaggctggtctcgaactcctgacctcgtgatctgcctgcctcggcctcccaaagtgctgggattacaggcgtgagccaccgcacctggccagaactccattttcaaggtcatttctacagaccaatttctagccagccgccactccagagtttcggcaactgagctggccctcctccaccccttccctctgcctttacccaaattcctccgcacccatcatccagcaccgcgccttgcccaaggacggatctgtattgctgggttctctgactatatctctccccaccgctggctcgggtcctgccccagcactgccggtgttcaaatcactgccacccaaggttttcttttcgcagtgtgagttctccaattcttgctgcctaaaatcacccccagcgctaccacccacccccgctgtgttcaccaatcactgcgaccaacgcctt

SEQ ID NO: 157398 - DNA, 1000 bp, Homo Sapiens
ttttttttttttgaatgtgttcattcttttattgtccgttgttttaacctgactgaatacaagatcaacaagagcactgtactcctggcaattattacatatgttagaacatggattttgcactgtagacaacatttaacaccagtctatggggtactgcattgctttttataaagttcaaaataaagatttattttcaaacaagtgactttggtttatttcatacattacactttttcttgcagaaaaaaataaaattgtacaactgcataaatataaaattcttccaccatgaaaatggttaaaacattcataaagacacagcaccagcatgtgatgcctccagaaaggaaaaaaggaaagtaaaagaaaatgtataaagcaaattaattagccctgtcactagccaaagtgatgggcagatccagatctcagacacagctttagaacataccggaggacaaggcaagagatgtcaagacagcattcaatacaagcataacacaacccatcacctttttgtgtttttctgtagtgtcacttaaaatttaatttttacatcaaaacgtccctgaaaacggtctttctcactgtacccaatgttctcaccgtacgccttacactctatgcgaatttcagtgtccatggtaagattggtgaactgtacggccagcaggggctgcaggtatttgggctgcaggagtttgccatagtacggataatactgcagaggaaaaccaggggagttgcccagtccaaaatactccacatttccaactttatccttatcttcatctcgcttgccagtgcactgaacgggaaggacatttgggttatacttcatcactgggtaagtctccaaggactcattcttgggaggcttaggtttgaagcctagaactcggttgagctttataataatgcacggtttgccctctttgtagccataagtttcatcatttaatccagagcaatttcccagccattcaagcttgaatct

SEQ ID NO: 157399 - DNA, 939 bp, Homo Sapiens
gacggaagaaaagacagctgggcccagggaaccatcaagatatggagacctgtagtggctccgaatacctggctgcgccgttatttattgtatacaaggcaagagggcagggtaaggagtgtgagtcgtctccaatgataggtaaagtcacgcgagtcacgtgtccaccagacaaggggcgcttcgctatttggtagctgtcactccaaaggactctcctcagcagccaggtaggatgaagcaggggaggatgaggaggaggctgcagggactgagggtggtggccatggctttgggtcagactgtgcctcctgcacttggctccagggtgctgtccatgcccatcaagaagtcctcaagccatcctgtgcagtctcccattgagatgtaatggaaggacatggtcatatccttgtcattctcccacttttctttcatctttctggctccaggatgaaccgttgtccacattctgttttctgagtcaaagaggaggaagatctgtccatcgaaactgagctgccaagatccactgccgtgtccttcggctttctgctcacaagacatcctggcctgcagggtgaggggttccttgggtatgtaattctccagctgaatgtcaagcagttgctctgtaagtatgtccaccacctctctcagtactgggttctgtgctttccaggccgttgtgacatttagtttcttccccaggggactgacgggtgtgactgtcttgctgccacagtcatagtgaagaaaagtcttttcatccacctggccttgaaccgcacaccaccgtggtccaggtctgaacttagggatgacggtgatgtcatagcaaagagagtgagggtcggccagcccggtcctgcaccagctggacagcaggagcagaagcgggaggcgtagaaggaacgcggggctggcggccgctgccat

SEQ ID NO: 157400 - DNA, 1000 bp, Homo Sapiens
ttttttttttttttttttttttatgggggagatggagtttcgctcttgtcacccaggctggagtgcagtggcgtgatctcggctcactgcaacctccgcctcctaggttcaagggattctcctgtctcagcctcctgagttgctgggattacaggcacacgccaccacgcctggctaattttttgtatttttagtagagacaaggtttcaccatattggtcaggctggccttgaactcctgacctcaggtgatccacccgtctcggcctcccaaagtgttgagattataggcgtgaggcaccacgtccagcctacttatgtttttaaataaattgataaaatcatttcaaattattttatgcccaaatacatatgcatgtgatgtgaaatgtggttgccttttcaaatgtgtgacttgacataggcaggggtctcagctttaagaaaaaggggaaaccaagtcctcaacatggtcttgtctttccctgggcccatagctcctatgtagatggtcccagaccaattacaaccggatctgcatgtccagctcctgccggggaccaccccagctgcacctctccagacagcagggacaggctcgggcaccttgtccaaggcagaaagacatcagagctaaggctgcctggattcaaactgtcattctcctgccgagtaaaaagatgaccttgggggcttacttaaccttgctgatctcagacatgcctgcttcaaggggctgtttgtgaagattgcctacctgaaaggaagaaggtggggcaaaattaatccaagcagataatttatttggccaagcttgaggattgcaacccgagagcatagattcaagttgtcctgaatctacaatccaaagagcgcaggtagacgtggatttttaaaaacaagaggcagggagttggctgctacaaagttgtttgccaggaattctcattggtgtacacgaacaacattgaagagcaattggttatacatggttaagcta

SEQ ID NO: 157401 - DNA, 1000 bp, Homo Sapiens
ttttttttttttttttttttttttttttttttatgtacaaaaacattttaattgaaatacctgtataaaaaaatatgatctccagacatctcacttttgaactgaaagaacccccatctgcgatgcctgcacacaccgcattcacacaaacacaggtactgaataaattaaacgctcaggctctggccccaccccagctttcagagcccacaagcagactgtacaaagtcaataatttaaaacccaaaccctgggcacagtgcctggaagtgtcagggtcacccactccccttaagttagccactatacatgttcatcttctgacaggcggggccaggacagacgccaggcacaggaatcagggcctggggtccctggaccacagccaccccctcccctgcctccccactgtcccctggggcttgggagaggcagactgctcagaggaaataacctcaacaaataaattaaacaataaatagccccggtgggccgagggcacctccagggggtcacaccataaataacagagttggcggcgggtacggctcgcgtgggcgggcgggcgcggaggccaggacttgcattgtgtgtgcaggacgtgcccagacgcacaccgcaggactgagggcgggaggtgggcttgggaccctgcgccggcggaaagagctccgggtgggcaggcagatgggaaggccgcctccggacacagcagcacagaggggcgtctggggttcaagtatccacccagggcaggcgggacctcgaccggagcgtctttggacagacagagcttgagaaaaccaagtcccgcgggaccagcgttcaaaaggcactcaaagcgaaggtcaccaggggtcagaggtcactgcttccgcaggaggagacggcccacgcaggaaaaagtcagggtctgggggcgtcccaggtctggccaaggcaggtggtcccctagctcccagtcaggtgcagctcctcacaagctctcgctgctggacgt

SEQ ID NO: 157402 - DNA, 1000 bp, Homo Sapiens
tttttttttttttttttttcttaaattatattatatgaaatacaaaatgtggaaaatttggaaattacagaaaaaccaaagatgaaaattacagtgactttgttccaccatacaaagataaccactcaacattttttagtatgccttccgtcttttttatctgctctacgtatacaagcatacacccatattttaaaaaacaaaattgaaatcacataacatgcactatttttacaaccttttaatattcaaggagcatttttctttcagtcagatgttcttttacatgacttttaatgtctgcgcggtactccaccatctggatggagatacaataatttacttaagcaatcccctattgcaaactttcgttacagcagaaaaggaataaattcccaaccaaaccattgcttcccatttttctccattgcaatgctgggatgaacatcttatcactaactaaatccttaagtattttcttaggataaattcccaaagatagaattcgtaggtcaaatgacatggaggcttttaggccacatgacacatatcacccaactgtcatccaggaagcctgcaccgatgtatactcccacacgcaatgtatgggaatgttttttcagtagtctctttgccaatattgggtcttatttttttctgttatggtttgctaagggaaaaatgcttccagctctatttgcctttctttaattactaatgaagcatactttttttcatggttttatccattcagatttcttttatgaatttcctgtgtgtgtcctttcgcagatggttcttggtccttgaggctgcttatataaacattacaggctgggcggaggtggaagtagggcggtgaagccacagggcaccgcactatggtgccacatctcggaggcagaaagccttgggttgtttgagccttctactcctcaatccagccagtgtctctaatctaaaaccgctccttgctgggccaatctgggcaaaggctctc

SEQ ID NO: 157403 - DNA, 1000 bp, Homo Sapiens
tgcatttttttcctcgccaagaataaaacggaaggtgagaataataaaactaggagactgaagtacataatgcaaaatacatacaaatctacatataatcctaatatgctgagagagcttcttaatgaaaatgatttcattctgagttactgctagtttgatgcaaatgcagtatgtaccatggcccacaaccctgtggtttcaagtaggtagagtatatcttgagaagttattctttgttaagatttatatctcagagtcaagcatgccttggtggcaacaatcattattctcaatgcaggtaattcaaaccaaggaaaagacactgtggaaaactacaaaatatttactctgcctaatgtagcaactcctactgaaaaacatatatgttgcatatttatgagttgtagcccacggttgtggaaaattcactacagaataaaaccaaatactgcatgatacgtttagtatacaacatgccatttctgctcagtacaagaaaaatctactacccagcacccagcagacactaggactaacggcctgatagcagcaatgtggcaggttgttctttttttttttctgctccaaaataaaaattagaatagtagcatcgttgaatatcccaattaaaacccagtccaattcaaaattcatcttcagagctgtcggctaagagcattactcgatcttgcatgctgttgaattctctctgctttcttttatgccttttgaagccatttctccttcggcgattcataaccttaatgctgtagagggctcccaagatgaacaaggctccagctatcccaacccctacaggcaccagcatcccagacatgtaaccagccttgtcttttaatttttccatccagcttctcaccaggccttgattctgctgttcccactcgagggcatctggcacctggtaggtagctccctccaacaggtccatgtttccctcctctaagcctggttcctgggatgtgataccagggag

SEQ ID NO: 157404 - DNA, 1000 bp, Homo Sapiens
ttttttttttttttttatggtgtatgtacttgtcaaactgtttatttgccattcacactgattgtaacactggatttacagaagaaactgtggtacaaagagaggaaggctctggtggctcctgaacagcagcagtccagctgccctgctcaggctgggcacgacgaatgctcccaggagaggggaggcggcccacccgactgtgtaccgtggactgtggacagtgcagtgcctgctctcctgtgctatctagaaacaccttggagagagggttctgggatattctctcatgtcatctggctgaagacaccagcttgacagttcccctttaagaagcattccatacgtttgtaccagggagaaagaagcccacgcacgaattttcaggatgttttgtgaccaaacccaataactgccacacaaatagaccctaggtgggggctggcttaaataggaccacatttcccgttgctttttcagtagatgtgttataccgtcatttcaatttgaaagtttatttttttccattgatttttatacatccagaataacacaaataaccaacagttctttttctttttttgcacattcatttcccctagaacaaaaaaagtgaacttaaaaaaaattggaaccatgctattagctgtttacaaaagtgaataagaagtagctcattttaaagtctaaaataaacaaagtagaaagaagcatttttttccctacagtatttagcaaacctaagaaaaagtccttagaaacacacacaaaaaaattgaaaaaaagttataggcattaacaatattttataatgaagcttaaaatctatttacatacataaatacaattaactttgttgatgcaactcttctggaaggaaaaaaagagccaaatgatcagcctcatcaatactgacctggctaaaaacaaaattcccaacaaacacacaaaaatcccaaaacaaatgtatacgctacggtaaacaaaaaggcattttgtt

SEQ ID NO: 157405 - DNA, 1000 bp, Homo Sapiens
ttttttttttttttttctcattttagaatgttctttattctgacagttgttggacaaatataaggcatgttcacaagtatctgaagttatgtacaaaacacactcattcaacggatgttcctcttctccttttgtacttgctgctgcaaactgatcctcatgcacgttaacacccatagcgctcaattcttatggatatgcagacagtgttttggggaccaccgtggagaatctgtttcaaactaaggcgtgagcttctaagaactaagtcactaagacatcagaactcacagtgaacaaaggcagaggaaggtgaccaaatcagctcataaactcatgactctaagtttccagtggaacaaagaacacattgaaaaacattttttgatccttcatgttggagagaaatggaatgtgaccagaattcatggttctatatttaccactgtctaaaagtcacaaaacaatatctaattttttcatggtttctaatgcagttacagttttgttcttaggtcacagtacaagactgcatgcatactttacacaaatatcaaacacagaacgattgtaacacagatacctcagggttgtctaaagacacagcttctctttttgtggtggggtggggaaggagaatggtggtggccatttccacacacagcctgttgtgtgctcagcacggctggatgcggatcccaagcactcgctgactgactcacagaagaggacagaagctgctaaggaaggcagcggagttcaaagagcaggctccaaccgggggctgggatgacggacacacagcctcgattccagggggaaaaagtcttagtcgatactaattaaaaagtgttaatgatttttgaaaatcagattacatctataaaagatgaaaagcaaacacttaaaacaatctaacgggggaacataaaataataaaaaatcaaatgcagatgggatttcacaaagaggagatttgaatcttttggtctaaatcagc

SEQ ID NO: 157406 - DNA, 1000 bp, Homo Sapiens
aaaattttaaaaaatagtttattttttaaaaccattaaggcaaaactgtaccctgaaattaactctgtacattcatcagtcttacagtaggacatcccaaacacagaagttcccatatattcaggatataaatcaatacatgtggtcagttcagtctcctaataggaaaacgaagacccaagatttttttttaaaattaaggttattttatagccattttctaattgcctggaaccaatcagttcatgtgactagaaaaattactttcgctcttctctgcacatccttgattccggaggtcctggatgcccgctccccccaccaggagagaggtatgaagttggagagaggatgctggggcctgtgtggcagttcctactttggaactgcacctttttagcacaaataagaagctgtaagccccaaaatactgagagtataaggcactcactagtagagcacatgtggagagtctgggcccagtccttgctctgggatctgcctcattctcgcgtgtgtttctgtcaaccctctctcttagggttttagcctaatggcattatgaatcccagagggtgtaaccaatatgcaccaagaagttttgccaagttattggaaacaaggtatggggagactcacggggtctgtggtttctgctttctgctttgggttgggccacctggaggatgccagagaaccggcacgtgcaaagaatttccatcaggacatttccaattgccagcgttctttggtaataacccataggtaacagttccctgaagagcagacagctatttactaaacaagaatagtgaagggtctttagcgaaacactgttgtatgaaatcggtggcctctaatacggagtctaaggcctcgctggtggaagtgactagagatagcctctcttgtgctctgtgcatatacagtgtggtaaagggaacagatttccacattgaaagtaaattctgcatggctcaggagaaatgaagagctgtgt

SEQ ID NO: 157407 - DNA, 1000 bp, Homo Sapiens
tttttttttttttttttttttttcaaatacaatgaacattttattttaaaaaacctaactaactcaccacttggtaaaaggtcaccaaatgtttatgagagaggaaataagaataaaaaagacatttagttctcaggaacaagtgttagagaactgatacacaaccctccagaaatgaggcagagataatagatgaaatgtttcaacctgtgttaaaaaaaaaaaaaaaaaaatgccatcagaggaaaagacaggggcagcacaaggaacagcactgccaattttaagagggcgatcaccctaaccaaaaatcaccactttgttcttggaaggagaatgaacattaaacagaacttaaaatcagagactatttatattaaataactcttcccttaaaaatggcctgaccacagcaatgaatctgtaaacacagagtaatatttttcctacagtaaagagtcactttaatctcaaaagatacttttcactgttctaaatgacaggattttaagcattttttcctatatataatacagcatcacttaaaattttatttaaagacagttgattcaggcctgccttggactggaaagaagtctttaacttagtgggattagtgcttcagcttggtcccaaatattttccccattattgtttctcaaaactcatgtcatagatggttttacagatgatggttttacagatgatgtcaatgctgtttaaaatcactgaagactgagttgggcctggtaatattggagagaactgaaggcaaggatggtttaatccccaactgctaagtattggataagagatgatggccaggagtttaggtcttctcactcaccaaagacacgtgacccataagacagggccctgcttccttgattcatcttccaccaaagtctaaacaggaggttttcactatttaaaaatcttagtaaagcaattgatgacaacttcaaaaaagaaagaaacacagaacatccctaaatacaac

SEQ ID NO: 157408 - DNA, 1000 bp, Homo Sapiens
tttttaactatgcattatggaacctttatttttcatgtgatttctgtacataaggagtatgagagtaacccttttacaaatggaactaatttactagaacaatgacaaaactgaactggtatttgatgtgaatccacaggagtttaagcttcaaatccagccaagaaatttgttacaatctctttcagctttgcatctgattgttctgagatctttccatcagccctgatagtgcccaacaaggcttggtgctggctgacgacatgagacaagaaagcattctcaaactttgtaatcttgctgggctccagtttatcaagatatccccttacacccgcatagataacagccacttgttcttcaatagccatgggagaatactgtccttgcttcagcaactcagttagacgcacgccacgactcaaaagttgttgagtggcagcatcgaggtcagaaccgaactgggcaaaagcagcaacctcacgatactgagccaattccagcttcatggtacctgctacctgcttcatagccctggtttgggcagcggatccgacacgagatacagacagaccaacgttaattgcagggcggatacctttgtagaacaattctgtttccaagaagatctgtccgtcagtgatggaaatgacatttgttggaatgtaagcagacacatcaccagcctgtgtttctatgactggcaaagcagtcaaggagccaccaccaaaagcatcgttcattttggctgctctctccagcaaccgggagtgtaggtagaacacatcaccaggataggcctcacgaccagggggtcggcggagcaacagagacatctgacggtaagcaacagcctgtttggataagtcgtcatagatgatcaaagcatgtttgccattgtctctaaaatactctcccatggaacagccagagtaaggagccaggtactgaagtggggcagcatccgaggccgtagccgacaccacaatggtgtacttca

SEQ ID NO: 157409 - DNA, 1000 bp, Homo Sapiens
ttttttttttttttttttattttaagttgtttattttaagataatttacaaatatcttgctgtcttcagtaattcaaataatggaggaacagtttcttcggacaaaggcagcagtaagctaaaaacaaaatcaactggctgaattttccttctttacctcttgtctgaggatggaacttgattttcattaatccagagctgcagcaccagagataatttcaatcaactcttttgtgatgacagcttggcgggtacggttgaatgtcaatgtcaatttgtcaatcatctcagaagcattcttgctggcattgtccatggctgtcatcctggcactctgctcactagtggtggactccttcagagagtagtagatgatgttggccagattgtattcttggtaattttgcagcacgtcagcatcaatatcgtcatagatactcatgctgtcagcacttgcaacggtattaagggaaaagatgggcttttcttctgtcttataggagatgacagacctgaatttattaaagatgatggagccttcatcaaattcatatccagaatttagtaattcaagggcaatgactgacgcatctccaaaagtggggggctttcttcccacttctttgaatgccaccagaaactggtcagaatgagtcctataaagtatgcctctgattttgtcaccaattccaacaagcataacttctttcccagctgctgttagtgtagcaacctcgcttttcatctgtttagcaatggaggaatgaatagcaccacacagtcctcgatctgaggacacaccaataaggaggtgtttcttcttgtcttcaggccccttgatatcagctttttcatacagagctaaagatcccaatccatatattcgagctggtttcagctctctctcagctcgggcatattttgctgccgctaccattttcatagacttggtaattttctggatgtttttgatggactttagtctcctggtgatatcttt

SEQ ID NO: 157410 - DNA, 788 bp, Homo Sapiens
ttcctttgctcagcaatctttattcagttcttcttgggggtgggatgcctcccttcccatgctcccacccctcccatcccagaactccgttgggctcagtgtcctctgttgagggaaggtcttggtgcccagatgcctactctgcaggagagggaggaaccttgtccctttgcgggagtcgctggtctcttctgttgtggggaagaaggaaggtgggaggggcactgtccaccagcactcagagctccattatgtccccagctggggttgcagggtaggggggactgggggtgtcccccagcctcagcagacggagggcctcagggatgaggctgccaggatagcgccagagaagcagctcagagcaagggctcctgagtgggggcagggctggggagaaggtcatgggggggctgcagtaggggtggtcattgtgcaggctgagttgagagaagtgggtggccatgttctcctcagacagaaactgcttgcgcagaggctcctgctcctcctccaggcgccgcttggtgctcatgggcacagctcctcggagaggggagctggcgtccaggccccaagtcacccccaaggcggcccgcgggaggcgctgggcccctccctgggggcctcgctgcaagggctgctgcaggatcattgggttttggggtcctgcgggtgggatctcggctcctagggttcgggacggtacgcaccagccaccttcgcgccgaaggcggtagggcgccacggagaggaaccgctctaggcacgtaaggcctcgtgaggtt

SEQ ID NO: 157411 - DNA, 1000 bp, Homo Sapiens
ttttttttttttttttttgactaagcaaaatttgtacttgtttaataagaaaatcacttctttaaaaaaatagttctttacatgctgaggttcatctatgcaatgcaagagctgaaaacagattcgagaaaggctgttcctacaagggaaggtcctgaggttacaacgccggcatggccgggaaaacatggctgcagcgatcccagcttcttgctgcccacaggggtggcacatctgggcacacactgtgagctgctcagaggcactctggtgggcagctcccatcgcctcagtcagtgtctccgtccccttcactgccttccaggggactgggcaccttggcgcccgtgccacctgccgtgagagcggtggcactgaagttgtggatgggcaaggtgctcagccactgggccatggagcgttcgtcccgctcggtgccgatgatggtggggtagatgtgctcctccttgaaggctgcgacctttccttcctcctgcgcccagtccagcggctcatgcagcccatcgttgccaaagcgctggttgtacttctcgaagtgcaccctctccaggaccaggccgagtccgggcgccttgggcacgtccaccttctctgtgccccagctgcgctccagcacgctctcaggggcataacccttcacaatggccaccaccaggccgaccatcttccggatctgatgcatcatgaagctctggcccttcaccctgatcaccgcaaactccaggccctcccgcacaaagggttcctcgcagtacatctccaggatgtagcggcaggcactgggatcctgcggccccttctgcgaggtgaaattgtggaagttgtgcgtgcccttgtagcaggccaggagcctgttgacctgctgcagcgtctcggcgctcaggcggtaggtctcatcctgaacgtcccggtccttgtgcgcaaaggcaaacgtgggcagcaggtagcaataggtcctggcatcacatctgttcttgga

SEQ ID NO: 157412 - DNA, 1000 bp, Homo Sapiens
tttttttgttttctccggagaccgatgcaccccacagtcagggtgattttatttctagaaaaggtgacaggtgctgcacgtgggcaggagcaggtcacagtgaggcagggccaggggcatccccctctcaacacaacctaggcgccagcagcctaccggccaggtagagcaagggctggcccatgtagtgagcccagcatggggagacgctgagggcccatggggcgccaaagccagggggcagcagcctccaaacaccgacagcgccacgtcccctgggcaggaaggtggatgccccagggcactctgtcctcctgctggagggcctggcaggctggtctcaagacaccagcccgagggaggcctggcaggtggccagggatagaggcaggggatgggctgagcagggacgcagcccccacctgcctgcaggctccagacacaacagcccaggccccatctgagccctggcgctgcgctggcatgggtgggggctggggaggggcgtgggcatggctggcctcagaagcccttgtccatgctcagggtgcggcgggtcacgtgctccagctcccctgacacgtaggcggccatactgatgcggtattgtgccagcatcttcagcatgagccgcaggctcagccaccactgctcccgtggcatgcggtgctcgaaatcagtgtctttcttgagctcagtgacggggctgaaggccaccgccttcttcttcaggccgatcacgcaggccgagtctggggcattggcgaacacccgtcccttgcggtaaacctcgcgcagcttctccgacaaccacagcatggccttcacccccagcttggtcccatagttccggtcaaagggggttggagcgccaccctgctgcaggtggcccaggacattggtcctgcagtcgaagacgcccttgccctctgatgagtacaggttgtacaggaactccgtggtgtagtagtcatggcacttctcgttccgcagcaccagg

SEQ ID NO: 157413 - DNA, 1000 bp, Homo Sapiens
aactgtaggataacagtgtttttaatatttaagtaacaaaacattcaggttaatactcaatgcatatacaataagatagagcaacaacaacaaaattacaaagcacaatctaactatatggaggctttcaaacaattaaatgttggatagagaatgcgctaattaaaaacccagctgagccacaccgcactacctgagacctgaccagggactttctggtggtagaagggagagctcattgtgccctgtggccttcaactcaaatggatgctcttcaactcaaatccagagagcacttaacaaactccatgctctagattgctcaaccctcctccttgcttttcttttttctttagttgacttgtctgctcatcctttacccaaactgaggcagtgagttccacaaatacttcctctggtttggtttaaatgttgctgtctcagtgagaagggcctctgagctcactgctctgactcttgaacacaacttgttatttaatggggcataatccgttctttccccagacatagtctgttcagcctgaagatccttatgagtattcaccaatccccttggaggtcactttcatatgtactattgatgtgaggactttcctctcaaataataacctaatggccaagttcccctgcaccaatgctgctgtgggtagtttttagagactgctcttacctcagtttcctagggggcctatctggctttggtactgggatggaattctactgtcttggaaggaatttagactttctgctcaaaagggcagtgatgtaagctcagggaaggtgtgtggttgcaaagagctttcagttttgcccaaacatctgatggtccaaccactctaggtgaattcagagaagtgaacagctctcagagtaacaaaactgaccaccagctagttgtgatggcgcacacctgtaattccagctacttgggaggccagggtagaagaattgcttgagtgcaggagtttgaggccagcct

SEQ ID NO: 157414 - DNA, 1000 bp, Homo Sapiens
ttttttttttttttttttaaacatcttattaatacagtatttatttgtcttttctctgtcaaaccctgagccaaccacgttccccaggctgcctggggaggtataggaaaaggaacacacggggccaaccagacgcgggagaactatgggaggtggagacggctccttcacatggcaaagaggatgagaaaggctaccatcagacaaaagagccccatggcctccgagagggcaaagcccagaatggcgtaggagaagagctgttgcttcagagaagggttcctggcataaccaatgatgaggctcccaaacacagttccaatcccagccccagaaccagccaccccaactgtggcagccccagctccaatgaacttggctgctgtgtcgatgtcccttgaaatggcgctggtttggaagctgcggctagagacaagtgaggtaaggggacatgagactgccaagctgctgaggctctcatctgtcagtatctccggtcgtttcagcaccactgcagatagcggacggctcagcagctgtgaggtgctcttgaccaaggagggagtggagacaaacttggagcaggcgaacattttcagggggtgaggagctgtggcaggagagaggatcagctcaggcatcacagcgccgcctgccagggctgtggcggtatccggccggttgctccacctggcgttcgagaggagaaactacagggagcgccgactgcagaaatgaggccaactccgcggagtaagccgatccgtaacgtggactgcggtttggtctgtaccgcgtttgggatctcggacttgcgtcccctttccgagcatgcgcagtcgtcacactgccaaaacaaaactcctactcagaattcagtgttaacatacggtcgggattggggttcagtgcctaaaatgcagcaggaggaagatcttgggagtcctgctttctgtcgcgccgggactctggcatcactggatggcaaaccggctccatg

SEQ ID NO: 157415 - DNA, 1000 bp, Homo Sapiens
ctgctttatacttaggtattccacatttcctctggtgaacctggcttactgttataatcacaaaattattttactgctgacctccagttaattatggaagctgtagcaattactaagggagttaactccaaataaaccctaatactgttttttagtaaactttattgtaccgaacaaaaaaaatgattttgcaatgattttctctcccacaaaagcgtgggtgaaaaccagtaacttataaaaatactttcggactctaataatacatacattcacaccttatcttctgagtatttaaatgggggaggttcacctgaaaaaacccatagttttttgcctcaactgacctgtaaaaaagtccacctatatcaactttctgccaatctggagaagatctgttttctttgatctgacgtcatgtgttcacaagcttctaaaatgtttgccaaaattaaagtctgctggatggtttttgccttaacccatattcttccattcattccaaatactatctccagtggatagagttttcccacttcctgtatgatttcacaatctggagctaatagcctgcacatttggtctgtttcttttagttgcaccttcaaatgacaagtaagacaaagaagctggctcactccctccaacatcaactttgaatatatctccagatttagctgtcactatgccaatcacatggtctccttttactggaacataccgcttctgctgagagtccacccagtaaacaccgccgccgctgccactgccgggctccttgtgacggaggcggccgcacttggtgaccagcaggcggtccccacagcgccgaaggcccggaccgcatacaacgcgcacccgcgagcacgctctagcattcaggctcaacggtcgctccactgcacccccagggccttccgcgtcctcctgttccggcaggagcagctcctcacccgggagcaccacctgacctagtactgtgcgtgcagcgcgcgccctg

SEQ ID NO: 157416 - DNA, 1000 bp, Homo Sapiens
gaaaggtaagtaccattttatttagtgttgtaggaaatgttgggttacttcttaaaaacgaaaccaaagaaattcaaaagtcccaaagaaagaaagcaggaaataataattctataatccaaaaacgttgggcgatccttcagttggaggaagagggcgtcagttaagtagctcacacagtagatatggagacaccatatggagatacggagttaagtttggtggatactaggaattaagttctccacctaaggcaattaatttttcagccttgagagataattagtagttctagaaaaagaaaaaaagttgactgggagaagggtgggagggaggatggtgcgtcatttaacattaaattgcctctctctacagtatgtggctgagcatcatggaccttcctccctctgccccgttgagctcccactgttagcaaaactgagaagcacatgcctgtgtcttcttcataccggcatgtgcacacacacctgtatctccttcatacaggcatatgcagagccctcaccaatcggggtccacagctgttcagtatggcaaagggcagacttactccttcatccactctgctgccttgatgaggtgaacacactggaataagatggagggcaggatacctgccaaagcctgaggaatgagatgatctgaaacaattgggcaaaggctggacatttcaaaaagctgacttccaactgcagtttatgggtatagaatttgatgcttccctcaagtcctgactgctctttctgaggcagccaggctaggccaagaaatgagctgctccagcttctccagagcacagcagcctcccagggcctgtcagcatctgcagcagctggaaggaggtcccagctcttctgagacataggccatttgtaggattctccagtgctccaattcactaatgtctcctaatggctcagaacaggctaaagcttctcccagataacccctcccccaaaactgagtcctcagggacagt

SEQ ID NO: 157417 - DNA, 1000 bp, Homo Sapiens
ttctatacaagccatttatttgaaatgccaactatatgtaggataaagtcagtgttacatgcttatcagtaacagtagaaaaatagaagcagtgaaaacctctgtacaactgtaatggtactcaaaagagaaatgtatcgttttacaatgcttcacacagacgaattcaagtttggaggtacctaaataaaaatactatatatttctttaaaaatcactatgtacaattgaagcgtaaacaagttttacaaagtactggttatgcaggttgtagaaaacacttgcataggacatgaaatcagtttaagaaaaatttctgagcctttagcattgaaggcacttgactttataccagtaacagcacaaccacaagaaacgcagtgttgtagatgattttccacctctctgaagtacagatgtggtgcatacacagcaaggagagttcaggaacctttatctctcagccaccccatcgaagagcaggacttggtaccgcctgcccatgtaacccagatacagttacatgtaggtacagatgatgaagcttccagagcttatctgatctcttagacagaactcacataaacacacaaatacaagaggttattttcaagacacacacttgcaagtaatctttctatagaaatggccacagcattataatattcaaaatatggaagattgacagtctgaggattttctagaggaaaaaaaaatcaaaggacttgccaaaaggataactacataacagatatgacaatctacaggacaaaaagacaacatgtcaccaaatattgttcatacaacagcgttaatggaaaacagtaaaacaccttttagcagtgtgcatgttaagtcttttagtaagattatctgtaatgaggtttgaaagtaaatcacttagtagacaaagtaaaccaccacagaaccaggaatagcacccatcactgctgctttgtcactccagaaagctgaaagtcaaccgaacaatgaaaaaaag

SEQ ID NO: 157418 - DNA, 1000 bp, Homo Sapiens
ttttttttttttttttttactcggagaagtgccaagtttattagagtgagagagtatcaccctcacattgccaccaacagacatagatctcagagacacactgaccttgcaccataattatggtgaatttctaggttagaagataccttagaggtcaccgggctgaccctcccatctgatgtgttaacccctcttaaacatctccctccaggagactgaggtgagattctgtttaacatacggctatcactgaaactctggccagctctgaatctgcaccctggaggcggagaatgtttaagcactataaggcagtagaaggaaagttccttggctcaggccccaatggtccccctttttttaatgatgaaaggttcccagagtccagtgcaaagtccctcgaaatcccccccaccaagcacaaagcacgaaaggaggcctgggccgagggactgggttagctggattttgtccttgagctttgagaaggcctagttctccatccacagaaggcctctcttgcagggttctggggccagcccttgccatgagcagcttgttcttcagctcacgaaactcctctcagagaagacttaggcttgctgttccaccagctgtagtttggcagtcttgactcgatgagcttccttcaggttctgtgcacggacctctgggttggaaatgaactccacctgctgcacaggaaaccagcctcgctccccgtctgagagcctcacgccctccagccagccgtcactgctctgctgagtcaccatcaccacgtcggctttctccagtgccaattcatcattctctcggggcttgtaggctcgaaggcactgtacctggggggagttgtaacactccagaaggtccaactcctctcttggcatggccaaggctgagatccaccgaagcttttcactttgagtctccgtgcggaagaggaactcggcctgggcgccctgagtgttctgccgcagaaagagtcggaacaggt

SEQ ID NO: 157419 - DNA, 1000 bp, Homo Sapiens
accatttgaaactgtgctttttatttatcaatttaaaattatctgttgatgctttcattatacaaaggattcactgttaaatactatagatatagttaaggcataattccagccctcaggaaacttatttggtcaagacaaatttgattaagagacaagctttacaaacaggtaaacagtttgaaataatgcacagtgttacaagtagaaaaatatttattaaagaaaaataagaattatggttatgaagcatgcacatttagccttgtctggaaaaagtttatgcgaaggtggtgcctgaggtcttttacattagataacttcttagtcctctgtcaggttctccacctggaatgccacagctagtttttcttctccaagggtcaaaatgctgctcttccaacaacaagcttaaacactaaacgtaaagcattaaacattcattgttatttgtacttgtcatttatacttgtgtatcttatagacaaaacggtaagcccttaagagcagaaactgcttaaaagtcatttctgtatcactggtgactagtgaggtgtcttgcacagtgaaatgggtgaatgataggaactggagagagggtaagggatctagtctaggctatagggtttgtatgagcaaattccaagatagaaaagatagactaggttagtgcagcatgtgccaaatgttttgaagaatacatagtggacaccatcatcagtctttctgtgtcagaaagacaaacaaaaaaaacaatgaacaaagttatgctattctaggaaagacaaatggccagatctgacttttcaaaactactcacattgtgaaaaaagcaggaacaaatctagtttcaagttcagcatgccgttccctgtttaattcataaaacacaactggcagaagtattacttgaagcaaaacaaaagtaacgtgggaacttgcttatttgctaagccacaatgtatttttccaggaatagcataaatttgccatctttctt

SEQ ID NO: 157420 - DNA, 512 bp, Homo Sapiens
aaagttcagctttttattgaacatgttataaaagaggtttagtcaaaaagaccaaagcccatgtcatcatcagactcctcggattcttctttctttgcttccactttcttctcctcagctggagcagcagcagtggagggggcaggacctcctgctggtgcagcaccagctgctggagcaggtccaccggcccctacattgcagatgaggctcccaatgttgacgttggccagggcctttgcaaacaagccaggccaaaaaggctcaacatttacaccggctgctttaatgagggcattgatcttatcctccgtgactgtcacctcatcgtcgtgcagaatgagggccgagtagatgcaggcgagctcggagacagaggccatggcgcgggcgagtgtagggctggcgctgccggacgcggtgctagtcgccggatgaagtgagggcctcaccccaacgcagccttagcttcctcggaaggaccgagcaccttggcggcagctgaggaaagg

SEQ ID NO: 157421 - DNA, 1000 bp, Homo Sapiens
tgcaagaaaaatgaccacagtctggccaattccagatttcaaactaaattcaaactcatacttaattgagcaaattatgcttatttgaaaataaatgaattaaattcacctcagagaaattatttgtatagacataaatcatgtagcaaataaagtacaaaataaatatcaatgacaaacatattggaatcaacttccctagctgaatttggagtgtgaggaaagatgatactgcaatatacgtattttacatgtcttaggtctctcttatgctatcgaggtaaagccagccatctgagacacgttttctgtttcttttttcttttttttaaatttaaatgaactgtagccatttgatggcagaagtttatctgtgactcagagaaaccacaaaatgttttatcacatcagggtctgtgcttcgtgttcttctcaactttctctcgtcttccaaaacgatggacattaatccaattgtacatctaacaaccgagaagaaaacacccgctggatcttgggcagtatcctgtgtgtggctacaaaacttccaccccagatgttcgtccacaggagatgaagactaggggtgaggaggcttggagagacagtggagaggggcgcactgggagctggaatgtggctgctcctcagggagagctgtgtcaggactgacagttgggcagtcttgcctcccggctagttgtgagcactgtggcggtacggaggcagcaggctgctgacaattttagggctgccgatcttgctctttccaagtttgcctttgctgcgtcgggactgctcatggtcaaactctaagtcctccagcctctgggtcagggcgagtttttgctggatagccattcgtaacaaagtgttcagagtcttcttctcatcctctgcagctgctaactgtctctgcatctcatccaactgggtgacatattcatcacatcttgttgcaaacattgctctcagggatgagaaggttgcagcatcttct

SEQ ID NO: 157422 - DNA, 1000 bp, Homo Sapiens
gtatgccgctgattatttttaatgattttgtgctatggtttgaccacagcattaagaacaagcagaaaaatctgatttcataactaacaaacagcacttagagcaacatctttctttaaaagtattgcaattacagaccttaggtctaagaactacaccattgctcaggtaaaagaggcagatacgtgacaggtggaaatctttttctgtatataactgggaattatgttgaaaagtaagcacgaatgtttgttaaaaaagactttaatgacttttgattatcatagctcacaaacaactattgaaaagttcaaatacagttgtacttttttagtagattgctttataataaaaattaaacgaactaaatgctgtgaatagtattgtacatattttaaaatagccttaaactagacaagtatacaattagcatgatttttgaaagctatgaaatgaaaaatagcaacataccaacaagcacattaaaatgaaccagtatcattaacagtaaagtttaagcctcaattcgtcctgtagaaaggaagcaatgatgtggtaacaaattttagtacctctgagtctagaacattctcatgctcaacagttctcccacaaggttgaacctggggggtgggagctttgtttctgacaacagtgagcctcagttcttaatgatgaatcccaaggggtgcaccctacagtatacgatggaaacaacacgtgggtctagacacgcaggatccacaacaacaaaagtgtcaactttttacggccctttcaaacagatactaaaagggctgacttttttaatccattcagcattaagggttgcattgtagagtcaatttcagtttaaagataatctgtcatttgtttcctggatgttaggggtatgattatagaatctgacattttcaaagtcagaacatacaccatggagcaaataaaaactttggaatttattagactctactctggtggcagaataagctgataatat

SEQ ID NO: 157423 - DNA, 1000 bp, Homo Sapiens
ttttttagctgctcaaagaaaatttattggcactcggtaaagacaaatgccacaaaatgccattgaaacagatatctgaaagcacaaggtgctgatgtagccactagatgaatctgttcggtagcagttgagcccggtgaattaaggagtttacagctgttatttatgtggctcatgatgcttattgagcaatctgcaaaaatagatttcctgtctcacacaggacagggtagatttccagcaagcataatcaaaatctccaagtcttttggtcaaattagagctgccaccatgcacgaggttttacttaaaggtgtttactgatgaataaactcacacttctgtgaactggttcttgcttcttgtgcagctaactctttccacctctctttgttctgctgaatgatgtccaccaggttgttcttgaaactcttcaggtccactgctgcaagggagtagtctggggaataggacccatcactcatggagccttttgtatttgatcgtcttagtgcatcagcaatgtgtaaccccacaatggtggttgagctgcttgccacataggaagaagtttcggcttttgaggcttcctctataagaggaataacaattttctctgttgagtctgtcagaagagaaaatgttggctctactatgaaatcgatgaaacctatttgtgactgggccaccatggttgacttccgatcacaaagtggggaaaatggaagccctaattcagcttctttatctccctgcaggaaaaactcctccattagggccatggtccaccgataatgcagcttccaggatttggctgggtggctgatgtctgctgcgtggagaatcagggacatggttttggctctgtcaatcccttcaggctgctgcaaactgtttcttatatttttaatttgctggaagtgacctgacatgtctgtagataaaaccatttcaatcactaggttccgaagatccctccagtcatctttggataaattta

SEQ ID NO: 157424 - DNA, 1000 bp, Homo Sapiens
tttttaatcaaagtaagcaataatgacaggtttattgaaaatttccagtagagaaaacccactagttttggaataaaagtactcaatgtacgagagcataagtgaatacaaaagattaacagaaggaaaataaaaccaaacatagtacaaaaaaatttaaaaagtttgaaatgaattcaaactgggatgttctttaaatcctccaaatatttaacagagttactaagtttggcaaaaaattcacttgaaaattaaagcctatttctgtactgtaaactccgtaaaaactgcttattaaattcaagcactccatataactggtattgaaacatgtaggcaatttcagaatagcaggaattattcatttgctctcacagttacatgaattaaccagctgcagaactgctttttgaagagtatgagaaaaaagaatgccgagagagaaaaaaatgataaaaatctctaaaaaatggaaacacagcaaaattcaggtatcagtttgtttctttaaagcaacaaactgaatttttacagtatagtctacatttgcagttgtcatttccctcttccccccacccacctcaaatactcctaaattcactagtctaatcaattcttaacttccaaatactctgtacatacatatttagcaaaaagcatatgcctagcattattctgacagcaagtatggtcagcatacaattttagaaagattattatgtatatcatcaagattaacctttacttaaacgaacaaaaccatcgctaaacaaatagttttaaaatattatgaaaacccatgaaaagaagactcaacatgggctctaaacctgataaaacacgtttcagaacaactattaatgctaaacttctgcccaacgatgaccttaaagtgccaaacaccaaagaatctcttaggaccgttttctaatagacaatttgtccctggcttggccatctctcctttaactgtacacaaagtcctgctaaaagtctgaat

SEQ ID NO: 157425 - DNA, 1000 bp, Homo Sapiens
ttttttttttttttcaagcaagcagggggtttaatttctcacacacagagtctggggagcccagtgaggttgcaatggcagctagatgtgtcctccagctctgtcatccttgtcttgagggttctgtgttcacggcccctccaggcatggtttcttcatttaggtaggaacaaaaggccaaaagaacatacaagcccagctctctagaggctccagtcagaactggaccctttaactacaaaggaatcttggatgaattatttttagcggggcttcaggagcaggtagcagagccaaagtgcacactcaggccatcttcctcccaatgtcctccccgggggcatttcctttaggaaatgggagtcagtcctcacaaacacagaaagcagctcaaggccaccacacaggtcgccaaaatccacatcctggtcactgcttcttagctgccgagacaagctgggtccccaacatccctggggagctaggaggagcagaggaccaacacatgaggctgagaggcattctgcttggtgaatttttgaggcagaggctgcccccaccacacaactcactgtcaggggaccttatcctgctcagagagctgctctagaacttaatttacatggctcgttcaggcagacagagttcactgtcttgtattccacagtgtgacagtggtggccccatccctggcaactgagggccgtggcgggtcggggggaggccatcttaaggaagagcaggcagctagcgttccagctttgggaactctggctggaaaaggtggttcacagacgagttctggggcctcaggcggcccgtcatatagacctttccacaggggagggcagaagcaacaggcgggtcccaggagaccccagcaggtcctccaccgtccagccttcacagcaccgggcagaatttacacagagaggatcagtctccaagccaaagtcaggtggaggcatggtggtggtggtagagaaacgctgggctggct

SEQ ID NO: 157426 - DNA, 1000 bp, Homo Sapiens
ttttttttttttttttttttgctctttttaaaaattttatttagaagcctacttgtagaagttagcataattttacagattattagaaaaattcttttctttctgcaaacagttataataggttaggaataatagattagaaatgtactacattacaaaacagtggcctataactatctgtacatttactgtgcaccttaaggaaaagaatttgacagtgtgctgtacttacactgcaggtaacatatttttattctatcacacaaaactgaccagtggtagtgcttgaatttatgaatggccattaaacagaacatttaaactcagatgtatatttagcatgctaaaaagtgaaaaaaatttcaactgaagttctgtggctcatcagttcaaatgtttcatggcattttttttctttaagtgaaaaattttgatactgtaaaacagttttacataataaatgcaaaaagataacattttctaaatttttagaaagaatattcacattcattttgtcatgggtttcacgtggctcttctaaatatattaatcatattaataagacactggtcctatacaatttcaacagtccatcttcaattaaaaactaacaaaaataaacagtatgtaaagagtaacaaaaagtaaattaaatatactaaactcacacaacaggtagaataaaatgaaaccaaattacataatggcaggttatacattttaaagaatctctttccacttagtcaaataagatagaaattgaaatgtaaacttactgatttctgtgggattttccccactggttcaaattggaaaatttgatataaatctaatattttatttctgtacatttaatatgattcaatataatctgcagtctcatgtatggcttatcaataatgccatcatcactgtatgtcaaacaacctcactgcttactagaaatgctaaacactggaaaaaatggaattttatacatttgttttcttaaattttgaca

SEQ ID NO: 157427 - DNA, 494 bp, Homo Sapiens
ttttttttttttttttttggctacggcagacaggcaggcaatcagcacacgtaccagtcatgttttatttggaggttaattcctattaggatatgaaaggattcagcaacgattgagattgtgttcctcacggaggggctcgggccaaggtcgtggggtgggggggtgcagagtgtgtcctcttcagtggtatttgcggagccgctcgtgcttgagatgcttgtaggaaaaggagtagctaaagagcacgtagcatgccagcaccatggtaatccccgagatgctccccttcttcacattgatgtacttgttgtagtaccggtagtaacctctttgaaacgctccgaaaatgccactaggactgaagtcccgcatcaagatccagcttggcagctcccccagtttgacctccagaagtttcttgtccttcactggtacaactgacgccattttggagtcctggtgtccgctgtgccggaccgcgcgagggctgc

SEQ ID NO: 157428 - DNA, 1000 bp, Homo Sapiens
tttttttttatcagcaatgggtttttcaaaaaaccaagctttattattaattttttttggcaccttaattaacaattcatagaatgggtcacttcaggccactcaagagtaccagtgaacactcccccacaaacacaccctgccacaagacatttagcacagaggaacagatccatggccactgcctctgcagtatcaaagagaattagtctttccacaaaacaaattttaacagccaatctctggatttctgtagtggctttagtcaggcatatttatcatcatattagcagtgttcagttcctgcccaacatctttatttaatcccaattcaatgcttatggatgctcagctcatgtttaatgttgcaagccccatcttagcccatcttaattcaaacagaaaagaaacaaaacaaaacaaaaacaaaaaaggtacctgcctggttcatggatccctagccatccagggaccaaattccaaattaggatgacaaagagtttcccttagttcaaaatgacatgtgtttccagtcctaatcccagatgttaatctagccatagtgtcacctgagccttagtccatgtgtatatcacatacttcctctagctttagaatgacttcacaagctgagaaaggcaaaacaaccataacccagacttgcatgtaagtatctggcctcaactattaaataatacttaaaagggaaccttatgagccttagctctttctggaaattcatctgaacaggggtgagggtgggtaggtgggtgcaaatggtgggctccctccagctcagagtgcatttgttaaggtattgccaactttctgaaagacactagagacaagggaggagaccaagtgctaaagaccttttatcacttttgcaaaaaacaagaaaggccaactccatttattttatcacgtggatctcttaaggaactaccaaatctactaagggacctccaagaattttgtgacccatgaaaatctcctctcc

SEQ ID NO: 157429 - DNA, 1000 bp, Homo Sapiens
acatttactcaatgtttatgtaattcagcctttactgtaaaaaaggaaacaacaaaaacaaaaccctattaataaacacaatgcaaacaatgcccgagattatcataaaaacatactagcaagccacaagtaccagagaggggtgaacaggcatatctgctagctctcctcttgcagtcctcagcctcccacaggaggcacaaggtccaaactattcctcaaaaaaaaggacagcctctttatgctgaaataggaactttaaaggaagctcttcttgtagtccaaatggacgtaccttgtggtatggctgtaaggactcgattttacggcttgtgtattcctaactatagctaggcctgtcacctgctgttcctgtgatctcagctttacctagaagagctcctgaaacagaatgggtacacgaaaatctggaatgaatagctatctgctcaaaaacgattgtttaaaaacagatgattggggccgggcgcggtggctcatgcctgtaatcccagcactttgggaggccgaggcgggcggatcacgaggtgaggagatcgagaccatcctgggcaacatggtgaaaccccgtctctactaaaaatacaaaaattagctgggcgtggtgatgccagccactcgggaggctgaggcaggagaatcgtttgaaccagggagtcagaggttgcagcgagccgagactgcgccactgcactccagcctggcgacagagcgagactccgtctcagaacgaacaaagaaacaaacaaaccagatgactgggagactgaagaggaaaaaagatgggagaaaacgtagggaaaggatggggcctcacagactcagctgtgggtgggggggtaaatcattacctcaggagaagcccaaggaattgtccccgaggtgagctttggaaagaaaacaaaaacaaaaacaaaaacaccaaaaaacacctaaatttcctgtattaaagtgacacataatcatgttttctgattct

SEQ ID NO: 157430 - DNA, 1000 bp, Homo Sapiens
tttttccgaaaacatcggatttattaggattagctgtagtgtacactgattcctttagctctaaatggatacatatgtgccccgcagacagtatacacgcagggatgtgactgagccacagtgacatagcaaacccaacagctggcttgtgaagccatcgtgatcccaacaaggtctatgttagcaattggtgaaagaagaagagagtgagatgggacccaggtgggcctggaggtgggatcctgtgggttttcagagcacccaccagtgctccctcggtgagcccagcaccacctggaagtggagggaagctgggtcgctgctggaagggagggaggctgactctctacccctcacctctgcaaggaactgaggcctgtagggttgcggctgtcactggctacaggcggcatctttctgtaaaaagcttttcaggcatgaaacccatttctgtatggactgggctgtgttgacggtggtgcttgggccttgtgtgccaggcctctctgggtcccctccctggcctttgccttcctctcaccttctcgaggccaagctgtgcgagacctggcattccttccaaacctcagttcctccacgcccctgcgctggtgtgactccagagctcagaatgtcagcacggagccgtcagtatcgagaaggaactcaacgcaaggcttcacagctttccaaggacagggaccggctctggagtggccgtgcgtgagatgtcaggcacgctcacacgcagggtcctgtgttggctcctgacccagcagggggacatggtgggcggatgtaccagcccttctggataacatgacagtcccaatttcaggaaagtttttattttaaatattggtgattctttaaccaggaatgcaaatgctactgaagtgctgtgtgtgtctctgtgagagccttcatataaataaattcatgcatctaaagagtccctggtcaggccgcatgctgatattcaatttggggaatggtgatg

SEQ ID NO: 157431 - DNA, 1000 bp, Homo Sapiens
tttttttttttgccaattttaacatagaactttattgaaaacacagactcaaatagagaaccatatatttaaacaacgaatagcagggtagcttacttaggtgacacagttcattgaaaacttaatactgaaaaataccgcaatctggacagcaagacaaatatcaacaaatgtgttttcagttttgatattcatttggcatccacaaaatgatccagctcaaaacaagagtttgacaaagttaacatcagcattaaaaaatataagttacaacaaaaaaacagactgtgaacaccaaagcactactcagggctctttgggaacataaggctgatcagcggcaggtggttaatcatattaactttgttgtcccacctcaggatcattttggttgtctatttgggcttgtagttgcttagctaactcctcaaattcacgaaatgcagaaataagcggctcaagactgaaatcatcatcaattaaggacatctttccactttttataatgttactgatattctgaaacattttaataacaatttgaatattatcatttgtctcttctatgttaaagagacccacaaatattgaaagagctttggcactgaatagtttttttgccacagcaggattttcagacaaattcaatagcattttcagaacgtgaaacttcgttctcgcattggctgtggttaataaggagagaaacccggacatatagttggcaatcagtgtgtgatagtcaatagtcatagtgaggtgtctaagcatccttattccagtcagctgctcaagggaatccacactatgtgcaagggtttcctcacacacttgacatatgaatgtctcaatcatgtttagatttggataaggtggagccatgtgaatcatattttccaaaaaacttgtcctaactctagaggatggataattaagcaaggtttcaataagtgagacaacacctgaatctcgaatgaaatctcgggtaaattgagaagca

SEQ ID NO: 157432 - DNA, 1000 bp, Homo Sapiens
ttttttttttttttttcaggtatcaaggctgtttattgactcttcgcagccagcggctcttcctctgcccctctgggatgcctaatccccgtctcccccctggagccaagtggagtggctctgagcttgaccccaggcgccttcctcttgccaggcttccctgccccgcagccttggccttcctggtttgccacaggggctgttactcctttgattctacatcctcctcgaagtgtgtgaggtaggccatctgagccgaatcgcgcgagccatagagagtgttcatgctgtaggagctgccatggaggcacagggctttggtaacattgactgtgttggccgccaagatgtccgcctgaatgctgtctattttcatgtacaagtcctcagcgttgctctgaggacaggagcaagggggacccggctggggtgccagggcagtctggacttggagttgggcttggcagagggatgttgcaggtggggtgcgggtcggcagcctgaccgaaagggcaggaaagggaacaggaaggtggcgggtggaggagcctacgccagagcagtccctcctgcagctggtggccaggtccactctgcatgtggcgcgctccaggatggggactgtctgaaggggcatcacactgtccgagccgccatctgctcattgcggcggggcaggaagggcgcacttaccaggaagagctggtagagttcctcccccatgcacttgcgcacgtgctccgccaccaaggggaacatctccagcgtgaggctggccagccgctggctgttgctgtggtccgtgttgcccatggcggccattaggccacgcaccacgcgcaggtacagcagctcctcggcgatgctcatgtcgttgcgcgccaggaccctgggccgggggttcgggctggggcgacgccctggggctcacccggcgcacacccccgcccacccggcgcacggagcgctcccggggcccgccggcagcgccaagccaggc

SEQ ID NO: 157433 - DNA, 1000 bp, Homo Sapiens
tacttaaattcaatttcattaatactcttcaaaagactattccaccaaaagtgccttttatatgcttaactgaagatgcgaaagagactatgaatagtcacataatttcgtagtctgatatgggagaggcatacatgatgaaagcacatcttgaacattactgtctttaagcacagaagtaaacatgacttggtcaatggatagagcccacagggaatttgcaaatgagtctgttttttttttgcatgtgacttcagtagtttattaatactaaaggagttataaaagccacaaatatgtaagcaaaatatacactggaaaactcaaatcctttatgtgtattttactgacccttaagtttcactttgactgttttaatatcaactagatttgttttccccctttttactcattcaagtcttaatcttagataatttctcaccattcagtggccactgtgccaataacaaaaacaaaatacacatacctcctttaacaaatatttatagaatatttactatagtaataaagacaataaaaatagacaaactaccagactcatttacactctcctaacctgtggaaggcactactcgttctttttgagtgaagtatttcccagatctctttcctagatcagaaaaaacagtatctgaccacagagtttgatgcttgtgtatgtaaaatgttgccatctagatacttaaatacaggactgtccaacagaaatgcaatgtaagccacgtaaataaaagtaaacagaaacagataaaatcaactttaatagtatatttaacccattatagccaaaatattgtttcaacatgtaatcaatacaaaaaatattttctgttctttttctaccatgtctttaaaatccagtgtattttacatttatagccccactcatttggacactaaattttcattggaaatactttatctgtatttaggtatcataaaatttgcaattggaaaattagattcaaatacccaagtt

SEQ ID NO: 157434 - DNA, 1000 bp, Homo Sapiens
tttttttttttttttttttttttttttcaaggtgcgagagattttaattaacacaaatggctgtgcctagtctttaaatctgtccaaagcaaatggagcgaaagcctgctaattcttcagtgcttcatctggcaatgacctcagaaaaaaagagtctccctcctgtattatcaagctgacttcctttagttccttgttgttctgtgtagatctttgttcccagaattctcacatggtgttcatttctgccagtagtcactctgtccatagttgtaatgcccatagtacatccaacgttcaggtttttctcagaagagctcaaggaaatgctttgtcagatgtctgtctccttggccttctgctttgaagtagcagagtctattccagcaagattaataagattaaacaattctaattccttgggacccaggaagatttaaaaatgcttgcattggctcaaaattctgctgcaaatacagtgataatttcaggtcattggccttctggtagttcttcaaggcttcaattctcagctcaatcactttgccatgaaaatcattctgaaggatgttattttgttcctgatacttgacccattccattttcctctgttgcttttcctttccatcctgcaagtctgccttgttttttgtctgtggtgctttttgttgatcactaagttcttctgcctcgaatgtcttgttccatagcatctccatttccttccgaagcatcttgtttttcctttccaagttctgtttcatctcctctgcttccttaaggagctccatgaccgaggattcctcacaccccttccctgccatgatctgtctcatgatctgaagactcctttgtttttcctccaagttagacattaacttttgaaataagaggttgtttttatcttctagaggtttgagcatctctagcagttcctgcttccttagctttaagtcctcattcaattccttcaagtagttgtcatctattttagaacttc

SEQ ID NO: 157435 - DNA, 1000 bp, Homo Sapiens
tggtgagagctagggcaggaagagggggagaccccctaaaaaactagcaagaggcacacaaggatgtctggaaggaagagctcccttgactgtggggaggacctggggcaattgcttttcttctgtgttctctctctctgatgttgctttggatgccagatgctgataagggtgtcagcgtgcctgattgtttctgcttcagcagtcaagcagggcaggtatgagaagcaataaagcagaaacaggagattcaaagtcaaaatgacaaggtccttaaagcattttcaggcccctattttgagtcattttagcttttcccccaatttatcttccgcttcaattaaatggctcttcagctttctatggtggcctttatagccttctgtggtccaccatccctacgttgccaacactttgtatggtttagtttcttctcaaaaaatgctccatcgtagacttcagagaattgggtccccctgtgagagaaggtaggctgggcacaactgacttttttcatccctaacagtggctttgtgggtgagtgtccagactcgggtggtttgtgttgtgagtactgtaggtggatgggaggcgtccttagaagtagagtgtccagtctttgtttcctcaaacaggaagaaaagttagaagtaaagagagggtgggccttcccattggggtctaagctgtacccttttcatgcagtttgtctttgggatgggttgacttctggtcttctcaaggaggggaagtggccaagctgtctttgattcagctctttgggaacacctggacttggaaagggccttggctcctgaaagctagctctgtgtttgacctcacctaataaggctgttactcccaatcccaaggatagacagtgggaggggtgaattcttcatactgagcttcaaaagccacttggcctgagtcttcagttaaggacgaagactgagactcagcttcctggagacttggctctggggctaagctggtcctt

SEQ ID NO: 157436 - DNA, 1000 bp, Homo Sapiens
tggagggaaaggatgcactttcatgtttaacaaaataaattaaatatacggggcttcagctcaaactctacataaaattacagagatctggggccaccacgacagtggggtggggggtggtgtctggcctggacggggtgtggtcatcagcatggctgaaagaccaggcgggtcccgggccccaggagagaccacagtccctgcaacccagtcttccttccatcattattaatattatcttcatttcttaaatataaataccaaggccccttctctgtgtcagggggagaatgcagtggggatgagccactagccatgggctccagcctctcaggcttggggctgctgtgcccccaaccccagcccacagcagtaggggactcctgggcacccaaggcaggtggcaaaaatagccgccaaggccaggggacagaggcggggatggaggcggggactgaggcggggacagaggcgggcagagttgggggagtgacggtggagcagggaaagtccctcatcaactatgagcctcacggcacacgtactgcaggcttcacggcacaccctcccaaaagcacgtcagtctgcgtgtgtccaggcagcatatctgcacctgtgtgtgcatgtgtgtccggaagtgtgtgcccaggcagcatatctgcatgtgtgcgtgcgtgtgtatccggacagcatatctgcacgtgtgtgcatgtccagacagcatatctgtgcacatgtgtgtgtccaggcaatatctgcacgtgtgtgagtgttgaggcagcattatctgtgtgtgtgtccaggcagcatatctgcgtgcgtgtgtgtgtccggacagcatatctgtgcatgcgtgtgtgtgtccggacagcatgtctgcgtgtgtgtgtgactagacagcatatctgcgtgtgtccaggcagcatatctgcgcctgtgcacgtgtgtctggaagtgtgtgtccaggcagcatatctgcatgtgtgtgcgtgtccagaca

SEQ ID NO: 157437 - DNA, 1000 bp, Homo Sapiens
ttttttttttttttttttacagaatagtagtgtaaatagtttattatttgctcatatgccatgaaaagaccagaaaagtaacatgaattgcttttataaaacattctaatattgctaagaagcaggcccattaatagacaaacagaaaagaacatgccaacgttgtctatttgtagattaataaataggcaattattttaatatacatatatgtcagcattgaactttggaaaacagctgctttgtagtggaagtccaacttggtcaaattgctatttttaatcgaagtgaatgttgagtccacagaaagacaaaatcgtggcatgttctttttaaagtaaagtacacatttatgggaatgtgcccgcaggtggcagtttaatctttctgtaaataggtacactaaagtgaaatgtggtaggtaacttgttccctaaactgtccttatagttaaatatatatattaaaaaaaactataagttaaaataacattcagattgtatagcataggctgatgcattttaaaacaatatttacaatattacccagaggcttaggtgggaattaaagagaagtgtaaaaaccataaaaaactgcaccgattttatagcaaaatatctgtacatttaaaaagatcatataactacacatccaaggaaaagggaccttcaccaaggggttcacataagcacaacataaaataggaacttcagcggttaaatactatacaataaactttacaattaatatattgatgtaccaagaagataagccagaagcagaatgtatattatgaaaagtacaaatttagcttcagtccagtttttgactttggaatggatcaagtgccctgccagagaggaaggaaaataacagtggcttagtgggccatctagtcccattacgtattatttaagcttaataccatgttaatacttttcagcaacttaaactgcaattctccataagtagtctgggaaatgcatgaaaaacttagcct

SEQ ID NO: 157438 - DNA, 1000 bp, Homo Sapiens
tttttttttttttttttgaacttgaatccaaatgatttatttcagttttggctcttaagccacttccattgggaagaagaaactcccaggagtgacctttgagagctgagggttctcggggtggggcagtgtgaggggctgggccagtgtgaggggcaaagtccaacgggcatcccactcctgcggcctgggctttcccagctgatggggtgggggacacccatttctttagtcccagcccccagggaacggagcagagggcagagggagtgggctgcacccaccaggaagcctgggagtgcccttgctgggggctggggcagaggcagcccggcaggccctcagggaggctggggctgggggcaggggtacggttgtgcccgggtacccttaatgtttgagctgatgggggagtcagttgtccttgacagtcagggaaaggggccaaagggggctctagactttcccagcctggaatgacagaaagtgctggaaggcggggttagtgggagacaggccttcaggaccagcctcgggcaggcagcttggcattctcccaggcctggtctatggactcagaggtgcctgggcccagatctgcccgggagggcagtggctgggcttggcctggcaggggctgaatggacgaggtcagctggggccggtgagaggctggggaccctcagggtgagagcagcagctggatgagcttctggaactcctcgcggtgctcatagatgtagacctcggtctcccagagggcgttgaccagcactgtgtcactgacctcatccagcatgatgtccgtccccagctgggggttcaatctgaagtactggatgccgaccatctcgcaccaggcccgtgcccggtccacagcccgcccgtctggatccgtgcaacagtccaccaccatcttgcccagttccttggccccaaaaacagtcttggccagctcccaggggttgctgggacggaagacatccacacaggtcacagg

SEQ ID NO: 157439 - DNA, 945 bp, Homo Sapiens
ttagctcatcttggttgccacaggcattccaagaactcttttcaatgcagtttttacctctttgttcctcagactgtagacaagaggattaagtaagggagtaaccactgtgtaggtcactgccaccaactgatccttgtctgaggcagacttggacttgggccgcagatagatgatagaggcacagccatagtggacaaagaccacagtgagatgtgaggcacaggtgacaaaggccttcttgccctcagctgaggggatcttcaggatggtgttaactatgaagccataggatatgagaattaacagaaaaggcaccataattaccaggatgctgaggctaaataaagccagctctttcacatgggtgtcagtgcaggctaacttgataacaggtgccatgtcacagaaatagtggttaaccctgttggggccacaaaaacgcatgtcacaaatgaggttggtggccaccaaagcaataaagaaacctgtggctcctgagagagaaatcaactccaaccccagccttttgtttatgatgagtgtgtacctcagagggtgacaaattgctacatagcgatcatatcccatcacagcaatgaggaggcagttggtgcaagcaaagccaaggaaaaagaacagctgggtggcacaggccatgaaggagatggtcttggtgtctgagagcaggtggaccagcagctgagggatgatgacaaaagtgtagcaggactcagaaaatgaaaggatgaatagaaagccatacatgggagtgtggagagtccagctgaagcgaataacggccatgatggtcacattggccaccaggattgtcaagtataggagaagaaagatgacaaaaagcagcagctggagctcccccaggctggagaaacccaccaggatgaactgtgtaaccacagtggttttgttgaaacctcgcat

SEQ ID NO: 157440 - DNA, 1000 bp, Homo Sapiens
tttttttttttttttttttgtcataatacttttttttattacaatatccaaaaaactgggtatgcaagtttaggggatctcaagaccccttcttcaatcgtaggaatgtgccatctcaagacgttatatttaaactataaagaagttcaaatgtaaaggaaaaagaaaatgcaatttcttcataaacattctgtgtgtctcttactaccaatcacatactcttttgtaaaccctgaaaaatttccctgtaaataatatatatatatatagtgtgtgtgtgtgtgtgtgtgcacgtgtgtgtgtgtataaagtgttggtagctcccttccccaaagatcagctgttttccttaatcatctgtattagtgtcaacaaacggctacagatacatatttctttgagaattaaatacataattgtgagattcaaacaagccgaagggcaagaggaaaaagcactatgtggatggcacatttggggtaaattaccaaaacatctgtctttctgagtcaccggttccctcttttgcagactgcctttccaggaaattctttattgcaagcacagccccaaaggcactgggcagtctcctcactgccatcgcacccggtggttccagtattgctatcagcaaacgtatcggctccctgcacagtccgggagccatgtaagggcacaggacatgggcgagggctgctaggactggggccatcgcacctgctctgcccagcacgctgagtgcccaggacacgggcgctgccgctgggtggccttaggctcgctcctgcgctcacaggtgccctgcgtctttttaaagaggggttccatgagcgggaacgagttgaatgcacgagcgccacttccgatggaaaaggaataatgtgaactcgccctgctcctcccctcctctaaagctggccggccgggtgggctcgagtgtgggtgtgaggcctggatggcaaatgggagacgaaccgaccaagcgacctgaacataaaga

SEQ ID NO: 157441 - DNA, 1000 bp, Homo Sapiens
tttttttttttttttttttttttcctggcagaggccacacagtttggcacatttataaaagatgtaaaacagagtggggtgggggagacagaagcatgaggtgtctaggttggcatgacagacaccagacatgcaccgtgcatttaaacccctccccaactcccttcccaacccagcccagagcagcacccccccacccccatctcctgccactgccctcaggctggtggctttacagaggccaggggaccagggtgagggatgctacagtttgccccatagacaaggacaagaacccttagatgagtctggctgcgaggcagggcgatgggaaggaaggtagcccctccgcggagacatgcaggaggtggcccatgggaccttggcagggagtgaagaggtggggctgagcctggagaaaccctaccagtcagaaatctaaggcaagggtcccagcgtcccctccaagcctgcccacccccacacacatacacacagacacacgggcaacacactcacaaccctgagcacaccccaatggggttcacaccccgagttcctcaggagcctcttgggagcttgggagggggctttcctctcaggccaagactcgcctgagacaatcctcccttctagtgaccaggccagccctctccaggctggggagagggacagccaaagccaggaggctgagtggcagcctagcaggcctcctcgagctggcagagctggtgactgcagagtctagacagacagatatggctatacccgcactggggggcctgagcaggctgtcagaggtccccgggacccatactcatagtccgcatctgtgggtgaggccatgaaggagctcagggagctcccggtctgccggtctcggaagctctggatatagctcggggagaggacgtctccattgaagcgtttgatgggcactggcctgcgccgataagcaggatctggtggcccaggcctgggaggagcccggggacctctg

SEQ ID NO: 157442 - DNA, 1000 bp, Homo Sapiens
ttttttccagattataaataatttcatttttaattctctgtacaaaacttctcaatctatgaaaataaagtttgcaaaaggcaaagtagcacaggagcctcaggtcaggaggctaagcacgctgacctacactatgtacacgtctctctcccacgacggagagagaggcctctggggcagagccctgcttgcagtccgggaaagccaagttggcttccgtcagcacagggaaatgtacccctctcttccctgtacacaggaggaaaaaagccactaaggtgcctgcagagcaaggaggggggccccccaaaatggctcggcccctgcagtgccccgatcggccaccagaggtcagcaccatcatggccgccggtcttagggtcaagatcgcgcccctcgggccttccaccgcgaaggcacacagcagccgcaggtcgaactgtggaggccagagtctcttgcactgccttcggccttcaaagcttcgacgcaggacagaagctgcacgggaccaaagtggctagagacaggggtgctgaggccggggacacggggtctagctggaagtgacagtggtcccaccgcccaggcgcatgagcatctgctgacagtcgtgcagcagccggcgatcgccaagcttctcgagtgtgcgcgccgcctcagccagcatgcccacgcgctgcccgggcgccgacaggaagccggggggcaggtagcaggaggccagcagcaaggcctccgcgtgctcccgccgcgtgggccgcggctccagctccgccaccgcgcctcctttgccaccggggcctgcccgccgcctcagactgcggtcgaggagctggtgtgtccgtgtggggctggcccccgccatcagccgggccgtggcctcatgtaggaacaccctccgcatggcgggccggaagctctgtgccagccgcctcaggctgctcaggtcccgttggaagccacgcagctcaagggcggaagcctggggcctgctgct

SEQ ID NO: 157443 - DNA, 1000 bp, Homo Sapiens
tttttttttttttttgctgtgtttattttccaaacaattttattgaaatgtgccaagagtacatgggcagcacaaatgtatgaacaggaaaaaaaaaaatcacatgtacaataattttttaaaagtgaaggttaatcttgggagataacagttcccctctccctccccctgcagatttccagcgtttccattaaggttaagtaagcctctacaaacctagcatttaaaaaaaaaaaaaaaaaaaaaaaaaaggaatacaagatcttttgcaaataacaaaaacaaaaaatggcataaaggaaagagaaatgtcttcctgctcagatgggactcttcctaggcacctaattaggaggcgtgctgagcagtggagaaacacaacttcagagtgtaagggtatggaccatttgggtttttcatctggtaatggttcaggaagcccagagtctccagggcatcgctcttggattcccactccagcagtccagaggagctgcgctcacttttgcctgagaatactttcacagaagatggccgcttcactcccagctcatcgcagatctcaaagaagttctcctcggtcacctccagcggggcgttgaagaagtgcagcacgttgctggggtgctggatgcggttcttggctgcctgctctggggtggagaaccgattgttccgggattcactgaagtctttgtaactgcaagacccgtcttccaacccgtatgactgaccaggcatgatggctggctgcttggagacacagacattcagcttctgcccaaacatgaagttgttgttgaggtgggtaatggcccggtctacagcgtagccatcagccatctccaccatggcggcccccggcttgcttttcatgaatttcaccttctccacattgccatataagcagaagacattgaagactcggtcacagttcatcttagattgatccaagccatagaccatgagcacagggctgtcggcgtgagggccatactcg

SEQ ID NO: 157444 - DNA, 1000 bp, Homo Sapiens
gacattccccatcatccagaaatgggttttattctcagccgagggacagcaggactggtagaaactgtcaggccacacggctgcctgcacagcacccccatgcttggtagggggtgggagggatggcgggggctggctgtccacaggccgggcatgacaaggaggctcactggaggtggcacactttggagtgggatgtcgggggacagcgttctctggtagttgggccacaagactccacaaggatagcacagtgactgattcccagcgctagaggcgaggcggttggccatgtgtaggtgtgtatatatatgagtatttatagatatttatagaacagggcaagggcataccacagaaggggcacaagttttcaccaacggtcacacctgaatgtatcagctcaccactacaacagattaagtcacagatgaagggggctggctttggggctgggggagccactgtcaagtcacagaacagccgtccaggcaggcttggaaagggaggtctccgagaagaggagggatctgtttagaggtcgaaggggggcctggggctctcaggacgggatggacttgcctgacccgatcggcatggctgacgctcctcaggggtcactgatagtgattctggggaccccgggcggggcgcggttggggcgcgagggcacctgagggggagggccgaaagggtcaggggaagcccccggcctggagggcacggggggcgccccccccagggcggacccagcaggcggaggcccaggagcagggccccgcgacccgggccgggctgggggcacggcgggggctcggcgctgcggcgtggggctggacgtgggcgacctgcgtccggccggtacgctctgcacctgcagccaggagtcgtccacgggcgggggcatgggcgtgctgacggtggtcgtgttgatgtcgccgatgatgctgagcgcctccttcagtgcgtggtacatgcgcagcatctcgtcgcgccgctg

SEQ ID NO: 157445 - DNA, 1000 bp, Homo Sapiens
ttttttttttttttttttgataatgataataaacaagacatttatttttcatactcttttgggggaaaggaaaaaaatcagtttgccctacccaatgatggtctttctgaaagattctccattcattccatagaactggataggttgcttcatctcagaggattttgtactcttaattcataaagagaacttctcttcaggaaagtggtcaaagggtgagcctctgtgagcagcttcgctggtgcacagccagactccctctctgggtgaagctttttccacactggccgcacagatagggtgtctctcctgtgtggattttgccatgcagaatacaattccccctggtgtggaaactcttcctgcactgggtacaggcatagggcttcaggcctgtgtggactctgatgtgaacaattaagcttcctttctgactgaaggcttttccacactgatcacatctatagggcttctcaccactgtgaactctcctgtgaacagcaaggttactctgattcctgaagcttctctgacaaatagcacactcgtagggtttctgtccagtgtggagtctctcgtggacagcgagactacctcgttgactgaagcttttcccacactccttgcactgataaggcttctctcccgtgtgtatccgttgatgtgtaacaagattgcctttggccctgaagctttttccacagtgggtgcactcaaaaggcttttgaccagtgtggattctctcatgtaacgttagactacctttttgccggaaggattttccacactcctggcactcatagaccctttgtctcactccaggtgaatcttcctgtagtgtcttcgaatctggggatttttgttccagcttctctcttctgaaagaattttggatatcccagcttgaggatcctgtagcctcagagtggtcatatttgtggtgggcttcagtcatcacattgaagaacgctacattctgggcatatcttccatgacagtc

SEQ ID NO: 157446 - DNA, 1000 bp, Homo Sapiens
ttttttttttttttttttgagttatttacatttttaatgtaattttaaaatcctggatcccaagaagtcttggcttgaatttgcttttcttcataacaaacaattctgtctcccacttgaaattccatattgtcttcatctaaactgagaccacaatccattcccgttttgacaattgaaatgtcatctttatggtgtttcaatgaggttaatgagcccttccaaattacatgtccattacgggttagtttaaattttttttgtttttctaactgtcccttttggactctgcagccagccacaggaacttttttcttcccttctgttacagagaaggtagctagtatagatgcctcacctactgggtgctcttccacagcacagggtaatctgctgctcagttcctcttgcaaatcttcaacaagacggtaaattattttgtgaagtttaatttttactcctttttttgcagctgactgttggataacattgcctgcattcacattaaagccatatataacaccatcaaatgtttcagcaaggttaacatcatttgcacttacatcacccactccaaaatgtactaattctagttcacactcgtgtgaagcatcataggtatctataatgttcaaaatggcctcaacagaaccatcaacatcacctttaataatcacagaaagtacatttgaatctctttcccttttctcttttggctttaagggtatttgttcttttctttctaaaaaccgtagaattgatctcttcttccacagtagatggccatacttctcacgggctttctgatgtgcttctttgtgttcctttcgcttttcttctattattttcagatcctcctgacctttctcctgttcttgttcatatttcctccagtcaacaacttcacgtgcccttggctcagattctacttcaagaatttcttctcctgcagaaggaaggtctctccagcctgtaattcccactggcatgctgggatagg

SEQ ID NO: 157447 - DNA, 1000 bp, Homo Sapiens
ccactggtacaaaatctttatgtaagtataaaataaataatatgaatattaattaataacaacaacacaacagcggcaacaatattaataataacaagagctctcccattggcccacggccttcctccagcttttctcttctgcttcacacaactttgtgagatagctgttttcatagctgggaaaactgaggcccagagaggtcggcacactggcctgaggtcacacagcaagtctgtagggctgggagccgagggaagggcaaaggggtcccccggatccagccagggcagagagggggatttcaggtttaggtccagaggagagtgcctccccacagtctggcagtcattagcagggtgatggtgaggctgagatgggcagggccaggctgaggagcagccccactgcggtactggacatccaggtctgggtggttacagccacttttagtacagcaggagacatcaatgtggttcatgctgaaggcgtcacccaggtgggcatgttggcacattgaggcggttgcacagcctcttaccatatagctttggtttttcggttcgtgagtgccggtggctaccagacattgattcatggggcctcggcagtcaatgaggaaagtctcttcagaggagcatccatgggtgctgttccccttgcagctgtaacactggcggccattctgcggcagattttcaagctccaggacttcttcaccttcctggatccagtgggtcaccacatccaggcactgttcttcagggctgcggcactgcaggctctggtgccggcccctctcacagctcatgtctgatgagccacaggaaatgcattcgaggtaacggcttcgggaataggtgacagcccggccagagttgccctggttgcacaagtctaacccacacacaacctcggtaaggctggtgatcttcaagccagtccgatagctcagggtcctgttggtcttctctgagtgggtacagcttttctccaccag

SEQ ID NO: 157448 - DNA, 1000 bp, Homo Sapiens
cttttttgagacggagtcttgctctgccgcccaggctggagtgcagtggcacgatttcggctcactgcaacctctgcctcccaggttcaagtgattctcctgcctcagcctcctgagtagctgtgattataggcacgtgccaaaacacccagctaattttttgtatttttggtagagattgggtttcaccatgttggccaggctggtctcgaactcctgacctcaagtgatctgcctgcctcagcctcgcaaagtgctgggattacaggtgtgagccactgcgcccggcctggaggatcttttaaaaaattttatttatttgagacagggtctctgtcacccaggctggagtgcagtggcacaatcacgcctcatggcagccttgacctctccaggctcaggtaatcctcccacctcagcctgttgaatagctgggacctccgacacctgccaccacacccagctaatttttgtatatttagtagagacggagtttcgtcatgttggttgggctggcctcaaactcctgaccttaagtgacctgctcaccttggcctcccgaagtgctgggattacaggtgtgagtcattgtgcctggctaggggctgaaggatcttgaggtatccttgggattttagggaagcccaaagtgctttagggccatgggggtccctaccagtgccacccatcttcagcctctccctgctcctcgcttctgacccttgctagtggtattggcagttacactgttgtcctgctgagcgcccacctctggaactctctcatgtgggtgctgcttctgcccaggcccctcctctccccattctctgggacacggttagggaaaatgcctctcttcctttctccttccctgggacacaggatcctaatgagattcaggctgaaaaaaagccaatttatagaacagatgggtggtgagtcaaggggaggaaaggtcattcttaataggagccagggttccttccatcccctctctgag

SEQ ID NO: 157449 - DNA, 1000 bp, Homo Sapiens
ttttttttttaagagttaatatttgaaaacttttattttctcaaatgagcaccaacacagattggaaatatgacagaaacaatgcacttttctctaatactgaatcactatgtacaaatacaggaaaaggtgaagacaaattatttgaaaacaattacctttgttatagaagcaaagtgacctgaaaaatgccaccaaagaaaacaaaaacccaaacccaacaaatacagtttgtaaacacaagcataaatagacagattctgtattggaagatagtctctgcaggttgggaaagggaaccgactcccactgtcaccgaaatgttatacaaaaacatatgcgcagatagaatttggtaacatgagaatagctttcatagtttcttctaggctttaccttttctgccagatttcataactattttaatttttaaaaaagtaaatatctctttcctctatctagataactagcatattttctcatttgaggcagattcctttaaaatatgtaagttgattgtgttcaagatttgatttctcagcctctttctaaacctgaggcaatctgaccttaaaaaaaaaaagctgtttaccactaagatatgtgtattataatattaatgttcttttaatccaaaccagttaatgtttaacatgatgtggcttctaaaacagctggagccctgcgatacgtgattaatacactctcatctcagttagaagcacagatttgactctgctccatcttcacaaacaacacatctcctttacagtctgtaaaaactgagcacgcaaagcaagaaaaaggagcaaacccgcaacagctccatactcaaaacaaatcctcgtgggttctgctgttggtccactcagaaacagaaacaaccagagagaaagagaagaaaaactttatgcgcccgaggtgtaaactgtagttaaagtgtccccactcgagaaaacaggaggcacaatcgaaagtgctttttacacacgtgtgcgcg

SEQ ID NO: 157450 - DNA, 1000 bp, Homo Sapiens
ttttttttttttttttttttttttttttttctctgagacggtgtttattggctccttagaaatcagagtcagtaacaactgtacagaggcccccatcttccgtgcgcccacccttccccactcccgcccggtggccccggaaaaagcagcttcatgtgggcacagggagagactcctctgggattcacagtaaccagaaacaaaaacggaaataaattaagtgatgtggggtaggggagtaaaagggagtcatgttccccaaatcagtgcatgaagaggggtaccagggcctggagctgggctcccacgactcctcccatcagacggagtgctgggcctccggacatggagctgtgccacttgccacctacatctgagagcctgcctacatgctcctgcgcggctgccaagctccagcacctgcgcatgccacgagtcacgggaatgaggtggaggcagtcgccactcagagtccatgggcccgcggcccgactgtgcttgtagtagtggtgtctcacccctcattccacccgtaccagcagggcacagaggagtgtggcccccttctccttagtgacccactcaagttcggctggactgaagtgagggtcaggaggttctccaagggcagcggaagggggtcccggggtgtaggagccagggcgcacacacacctggaacgccacctgagcctggtgcgtccgctgggatttggggtcccggaattgcactttggaggccagggtctccgccccagcatattgaagggagggggaaagcagcacaggagggggctgctcctcccgaggaggtgcacagttctcgccaggctcctcgaaccctaccccaggttctcccttcaaaggacggcagctcaggatggaggcagtacctgctcccagctcccctcggtccagcactctccgtacagcggcaacattgctcccgtgatatgccatgtgccacttcttggttagtgtcccagcctccaggcggggat

SEQ ID NO: 157451 - DNA, 1000 bp, Homo Sapiens
ttttttttttttttttttaagatcttacattttgcttttatttttaaaaagtaaacttctaaaaatcttatacactggtatgtgtacccatgagtagagctatattatgctttcttgtctaattacagggataaatgaaatatgattgctaatagtacatgtatttccattcaagtatatatcctaacataacccaatataaccatttaatatattctctaatacaatattattaattttaaagtaaaatggttctgatcattactggcctcctctaagagtacatgacaagtacttaagtagtgggtagaactgaaagtgaaattccttaatgtctacaattcctggagccctctgcatgcaagtcttcaaaattatggtgacttaagtcccacaccacctgttttcccagcagtcctgcaacaggagcacttattcctatttcatagtgtggtctggtggagcagagcagtgtggtccccaggaagggatgagctgctttggctttccagagcactcactggctacatgaccttgggtattccacctcgttttaaaaatggggcagataatcctcaggagattgcaagaagaatcagaaaagctgtgcagagcagctttgtattataaacactaggacgctacctacatgctgcaggtcctaaactagtgcagtgccaagcagcacactgggcctgtggccactgatgttcacaaggcctcatggtcaatggagcttctgcatctgagcgagccagtacagatattcattcaggagctccaggaaactggatttgctctctagagggcagctcaaagggcccattcactcacaatccacccaacggcattcctggcctccggtcacagcctcagccacggaagtcctgcagggtttgccagtctgtgggggtgagtgccctaacaccatgaactgcccactgctcccagaaagaaagaagaacttggaatatgagactccccaggtctcctgaccctc

SEQ ID NO: 157452 - DNA, 1000 bp, Homo Sapiens
gaaattcacagacaagaaatactttaattaaatattgtgtaaaatgaacatttttatacagttaaatatctgaaaaaatgtacagataaaacaatcttattgtagggtctttaacagtaaaatctaccatttagtgaagtgctcagtcttgagacagtgaagtgatgtgggcattgactacttaacctaaaacacaaaccaagtgagggcatggggaagctggcaggcgttctcagtgcgtccatgtgagctcttttgtagatcaaacccttactcgtacaaaataaaatggaggcaatttagttccaaagtgacttctcaggctttcccatgtagctagaccttgtcaaccatcacaaagccagactgtgacctgctgactcctggggacattctgtttatttaattttgtccctagaatgaacactttgtaagttgtgcattgttgatttttgtcaagaaggtattttaaagtccctcctttttgttttaaattcgatttctgctgcagtttgcaaaatgtttgctgtgccgtgtctgcaaagcacttagtgcaaaggagaaagaaaaaaaaaaaaacacctgacacttttggtctcactgtgggtttggcactaagaggcacgatatctgaaggaggtcattccagttttaaaagtacggacagtgctgttggaactgaccacaaaaatgtattgttaaaaaaaaattgaaaaccagcagtgatttgggtccccctgaaacctctgtgaatcggaggtgggcccaggagggtgcaggacgcagcagaaatagtcccagaaaggagagacgggtcatgcagcgggcttgtgcttttttgtgtgtgtttgtgtgttttacaccatacatctccaaatgaagtatttattaacaattgtagtgtaagcctgtgataaaatagcacaaaggttctttaaagaagttcacttttaaggcatcagaaaagttaatgtggcaaacattttaattaaaacatcag

SEQ ID NO: 157453 - DNA, 1000 bp, Homo Sapiens
ttttttttttttttttttcaagaacagacggggaaagcgttttatttgcaaagaataaaccattaatttacacaaacttacatcccagtttatatacattatatatagtttatatacacagtatctcacactggatgctgacccccaaaagcagcattgggcctgctccaggccattctcacaacaaagcccaccccccaatcccagctggaggaatatagaaatgacacaccccgagccctcctggagagagtcctgaaatggattaaaagacaaaaatcagctttcttctttgtgctcacagggcctagaggagcctccaggcagggatgggtcctgaggcagcattacagtagcctaaggacttgctggcactgggccagtcttgtgctttccagtccagaggctagagctgggagaatgccttgggaggaggaagagttctgatgaaggctgcagctactctctccctgcctggccaggctcctgaagggggccaagtacttccagcctggagtttgtgggtggaagaaagaagatggccatgtgggacaggaactgctttaccccctcactctgctgagtctggaggttggtgcttgctcaccacttggggcaggtcatcttccctctctgggcctcagtttctacataagtaacagggtggaatgtaggttgggctagattccctctaagggcctttttagctctaaatttctctgaatctatttgcatccacaggaagttacataaacacatacactcatacatggatcaaagtctttgtttacctccagggttcctagctctttcctgttcagcaaaagaaatttggctcaggatggatgaagggggaaataggcaaatactacttctccaggtaaccagtagccgagcagcctccgccagctgtcttttgtgccagcttggctgttgaagcccaagtaactggcagagactcctgccatgccattctccttcaaacctctgtcatctgctt

SEQ ID NO: 157454 - DNA, 938 bp, Homo Sapiens
ttttttttttttttgcctaaacacatctttatttcacttagtggtttcagtggatataaatgttcatttaacagttattattgaagatggctgactagatgacgccaggtgaaacagctcccactgagggactgagacgactcgtgtgcttttaacagatcttcagagtgaaggtgctgagagtggacagagggaagacacaactcattggtgtccaaaggaatatccattagaatatcagtggatttctcagcagaaaccttgtaggccataagagaatgaaatgatgtagtcaaagtcctggtgcccgtcctgggagtcagagtggagtgcggcttctcccggttccaatggctgctgcttaggtgacggctgcccaaggtgactggtgatggggctgtcagggtcgaggccaccgaggctgcttagggtgccagaggtgccaggggtgcccgagccgccaaggcgggactcggctccacgttcccgccgcaactccgagcgcaactctaggtagcagcacaacgtcagcaggtggagggccagcgagaggccaaagaaacccaggaagagcaggcagctgttcccttcgcccgcccgggcaggggccccgccacacccgcagccctggctccctcgctcccgcggcgctgctgcaggcaggagttccctgcgctccacctccgggtagcccatggcctccggagacacccactctcttgaggcccgggagccgctgcgtctgcctcagccgttcacgacctctgacaggcggctactgtcctgccatcggctgggggctgcagggacccgttcctgcgcgacagtggctgggcgggacggagcagggagcagccgcatgtgcagctctactccgaggggtgggaaagggaggaggaggggcgggagagaggggaggctcggcccgccgagggaat

SEQ ID NO: 157455 - DNA, 1000 bp, Homo Sapiens
tttttttagcagtagcaaaaccatttattaagtgcagaacaaaggctgggtccttgtgctgctcccagctctttggttacaaataggtttgggcccacagaggacggaccttgcccccttcatgcctcccaggagacacctagcccctgctctgtgcatgcgggtgggctgggcccccaggggtgcaaggatggagtagctgaggaggctccgggagaggagtcgggaggacgcctagtgggacgtggcgggggtggggcagggtgcggtcaagtttggaagaactgttggtccatgtgggtgctaagggttccgctggtggtcagtgtccggctcacaaactcctgggtcacatgccgggtgagggagccgcctgcctccaggtgctgggcccccagggtcagcccatccactaggaagggctcggtggcgctggtgtgggtggtggtgatgctgctgtactcgctttgcagcgggtgctggaagagcccggcacggctgcccagctgcgggaagggtcctccatcctgggactctatggtgatgatgccctcgcgctctggcccgaagccctcagtggtcctggcctgcaccttgaacttgtagggcacgttctcgctgaggcccggcacggtcagccggctctcggggctgtctccatccacccggaatgcggtggctggccctcctccttgggccatctcacaggtcaccaggtagccgacgatatccccattgggcctccgtggccgctcccagctcagctgcagcgagtctgggctcagggcagtgaacaccagcgggcctggggcactgggagtgctcaaagtgaaggcggagcctggcaggggacacagtgggctctgcgggtgcacctgggattcaatggtgatgacaccctcacgctctcggccccagccttcctggctctgggcccgcacgcggaacacgtaggagtggttgggcaggaggtcttccaccaccaccgaggtctgggcag

SEQ ID NO: 157456 - DNA, 1000 bp, Homo Sapiens
tttaaaagcttctaccatgaacatttatttttgttaaagcagattataaattttcatcagtacaaatatatataacttacatttgattgtaaggccaacgttcaaaagtaaaaatgagatgagctctcttattgttatccgaggtcaagaggctgcaactgtcaaggggatgttctcaccaaaagggggtttgggggaagaggacacacacaaagctaataaaaccagaatccccatccccacaaaactcatgggaacaaaatttaaaggataaaacaaaacccaccaagacccatattacaaaccaatatggtaacctgtgttcccttctatggtatgattatgtcatgttaccttagtgttaaaggattaacataaggaaactgcagcaatatataaaagatatattctctatagagcatatttcgattgattccattaaaataatgacattagaattccatcataggtttaaaaccaggacaatactgcttttcctttatttaaaaaaaactacaacctagtgactgtattggtcataagcatgattgttgttgcaatgtgctacttacaatgaatgactgacagaaaacaagctagggatcctgtctgcagcttccagcctttcctctttttatttcagtaggcatcaatgataaatcaatcttatgtacaatttcttacaactagcccctttacctttggcaagattacttacaactcatacaacttcttaatatctgagaactatttaaaatattctaaatgcataaaaataaagattttggcttttgatatatataatatttattctgttactcaaaatggaagctcaacttctcccccaaaatatagctctgctgggcagttgctgatatgccctcctgggaattctggcagcatagcgtgcctctctgttccccagcctgagcacaaaccactcttcttgatctctaatacaggccactactgacaggaggcaggtgaatggcctgaaaaa

SEQ ID NO: 157457 - DNA, 1000 bp, Homo Sapiens; identical to SEQ ID NO: 157456

SEQ ID NO: 157458 - DNA, 1000 bp, Homo Sapiens
tttatgatccagcactgaagctcttggtatttattcaaatgaattaaaaacatgcccatagaaaaacctgcacaaagatgtttacaacagctttattcataattgccaaaacttggaaaccaccaagaagtctttcaataggtgaatggataaactattcatctagacaatggagtattattcagtgctaaaaataaatgcactattaagccatgaaatgacatggaggaaccttaattgcatattattaagtgaaagaagccagtctgaaaaggctacatactatatgattccaatatgacattctagaaaaggaagaactatggcgacagtaaaaagtggttgccaaagaaagatcatgtcctttgcaggaacatggatggggctggaggccattatccttaacaaactaacataggaacaggaaaccaaatattccatgttctcacaagtgggagtgaaataacatggacacaaaggaataacatactggggcctacctgagggtggagggtgggaaaagggacaggaccagaaaagtaactattgggtactaggcttagtacctgggtcactaaataatctgtataacaaacccccttgtcacgagtttacctgcacatgtaccccctgaacctaattttttttttaaagtggttgccaggggattagggaagaaagggatgaacaggtgaagcatagagaagttttagggcagtgaaactattctgtatgattctataattgtagatatcatcatacatttgtctaagcccatacaatgtacaacaccagagtgaatcttcatgtaaactatggactttgggtgataatgatgtgtcaatggaggtttattgattgtaacaaatgtaccactctggtgtgggatactgatagtggtgggaggctatgcatgtgtgagggcaggggatatatgagaaatttctttttgtccacttttgctgtgaacctacaactgatttaaaaaaataattattta

SEQ ID NO: 157459 - DNA, 1000 bp, Homo Sapiens
tttttttttttttttgagattgctcacaatttttaatatgtatacttgattgttaaaataacatgctgtcttcagaaaactgaaatttttgccttcttcaaaactaatctgttctttattaacaaaaagccattgtgcacactttggcaaaagtctgaaaattagtgagataatatctgtaaaaatttgactagaatttttatctaaaattataactttttaattaatgagattataaatagttgagtaggaagctactaggagacacaaaagagaatttcaagtattttatttattgtaaatgttgtatttgtatatgtatatatacacaaaccaaaaacacttttaaaaaactaatgaaattcagttaataaacctattattaaactttattatgaaaggttatgaaaaaatttttagtgcttaaaattttacgatccataccatatctgccatagtaaaaattcatttttaacacagctaagatgataactcatagataccacagtaacttttttgtaggtatttaagaaaaccatttcttccttctttctccagcctaatttctatgaaaatattagtgtctaatattttacatgacccagcacaccttagtaaatgtaaacattctaaatgatttaatagcaagctttgaaagttcagattttaaagtgctcatgaaattctcaagtggttttgtaaaagttcaattgattgaagattttataattgctcctgctttattatagccatgaatcaacatatttgattagatctattaaatacttcgtaccttaaagcttataatttatttaaaatagtgctattgtgaacgaatgtcatgctttcacatgattcataatagaaattctaatattaaattaatttctctaagagttattacctatagttgaaaggtcataaaaatggaagcgagtaactgcgtgaatacacacacactcttttagtatattttgtactttcaaaataatatgacatc

SEQ ID NO: 157460 - DNA, 1000 bp, Homo Sapiens
tagctgttttccaaaatatatttgcaaatggacaaagtgggtgtggagaaggaccccccacacttgcctccccatacaacacccattctccccctgggtctttatttcatctttaaaaaaacaaaacaaaaaaagtaaaaactaaacagaaaagcactctgtacaaagcctggatactgacaccattgctgttccttcctcatggggggcagtactaggtttcagggacagtctctgaatgggtcgcttttgttcttagacactcccttagggccgcttcccctctcaggccagcttccctaaggctttcagtacccaggatctggaaggaaagggccaagctgggctgtggcatccactggaccctagagtctcattgggcagggcctcagaatccacaaagactccccagtgctgttcctcttccaacgaggctggaccccttccagccatctgggaactcaagcaggaaggaaggttccttaggacaggttcctggcatggcaggttcccctggaagtggtcggagggccctcccacctcttgatgccagcagaagtcaggccttccctgctccctgaggacacatcagggcttctgcggacttggccttctggttcacactggcacgtccagacccaggtactctgggttctctgccgtaggtgtccctttgaaggtgctgggtggagccccccgctctggtgggtcctggtcccagtaatagaggttgtcgaaggctgggctgaaggcaggaggagggtggggctgaggggcagctcctccctggggtgtcaagtactcggggttctccacggcacccccaaaggcaaaaacgtctttgacgaccccattcttccctggggagagagtcttgggcctttccagagtggcaccagcaggtcgggcagcaggcagagggccctctcggggcgaagggggctggggccgaacatctggctggttcacatattcaggctgggggctgcaggtcaggggg

SEQ ID NO: 157461 - DNA, 1000 bp, Homo Sapiens
ttttttttttttttttttttccatcattgaaaatgtttattaatttttatgtaattcttctaatcctaaaagactgaaaacattgctctttatagtttgcgggaatttttaatgccctaaacagaaactccaacagcctcatggcttgctttaaagcagagcctgaatacagggggaacacaggtttgcctgagggttaagaagcatccaagagtaagggaagactgggtaagcaaagcaaaataaaggggcaaacaaaacaaaccacacagcacaagacaccctagcaaaggcttcccacagtgcccccacacgggtaggcacccaggccttttgttcttataaaatatgtttttattggtctttgcagtctcacgtcacaaaataacaaaatgaacacaaggcagatagagctggttggggagcacagacatgtggtggccttgaaagcagcttttccccttaagtctctagaacctgccatgagtaattaagacagtctttgaggatggggctgtcaggtgggggcgtttcagcaggtgccgacgagcgccttacaaacgactggctgaacacctttcctcccaggcctctctgccccagcatcactcaatctgctcagtcctcgactgctgcaggggaatgcgtgctcagagagagatgacacttctgaggtggcccccagctctgggtgcagaggagccggggtggggtattcaggccacacttccctgtggccacaggggaaaggaccaggggaaaaaatggggcagggatggccagctaacaaggggcctttggctttgtcctttgtactggggagtgaatttgcgcatctcagcagggagggtctcgtagaactgatgttcccttgggaccaggggcttgcacagggttgtctcattgaagcggagcacgcatgagtgccccccgacctggtggacaaagggctccagaaggacgcctttggcgcggggctccacatccatggccctgaagg

SEQ ID NO: 157462 - DNA, 1000 bp, Homo Sapiens
tttttttagaggaatgacaggaactttattctaatattgcatgaaatgtttttgaagtagaaatgattatctgacaaaaaaactccttacactttgaccatctaaaaggttattttctataaaattatataaatatttccatgtccatatatgaacacaacgtttatggtcctaaaagttttaaaaatcaacagaattagattctttagataatgatcagcctagtcagaaaacaacattccccaagcaagcataaagagaggacacaattactgacggacagcggaaatgtgctgcgggctggagtgggggggctgaaaacaaggaaaacacaatcaacagcgcgcttggattttataaaataaaaccctgcaaaaactatatgtaaaaagtgaaactaaccatccaaggtgaaggtcagatgacctcctgaatcaagtgcattctgagttgaaacaatgaatagatcacctggtagatttgttcttccaggaggcaaggaccttttcctcgtttattcttatcaggaaaacttctattcaaggtagaaggacaataagagtgaagccttcacagctgacagacactgcttgtccattggctatgtcatcctgggcaaagtcctcagcctcttggagcctgtttccttgcctgtaaaatgtggacagtaatagctaccctgctggttggttgggaggattagacgtaatctatcaaaagtgctgctaaaactgcccctggcaagtaatggacaatgaaaaaaatcactaaaactattttgtgtgggagaaaagggtttcacccagaatttaatccaactctactagtttgctcccaaagggttctgtcaatcacaaccaacttcagagtctaaaactgaacccgttctgctgctctgagagccactgccaggtaaacagatgctcccttcggggtgctgtggccactccttttctgaagcccctgggcagcgtgcagaatgcaggctcagggaggctgt

SEQ ID NO: 157463 - DNA, 1000 bp, Homo Sapiens
ttttttttttttttttttttttttttttttttagcgtttatcgaaggctttactggcaagcaggaaatgtggggaagtgtggatgttagctctgagattggggtgtggtcagacatctggccaggtccatctctgaccggctcctggtcaacccccagggagctggaagagtgccagcgaaaccacgagggtgatgaggacgacagccacgtccgggcccagcaggcctgcattgaggccaagcacgtgagggtgccccccacccacatgtgggtctgtgtgtgtgcacgtggcgtgggagcatccccgccttgtgttgggtctgtgccccatggaggagggaggtggggtgtctcccccaagcacagcactcaactcttcacaggacaagtacatggcggacatggacgagcttttttctcaggtggatgagaagaggaaggtgagtgtgtgtcgcttgctgccgatggctggcaggtgctcgtgcagtgccccttttcagcctctgaccgtgtgcccctgtgccacagaagcgagacatccccgactacctgtgtggcaagatcagctttgagctgatgcgggagccgtgcatcacgcccagtggcatcacctacgaccgcaaggacatcgaggagcacctgcaggtgaggcctgcggctgggggagcagggccagtggcatggtcctgggccccatgactgccctctgcccttcttgtcactgcagcgtgtgggtcattttgaccccgtgacccggagccccctgacccaggaacagctcatccccaacttggctatgaaggaggttattgacgcattcatctctgagaatggctgggtggaggactactgaggttccctgccctacctggcgtcctggtccaggggagccctgggcagaagcccccggcccctatacatagtttatgttcctggccaccccgaccgcttcccccaagttctgctgttggactctggactgtttcccctctcagcat

SEQ ID NO: 157464 - DNA, 930 bp, Homo Sapiens
tttttttttttttttttttttttttttcagaagcaaaccatcacaaatagcactttttatttgccactatttgaagtctgaactttaaacagattcttggactggtggttcatatccatcagctcgttcaactttagcacctgtctcgtccccagtggcttttccagaactactgccttcaccatgaagctccatgagctttcccaattcaaacttgggcttcttcagcatttttacttttctaacgaagacatcatggagaggataaatagattggcaagccttttctatgtcttttccaatgctgtctggaatcaatttattgaccacttctttcaagtcatttgtctgcacctctcgggtcatgatttccatcatcttcttccggatttggcggacctgttggtgctgagcataagaggtcttccgtatctgattgttgcgttttttagtaaaaccaacacagaacagacgaagcaagtaaccatcggtagtcttgacatcaacgtgagcttcaatcattgtctgccattttttgaccatggaacacattttgtcacgggtaagatccatgccatggaagttagtcaggcagtttttaccctgaacatcttcagtaatcagcttgaattttctaaatgcaacttcatcattctgcaaatcagcaagactcacttcaaacacacgacccttgagaccatcagatgcaattttggttccttgggtcctggtgacgagcgtctttccaatatttcttatattgaacatagcaggtgctttcacatcataccaatctttcttagaaaatggatcaaccactttcttcttggctccctttttgccgcctttcgtaaggcgcttgttcttgccaaccgccatggtgctggtcagagagccaaaagggcggaagtgggagtcgcgcgagaactt

SEQ ID NO: 157465 - DNA, 1000 bp, Homo Sapiens
ccgtttctagcggctttatttttgacatacacgacctcagacacaagcggggcgggcagcgctaggtgtacagaaaggagcgggctcggaccgagcaccccctcccccgcacgcaaggtccaaagcaaacgcaactgcggcgggagccaccggcgcaggcctcgggcggtggagacaggcttagcttccaggaaagagcagcagagagcgattcccagaacgcgagggcttacagttccccgagaagcaaaagaaccaggtccttcccagggttctccattattttttcctcattaaaatatattttaagtcagcacaaacataaccaaattgtacagctttaaagttcaaagcagtctgcatctagggaacgtgcatgtggtcaggagtgagcgcgtgagcagcggctacgtaactagcacaggtgccaggccccttgatgggaatccccatgctcactgcacaggcccagagagggaggggtggggtccctggcaagttgctacactggtccccttcctcttttaagcaccacccgtcccaccccaccctcaggggctggtgtcagcttggcccagggaagcactatagagagggctcacctgagcaccccaacccatgatcccatgttgcactttgttcccaagttggggctaagaaggctgggcctggcagggacagggctctctggcatggggcagggagaaagcagtggcagacagtatgcacacacacttgcccactaccattaaataacagggctgggtctccaggtgtccaaagtgctgaaaagaggggccctgctctaagggagcagcagcaaatcccaggccttcccactctttgtagtgccaggaaaatactgaatgtaagtgggtgcagctttgctcgctgtgaggagcagcagaatgcggcagcctctcctcccagaatcgaggaatctgggaggcacaggacatccccaaaaggtcccaaacagttccagaccctatgtcttacc

SEQ ID NO: 157466 - DNA, 1000 bp, Homo Sapiens
ggatttagtaactgttgttgtttattctatgtatttttgcaggaggcctgaggtgggctgtgttctcctcctatggcagggcttcactctcctcctcctccgttggggcttcgctgtccccagggtccctgttgaggatcttgtcctcattagatgacttcttgtgcagcttccatgcatgattatttattcttgtggcactgagaggtttgtacatatctttaaaccagagcggctgtccaaatgaggaaagtccatcctgactctcccttcgcgaagagcatcccctccgtggcagaaatctgaaaatgccccttgagaatccttcttcatcttcttgtaatgaccttcggtgacaacatatcacaatgaggcagaaaagtataatcaaaatcgttagtattccagtaacaattaatgccaagatgagtttgtcagtatagccatatcctggaacttcttttttgagctcaagcgacttctctttctgttcactctgggcttctgtgctctcattaatgtagttctcaatcttccattggtccgtatcccattctatcttggatgcctttacttcctgctgcccactgagaagcttcatcaggtggcctgtcctggagatgagcttggcacaggtcacttgcacatgggccccagagcagtccatcttcaaggtccggataacatgagcaatgagccttctcacattgttgttggggataagggactgtagctgctgggttagctgaatttcaaactgatcacctggggacgagagcaatgggtaattgaagcttttgggctcgggggacaggtcagtgcccacgttgttgtattcccattttgtctcagtttgtttaacagttggccctaagttgaatgcagtcccagcggaatctgcctcatgaggatgattgtagtttgtgttttcagagatggttccttctggcatgttagtgttttccataaaatcattttcttcaaaggcatttcttgcagt

SEQ ID NO: 157467 - DNA, 1000 bp, Homo Sapiens
tttttttttttttaatttgccagatattcttttaatgagaattataaaagaccaaaaacattttttgcaaactgcctttttaaacaaatgatttgcttttaattacaaatactgtgcatgacgatgccttcttctgcaaaaccaataaatacaagaacaaattttaaaatatgtgatttgtccaagatatctgaaaaaggaaacaaaagcctgatttgcagtatttataaaaatcaatttattctctaacctttcaaagattaagctcaaaggtgtgactcatctgtagaagacagaaagagagcaccttatagatgctttaaatagcttttgattatttttccgatgtcacctttactttctggaactcatggcttcacaaaatagctgattttaaaatatttctaatgaactgattaatgggggaaaagaaaatattgaacacgttataaattttttaccataaacaaatatgcatatcaaaagatactaactttaaaatggtacaaaaaaaggaaaaacctgaattacagaaaagtcaaatttatttaatgaaaaactaaaattaataaaaattagcaaatacacacaaaaaaagcacacagcagcactatgtattgactcacaaagggaaaagcagtggcccatgaccactcaagatggcttgtcagttaaaggaaaaaaacccaaacacgcacacacccacgcaggcacacactcccacgcaaaaacaaactttttcaacaatacaatcaatctacaacaaacacaaaactcagaattattttacaatgcttcctttcttaatacaaaagatgcccatcttgggtgtatatacatatattttttcagtggtttactgttgacttatttttaaatatattagtgttactacatgcaactgtttcctgtatttaacagcctttctttttatttaccttcatgtgtctagcttccacctaccgaaagagttttaggttggcagacagatgggtgcctt

SEQ ID NO: 157468 - DNA, 1000 bp, Homo Sapiens
tttttcataattaaagactgaattctttatttggaatgaaatattcttgtcttacacagtagataataaaaaggaataacgtatacacattattaatcataaatgaaaagagaaaaccagtgcaaaatgcggcagacagtacatctctaacatattgcaaaggctgataccgggacaacactacttcagaaaggtgccagcaaaatggtgaatgtgtgaaaacaaagaaaaatattgtgtttatagggtgcagaaagtttcccagaaactgacagagcccatgcatctctgcacccagaatacacttagagaataatttaaccatgacaatagggactacagaaaatggtatattgtgtataaacctggcctctctaatcgcctccttatgtgcctggaacatcttgacgttgttcatgttcgactgccaatatttcacatatcctccgtggtctgctgtcaacatccacatgtcattatgtgaccacgtcatggccctcactgggctgtcgtgagcctgtaatattgtttcaaaattgaaagtgagtccattccacagggtaaactccccactagaagctccagtgaccaagcgtcttccttctggagtccacctaacaacaaatacaggacactttactttatttgttgatgtccgaacaaattttgttgttactgcattcataggattattcaacattcctataggtgggaccagatcattgtaataacctgcatcaggctgaattgcccgcatatctctctggtctctttgccatattctgttctccaaatacttaattacagatggattgtagtctatggtttttcggttcacagcttttctcattcgttttccatcaaaagtaagctgttgcattgcttgctgttgtgcaaaatcaggtcgcttataaaacagctgtcgaggtgcctggtgctggaaccttggcatatggaaaaaacgaggaggagaaccaatttctgtagccatggtgatgtt

SEQ ID NO: 157469 - DNA, 1000 bp, Homo Sapiens
gtgcttcaactcaacagtttattagaaaggccatggacagatgaaccctgagtaaccagctgaggaagaaatgaaaaaagaccctgtccctcatggcccgcccactggcctcctgtgaactctgtcctgttgccaaccccagatgaagtcagccaaaaagtgctttccacatcctctctctggggctgcccagcctgaccgcaggggatccactggcagagccaaggtggatgctggtgcctgaagctggaagccagcaggacatgagacccctcctgtagcaggaagtggttctagaactcccagcagaacagaacggaaaaggagctgattggggatagaatgagttctgctaaacagccagatgctctgagagaggtgacactggactgtctcggaggtgtgtgcagatggctacaggtggccaatcgtgggggtccccagggtgggatcccaaagctgctctaaagagtctcagagagccccagcgtgactcagttcccctcctggggccgcaatggctgtttctgctcccagaaaggcaaatggatcttgtaaaaatccatggtggttgatgccatttttttcataaaaaaaagtttatacagtgaatcgctttccaccagcagagcctgagccgagaagagtccatcctggggaaggagaaggcacttctcacaccctcattaggggtgttctgggctggcagcttccccggcccctcgggttccagctccctctggccctgtggttccggcctgctccctctgggaagcatgctgactgtgtcaagctagcaccgccctgtggcccgaatgccctggtgcctcacagggtggtggatggcaacttcctcactcgccgctgggccaggatggatgactcgatgggcttcagctggggggtgggcttggagctgttgagtgcggagtacgtggcagccatggctcccttcacaagctgtaggtcctggtgggacagctggctttggggaagcttg

SEQ ID NO: 157470 - DNA, 977 bp, Homo Sapiens
ttttttttttttttttttttttgctattaatcctgccacaatatttttaattacgtacaaagatctgacatgtcacccagggacccatttcacccactgctctgtttggccgccagtcttttgtctctctcttcagcaatggtgaggcggataccctttcctcggggaagagaaatccatggtttgttgcccttgccaataacaaaaatgttggaaagtcgagtggcaaagctgttgccattggcatctttcacgtgaaccacgtcaaaagatccagggtgcctctctctgttggtgatcacaccaattcttcctaggttagcacctccagtcaccatacacaggttaccagtgtcgaacttgatgaaatcagtaatcttgccagtctccaaatcaatctgaatggtatcattcaccttgatgaggggatcggggtagcggatggtgcgggcatcatgagtcaccagatgagggattccttttgtgcccacaaagatctttctcactttgcacaacttgtacttggcctcctcaggtgtaatacgatgtacagcaaagcgacccttggtgtcatagatcagacggaaattctctcccgtcttgtcaatgctgatgacatccatgaatccagcagggtaggttatatcagttcggaccttgccatcgattttaatgaaccgctgcatgcaaatcttctttacttcatctcctgtcagggcatacttaagtctgttcctcaggaaaatgatgagggggagacactctctcaacttgtggggaccggtggatggacgaggagcaaacacaccggtcaatttatccagcatccaatgctttggagctgccacccgcttcagatgcttcttgggaccacgagccatggctgcgttaggcaaggaaagaggacctccgtcttccggtgcgcgtagaaattggggctggagactgcgcgcgccggattttcagctgctccgccc

SEQ ID NO: 157471 - DNA, 1000 bp, Homo Sapiens
tttttttttagctttattcttttattcaaagtttattaaaatacaagaacaaattgtataagcacacatagcactcagcaccaatatgataacactctttctactgataatctcccaaagcagttcattttctgcaactgagaagcacatatgtgtagcatatgcacgcgtgcattctcaccacatttacccaggactcttagcatcatgtcccgcatattctccttgccagggagacaaagatggggagaggcaaactaatgtgactacatccaaccactaactgagtcgatgactctttcgtcagtagttatcatccgcacactggtcaactctgcacatctctgtctccctcttcgggcgcccgattacttgggctagtgagtctggtgacaatgtgatgcaaaactaaacaaaactggccaacattccctacccaatatcatttaattgctttggttataaagtactggatacttatttcttcacatcccccaatcctaatacacataaaaaccacgctgaccagtgacatgggcctggagaagtcttgagagaattttctttatttcccatccccttctgtgggtttctttcatttatgtgtttacctgttggctttttgaggggagggggagaagtggagggtttgagccaaaatagtgacttcattaaacatctgctgggtcttcgaagtctcagtaaatattgaataagctccctggagctctgctgttgctgcctaagacgggtagccagccccgacttgcatgagcagtcttgtttggatatctgcacatgtttgctttctattggttcagactcaccttggaacagagctgggtctgttaagtctgagaccttgcttctggtactatacacatagggcattaggaagtggcccaatgttttgctcatcctaaagtcactcaatgacttgcagcagccttcagccttccttcagttgcgagaagtttgttttcaaatcttcccagattgg

SEQ ID NO: 157472 - DNA, 1000 bp, Homo Sapiens
ttttttttttttttttcatttagatttctaatttattattaaattacataccaaagcttcttctatacagtcagaaaatgcacatttagatgagaacaaaaattaagtacaaatacaataaaattggttccaagaagctattttaaaagcaaaaacttacaaagtgcatttggaaaacaataggttttaaaaatctgtattggcattttttcaagaggaaacatcttccatcacaggaaagtatggttggaattgatttccctcctcccttaagagctaacagggtgggaatggatgcaaataccttgatattaaagtgagctctcaggtatcttttaattttttttgcagagacagagtcttgctacattgcccaggctggtctcaaactcctggcctcaaacgatccgcctgccttggtctcccaaagtgctaagattacaggcgtgagccactgcacccagccctattgtcatggtttttcatattttttcagtgaaatgaaaagttttgagtggttacttaaaaggaccaaaaaggaaagattcattataataagacaatagttgagggggcataacttcccctaagaggtaacatttggatccagaagtagaaaattccttctgacctcctggctgtgactagcattaacaagtaactaactgttagcctctgaatctggtaactggtccgtaaggaggacagcaaaaaaggagagaaagccaaggtggttaaacaaaaaagttaaatgacatggagctgaaagagctcaaatcccttcatgggatccccacggagccccttcctgtggacacacacctctcttcccttgctggaggtttctttctgcaaagaaaccctaagaggaaaaagcactggcctagctgtctacatgtggccctgggtcaccttagtataggctgcagcacggagaggttagtcagacctatctgacaccaacatccataccaagccttttaacttccttggaagaact

SEQ ID NO: 157473 - DNA, 1000 bp, Homo Sapiens
ttttttttttttttttttcctggggagttgtgaggatgtttttgtttggttggttttggttgggatgtttttttaagagcgtcatatagatatttatatatataaattattagtgtggggaaggggcaaggggcatacattgcagagggggcgcgcacacagggatcggggaggggcaggggtggcacacgatgctacgcaaaacagccacatctaacagatgaaataatcacaccaacggggcaggggaggggcggcggccacaggggttgggcatgggggaggagaaaagcaggggggacaaggaagagagacctggtccaagattctgtgcgctttctgtccccatcctcgccacctccccacctctgcacaccacatcgggccttggccttctgtctgtccctccctcccccactctctgtccagctgcggaggccctgcaactgagcagcaccctcttggctctgggtggcaggccaagggcacggtggggggagggtgggggtgctccaaggtccaatgtaggagccatggtgctctcttgatcgcaggttctacagtggcttgtcgctttccttcttcaggtgactgtagtagtcctcctgggcaggcagcggcacactgtgcagcgggtgatgggcatgcagccactgctgctgttccagcgccaagcgctgcagctcagctgactgtgcgtgcatggcctgcagctgatgagctgctgacatcggggcagaaagggaggccggcaggtcccggtaaggggcagcaaagagctggtgacgaagaacttcgttctcgtgcagagggtgaggaagcagggggttagggagagttccagctgggtaggggatccgggtaaggtgagaccctgaggccagggggtcaatgagagggtgcaccgaggcagaggctgcatggatagcatcttgctggtgcaggtgcaggtgcgagtggatgtgggagtgctggtggtgatggggagtcacattgagca

SEQ ID NO: 157474 - DNA, 1000 bp, Homo Sapiens
tttttttagacagactaaaatgtaactttatttatacatatttaattagaatagacataaaccaaaaagaagaaaaaaatcaggataaagtgtcaactatcattttgtttgcaaggaggagtcaggaaaaggaacaagttatcagaaaaatattctaagaccatcccaaagtagctaggttacataatcttaagagtcaaatgccaaaattaagtattataccacttaatccacaaatgaacaaaaggggagtcaaaagtttatcctgtttagtgtaataacttttacatcacatatagtgattcacttcttaaaagtggcactggcaacttttagaagaaagaagtttccattatgtgttgactaaaaaatctcaaaaacaactaagcagctatgctatagctcagtaagtaccattaaactgttctgggctagtgtacatttcaggttaatagagaactacattttgggtttttagaaaggcagcaataattatattttggcttttagtctagatgcttaacatagttaaggcgacagttcaagcatattaagtgaaggtagttaaaatttaagaatcatcacaatctcttgaaacctacatacactgtttaatgcttacatggaatgaaaccagtgttcttaattggcattttacacacacacacacagaatttaaaaaaaaaatcaaaggcaatcattctaaatgtactatgatagcatgttaaagatgcaagtatgctatagaactaaagtaatatgaacagcactactcattacctaggagaaaggtgactggttttcacacaaagctaagcctgtaacagtcatcctaatcacaatggcttataaaagcatcaggtttccagtagagaaactattctaggaaagtcagtaaatctcttgaaagtttcacatctgtaaaaccaggataaggctacaactattttgaaatctgaacaaggtatcagatgaaagagtaagattcccagccataatg

SEQ ID NO: 157475 - DNA, 1000 bp, Homo Sapiens
tttttttttttttttttttttttttttttttaataacaagtctttaaacattgaaattaactttatttttaaatttttgtgggtacaaagtaggtgtatatgtttatggggtacatgagatattttaatacaggtatgaaatgtgtataaacacatcagggtaaatgggtatccatgacctcaagcacccctcacaaaatctgagtactcacaagatctggttgtgtggcacttcccttcccccctctctttgccctgcacctgccatgtgagatacttattccccttttgccttccaccatggttggaaacttcctgatgcctccctacaagctgatcagatgttagcaccatgcttcctgtacagcctgcaaaaccgtgagccaattaaacctcttctttataaattactcagtctcaagtatttctttgtagtacttcaaaaatggcctaatacagatggatagtttgcaaatattatctcacattctatgggttgtctcttcactttgttatttcctttgcaatgcagaagatttttaacttgatgtgatcccatttgtccacttttgctttggttgcctgtttgtcaggtattacacaagaaatctttgcccactccaatgtcctggagagattccccgatgttttcttttagctgtttcatagtttgaggtcttagatttaactttttaattaattttgatttttgtatatgctaagagatgggggtctagtttcattcttctgcatatggatatccagttttcccagcaccatttattaaagacattatcttttccccagtgtatgttcttcattcctttgtcaaaagtggtcaccatagatgtatgaatttgtttctgggttgtctatactgttcctatgtgtctgttgttatgccagtatcatgctgttttggttactgtagctctgttgaataattggaagtcaggtaatatgattcctccagtttgattccttttgctcaggatagctg

SEQ ID NO: 157476 - DNA, 1000 bp, Homo Sapiens
gagatgaattatcaaactttattggcttgttaaaaatgattgaattcagcaagtacatttatgatctatctacattgttaaaacagcactaaaaataaaaatttttaaaatgattatccattatttacagaaaatgtggaaaagatggcttttaaacccagaacattataggaaaaaaaaaaaaaaaacagggcatgagaatgattcacaggctgcctctggattacagcaaatggttgaacatgaagtgcgtgaaactcaaggatttgcgtttcttaggaatctcttgttactttgtatgtgtttatactcaattcataaatggactgtcttacaataaaggtgataaaaaatctctgttcctttctttttgcttttcacactttttttccccataaaaacccactgcagtcatagtcagtagttaggggtgggggttggttcaacacattctgggtgctcactcatgaacatgccaaagctatactgcaacactagcctgaattcaacttagagttacctcaccatcaaaatcaggtggctgggacgttcttttgtctctgaagaccaaaacttgaaaatggactgactttagtgggaaatttccttctgcgacagtcattgtcatggaactttcctgggctgggagttctgtcagccaaattcagtctggcagcacctggcagcaaattcaattcatggtctgtccaaaagagtccttaatcttcccctatgtctttagatgaacctggcatggtttgcaggtactacaggcatgtgaacatagcagaacacacttaatagagtggttacttctgtactaatttccttggagtcaagtcagctaagctgcgcaactccaagggctctggggacatagactagatgtgactggccctgcccatgtggctggatgcaccaaccctgagagaccctatgctagatggaattgcttgtcctcagtccagctgtccctctgtatctggagtctagacaaaac

SEQ ID NO: 157477 - DNA, 1000 bp, Homo Sapiens
ttttttttttttttttttgacttttaatgctttattgggattgcaagcgttacaaggttaaagacaaaacccaagcatgggattttgccggaaatattagcgttaaaggagctgagttgagtcaaacacgggccgcaaggtggaccgaggcggcaggcacaggtgacattcagtgtttggcgtgggggtcttcaggtgatggcagaggaggggacccaagagggggccccccactgaagacattggggacacggggaggagacaagatggagagccacgactaggcacggaggtcagacaggcagcccgggccaggatggttagtggcccaggggagagctgcaaacctggggacgcaaggggctggtcggcaagtgcccccgggaacacccactccggcgaggcagaatataacactgggtgggtgggtgtcctgacgaatgggcaggtaatttggggtgcctcgaagcgttttggatctcaggccaatgtgggttccacaattgtgacaatttggctctttgggcttctgtccaatgttccgaatggcccactcacagggcgcttgccgagggaccctctgcgactgaggcggactggcatggacgacccccggggtcatgccagccccgtcaccaggacccagaagcctcaggcctctagactgctagtcgggctgcgtgcaggggggctgagctgggggcacaagtgggggcgaggtaaacctcccagaggccgagtccctgccgcagccctaggcgccgcggtggtggctgctatggcatcaccagacccgtgggctccggggcccaagcaacctggtcgatgggcagacctggcagctctcctgctctgtgggctcagacccgcctgacctccctactccccggcctcaccccaccttgcccccaagaggtcccacagagcttcggacctcctggagacaaggcagggtgctgaggggcgggcaagatgtcaccgagggagaggggagggttcc

SEQ ID NO: 157478 - DNA, 1000 bp, Homo Sapiens
ttttttttttttttttgaggtaaataaaaacaacatttaatgaatgacatgttttgagtgccttgccagttagtcgctgaatggatctcatttggtcaaatgcttgtgttttctattatgacattacttaagctaatagagttaaaataatagcatcaaaatttacaaaattatctcctatctgaatgaaaatgcaaatgattctaacttttacttcagtagctctggagtttcaagtctgttcacttagaaataaaatggccttaattaacttatacttgaactaccaattccctcaaacttaacataaatgtaagacattgccaactagaataccaatatgattttggggggaaattacagaatgattttaactctcacatagaagaaaaaaatgcctgagaataacaaggtaaatataaaaatgaagactgaggcaaaaattggctcccacattatagtcaaagccactgtaatcaaatcaatattttattcatacaggagtagaaaagtagaagacatgaacagaaataaaaattctgaccaaatcttaaggagtgtgaatgagaactgaatgtatgataaatgttgcatgttcagttcaatgggaaattgatcgcttatttaataagtgattgtggcacaaaggctgtcttcagcaaacaccaaataactctgtgctctgctttgagacacttttctgaatctgttagcaagagaaatgctgaagctttctcagatgtctgctgtgtctagggaagatgggggatggcttcagagcaagaggccacaggtcggctgtgagcatctgtgtctagctgttgagcatctccaacagtggatgagtgtccaggtagacctgaggctgtgccctgagatttctgatcatctcccagcactgtctccaccagctgtacttcccgcccctctcgggagaaactagctaaaggccccctgctacgcagcttgaagaaaggaaaagaggaatatattggggagc

SEQ ID NO: 157479 - DNA, 1000 bp, Homo Sapiens
attttcaacataatttactacaggtctctgaagtgtatataaaatgttttagtgcaacatcttacaaatagttttcctttaaaaaaacagaaacaaatcaacagctctctacatcatgcatgggtagttttcttaccccatctttttttttcctcaataattaacgcagagaaaccattgtttgaaaagaatatgaaaacttgctacagaaacacccggtgaaagagggtgtggtcatattcatgtcctagaatgcgcctagcacagtgtagtttttcataaatgcaacattgtagacatagatgaatccagagtattcagcagttttcctccgtctcagaagactaaagctccagtagacaatgcgcaatgaggtctcacagccactggagggcaccattaccatccatctgacatcgcatttccatagaaatggccaaagaaagaaggtcctggggtttttcatagaaagctcaaaaagttcaacctttgatgctatcccccagcccaatacaaaatacacagaaaaagcaattattaaaatactggcttcggtttctttttttcctttcaaatttcctacaattgctttacatatttgtgtgcagcacctacttctttatcgccgtgaactgaaatctaagatttcaaactgaaatcttagttacacatcctagtcccagccagcgctctggcaacctcccatttagacagaggaaacgccagtcatcttccctcattgactcagcctataaagtaggagtcagcaaattcccactgaaagcccacatctctgaaataaagaaatggggcaaaagaccttcttttttcatgactgagccgctcctgtacctctaatgtgttgatgcagcataataaatgagaatcagcatgtcaggcaacagcaggattaaggtggtggtgcctgcacacactgtctcacaggagggtacggtatacttgggggagaaaaggcaggtctgtgtgtctgtcagaaaat

SEQ ID NO: 157480 - DNA, 1000 bp, Homo Sapiens
ttttttttttttttttgttttttttttttttttttttataattaaaatatttttattataaagaataattataattattcaagaaacactgataaagtgtctttaaacaaacaaacaaacaaatacccatagaagaaggttatgtgttgactggttgataaaaatgtttggatcagaggctcacagaagctaacgctgtatttcccctagcaacaatcattcagcattcactaattcagtgtgcacagaaaattcacagaacctaactaccacgagtaacaattcactgcatataaatgtacatgtgtacatgtgcacatgtgttaagtatttcatgactcaagcctttatatttctcacaaagacacactccctcaagggtagagatgacagttttggaacaatgaatacttttactaaatgttggcagagctgccctcaatggtccaactctcctggctctggacttagagatatatatatgtaaaacacacaaaggggatgagactttttcaatgtcttattccctgctccatcccccaacccgccaaatgacaaactgtcataaacagggaaactgaaaacaagttatgcacatctttttcttttatcttctagattgtttcctccatctctcattattttaaaatatgcttgagatggatttatagtattaataagaggaaagttgttcctgacattttacctaaatgcatgttaaccaccaggtctctcccctcgattattctcaggtacagtgtaaggctctaaactgggtgaatctttaatataattctttggatgacaagtgattacctgccataaaaagatttcacagggacaattctgtttctagttagtataaattatcagatactaagacatctctctggccaaaatatttccctcaatagttatactcaaaaggaaaggtatgtcaccactatgagttcactaaagacaaacacacttgtaataggccttcctgtatcttttaaac

SEQ ID NO: 157481 - DNA, 1000 bp, Homo Sapiens
tttttttttttttttagaaagttttttattggttacaataatataaaatgcattgtttaaattctcctctagttattaagtgtttgcagcaatagcacaacaaatctttttttaatacatctgacaagccccaatgatttcaatgctgggaggggaaaaacaacaaacaccactcttgtctatctataattaacctctctctctctcagtgctacattggttaaaatcaatggacaacccctttttgtatgtcaaattgtaaattttaatgttttcattagaatagtcttttatagcactctccaaaaagaagcaataaaataactaacagcaaagttcaatacaggagcactctccgggttaacaacgccaacaaaaaaagtgaaatgtaaatcacatataatacaattgaagcgtccaaaacaatttaaataattttaaatattttatttttaaattgctacaaatgctttatacaatatttcaacataaagtccccataacagaaatgtaacaaaatgggaatgatagtggaaggattaaagtggcacaaattcaccaaacaaatattaaactacaaatttttcagaggtagattacttttgaagttgagaacaaaaaacagtatgaataaaacctagccgctttccaccaactcagtcattaatttagggggaggcataaaatgtaaggataaatgatattaatatacttaggaagaggccaatttgttgtttttaatctctattagagatgcaagtgtaaaacctggtatgcaaattcatttatacttacgtgtagacatacatctgtacaggcctgggatgcgcctgtgcactgatatattgctacatagtctctgataatataatagttataaattagtgccagataagaatctgagaggataacgtccatttggatatacaaacgcaacaccagaataggcataaaaaagagtccatatccaatctggtttcctctccattacgctggcaat

SEQ ID NO: 157482 - DNA, 1000 bp, Homo Sapiens
tttttttttttttttttttagggtctgcgaagtttttaatgttcaaggggctgtccgttttgaaaggtgaaaaggaattaacatatttaggtccactcatagggaagaggaaaaagaaattctggcatagcacaggggtcaggaaactatggcccaccacctgtcgttgtcagtagtttccctggagcccagccatgcaaatggttgacatgctgccgatggccgctctgcagaatcgctgggactaagaccacaggtccagaaagcttcaaatggttactatcgggccctccacagaagtctgcccactctccatacagcatatgatgaaatacactgcattatactgaatattgaaaaaaaatatactgcagctactgaaaaataaacacaaagtgtatatacaaacagggaaagatgttcaagaaatcatgagaaagttttattttaaactctgcctgcctcctgaggccagcaggtcccgttcatttggtttcactaggctccaatgagaaaggaatttgagttcttgggaagaatgaaccctgggagggtaaacaggactctgggcaacattgtctaagcggcgtccccagcacgggcctgaacaggaccagcagcccctccgttacttacgcaggcagttccaaggccacaggccgctgagagctgtgcaggaagctctccccacccaaggtctgcgtggtatcaaaactcaagaataagaacagaagccaaaccaccaccatggttcgccatcagctgacctacactgaaccccagaatcaagcagacaggcccaccacggcccagctgtgcaggatgagccagctccccaggtggaaaggcctgcccaggaaagtcgccagaacaaagcagaaagagccgctggctgagctagtcattcttcccaagtgaataattagacaagcgccaccttgagaggccaggagcatgcttagaggacattccctcctcctggaagctgtgtgtcccctag

SEQ ID NO: 157483 - DNA, 1000 bp, Homo Sapiens
ttttttgatctgcaaaattttattaagcaatagctggacaactcttacaacttcaaatcatcaagaaaaaaataaggagattaatccgtctcagtaataaagacagaaaataacttggacaaaccacatcgttttgaatgcaaaccattaatgccttctagaatatctcctgcacaatctaatacacaaaatacgtaagaagaaaggcaaataaggatgagctcattaaaacgcatttgggagtcgcaacagatcttgcttggaaagtaaaaccagcaggatgctgaattaaaaaacaaacaaaccaacactggaggaactgaggtgcacaagcagtgcacgccactgccgaggtctggacatgaacatgctggtggtctagtttggtctggggcctatgcacctgcatcgtgcacttacggttaaaaaaaaaaaaaagggaaaaagaaaatgccagtagtaataaactcagaaattatgtccaaatttacagtaccaaaataatgcatttataaacaaatgcaaaaacaatacccctttggtaaataatacagtgtctttttcagtcaaacgcataacccatgcttttctacaacacgaaaaaatttttatctacaataaacaacaagatcttagaaccctacccctccccttaaaaagaactgtaaacagaaaatataggtacaagtaaagttacacaaaaattgcacaaagccaaagaaaatggaaacaaagtaagccacaacccattagagttttatcagccagaggtaaggaatcacacaaatgctgaagagttctgagttgtgtgctattacagaaatcccaggaactcaaacgacattttggacacatttttgtctccactaactttgcttacaaccattgacttggccaaatgatacaggcacacagcgacaccatggactccttctccagttgctgggccaaactttccttttcaagaaaccttttcaatttgaagaccgtgtaacatggc

SEQ ID NO: 157484 - DNA, 1000 bp, Homo Sapiens
tttttttttttttttttttttttttttttttttttttttttttttttttttgaacagtaattcatttaattgcaaagcattttgaaataaaaaaaatcaaacttaaaactgtgttctgttcctggaggtggcctgaggcctccccgacagcccagcacctgcgttcctggtgcgaacacgctagcacagggcctgccgcagggcctggatgcgggcaacgcaggcgccaatgggctggcgctgagcctggagctcctctgccagcagctggatctgcatttccacctgttccagctctttctgcacctgctgctctacttcctggtcctcaggccccggctcctctctgttcagctccagccacctgcgcaggctgctcgcttgccgccgacaggaccagaggttctgcttggtggtctggtagtgcagtagttgctgctggatctcctcaagttcagcctcaaggtccaggctgcctgcagttgaaagtccaggcccagccctggtggctgagaagtccccaggaaggagtagatgggggtcagggacactggccagggatgaggggaccgggggcttatccctaggagtagcccgctgtgctgacaccctggctggtgcagccgccccgcagggcatgaaggaggaaagaggcagcagcagcagctccgggcctgtgcttgccgtcgggggctgcttcgggccaggggcgcttgacagggccccaggcagggggctgtgtgggaccagtgctgtcggggcctctgccaggaagggccgcgtcagggagggggctgctggctgagccatgcctaggccatgttcctgtggcttctgaggcctctggctctgcgcaggctccaacaggaagtgtgggcgtcgcggctgcttcctcgctgagtgggcagtgttgagctccagggcgtggggctcctcagcagccaggcggcccagagctcccagaggccgagaagcctgtggcctcttggtctcaagggtg

SEQ ID NO: 157485 - DNA, 1000 bp, Homo Sapiens
tttttttttttttttttttttttttttgttgtagcattttattagtaaaaaggcatttccaatgtttaaattaggatttatctacaaaacaatcaattctcactgaggctgtggagatggacacaggcatttaaaatcagaatttgtaggtgaaatcttaattggtctcaacatctactttatttctgcattgggtaagcccttgattcacagagaagcagtggcaaagagtagctaattttttcagggctcccttcacaatttaattgggctcttcagttaaatcagttaaatgaaaatggcagaagaatcctaaattattagattgatgcaaaattaactgtggtctttgccattactttttttttttttttttttttggagacagagtctctgtcactcatgctggagtgcagtggtgcgatctcggctcactgcaacctccgcctcccgggttcaagccattctcctgcctcagcctcccaagtagctggaattacaggtgtacgtcaccacaccaggctaatttttgtatttttgagtagagacagagtttcaccatgttgaccaggctgctcttgaacacctggcctcaagtgatccacccgcctcagcctcccaaagtgctgggattacaggcgtgagccaccgaggcttttgccattattattattattatgagatggagtcttgctctgtcacccaggctggagtgcagtggcacaatctcagctcactgcaacctccgcctcccgggttcaagtgattctcctgactcagcctcctgagtaactgagattacaggcactcaccaccatgcctggctgatttttgtatttttagtagagaagggtttcaccatgttgtccaggctggtctcaaactcctgacctcaggtgatccacctgcctcggccttccaaagagctgggaccacaggtgtgagccactgtgcccagccagtttttgccattatttttaatatttttaatggcgaaaac

SEQ ID NO: 157486 - DNA, 1000 bp, Homo Sapiens
ttttttaaaatcacaaataatttattcttccgttagagttgatacagttttaaatagcaacaaagtacacagtggtggaaaattggcacagaacctacaagcatttcaatcacaataaggctgtccatgatttatctgttcaaacttgatgtccattttctactgatcaagttgaaagaaaaaacctattctggccaggcacggtggctcacgcctgtaatcccagcactttggaaggccgaggcgggtggatcacctgaggtcaggagttcgagaccagcctggccaacatggcgaaacctcgtctctactaaaagtacaaaaattagctgggtgtggtggcgggtgcctgtcatcccagctactcaggaggctgaggcaggagaactgcttgaacctgggaggcggaggttgcagtgagctgagattgcgccactgcactccagcctgggcgacaagagcaagactccatctcaaaaaaaaaaacaaagaacaaaaaacaaaaacaaaaaaacctgttctgaccttgaaacacacaaacacacactctctctctcatacacacacagagacccactgaaattcctccttttgattacagtatgttgagaacagtatgttctgcttattcaaatttatgacgccccttctgttttgtttccagttagacgtgggaaaaaccaattcaattataaagaatacatcttattccctgggcataggcaactgtgatgaaaatagcaacttacctttgggctagatgttttcagattatgcttaaataaccgtggttagaaatttttcaatgcatgctttcctgccccacgcaatctccctgaatttagctaaaataatcaggcacaggacagtctcaaataatgattaaaatatgccatgctaataaacaaggttatctagaatgcaacctcggtgctttaaaaacagatagaataaacctcatcaataagcattttcctaaatatctctttgtgttatatca

SEQ ID NO: 157487 - DNA, 1000 bp, Homo Sapiens
ttttttttttttttttttaaaaaaataaataacgtttattctgtaccacgcggctgtcagtgtccggagtctccagggcagagcgccccggggagggctgggccctcagagcagcaggagggcgcccagggacagctcaccctggcccagcaggcggccccgatcccggccgcgaccctcatcccgggccttgacgcgaacggccaggcggcgcacctcgtcttccgagaggccgtcgaagcaaaagtcctggtcaaaggaggccttgcggctgcgccccaccacagcgctgcattgccaacgcgcagtgcccggcggccgcaggacgaggctgaggcggcagcggacggcgcggggcccgggggcgcctccgaccaggctctccgcgcggagcagccggaggcggagacgccgggttcccggacagtactcagcagccaggcgcagggcgtcgccggcgcggcccagagccacggtgcccttggcctccaggcgctcaggaagcggggccctggatgacagcgggctcgaggagggggcccgggccggggactcggatcccgcgcggcgctcctcgtcctcgttcccgctggagacggagcggacgcgggccaggcggcgactccttccagcccgcagcgcgcgactcagcagcccgtcggggacgcgcaggaggcggcagcggcggggccccgcagcgagcgcgtcctggggcaggcggggaccgccgggggccgcgggggtggccgggcccggacctcgcgggccgcacagggtccccaggggggcgtccgggcctccgccgccgccgcagctgtgggcccggggccggggcgcgggcgggcccccgagcaggagcgactccttgcggcgcgtgtgcgggctctcgagcagcgcgcagaagccgtaggtggtgcgcacacggggcaggtgcggcagtgacagcgctgcctgcgagcgcgggtcccagtccgtgcggccggcgtcctcgtctgccgcg

SEQ ID NO: 157488 - DNA, 910 bp, Homo Sapiens
tttttttttttttttaagaaacgagaattcactgtttatttgtgcaaagaaaaaaagatatgctgctactgcaatttagccactgctctgtttggtggccagcctcttatctctctcttcagcaacagtaagtcgaatgccctttcccctgggcagggaaatccaaggtttattgccattgccaatgacaaaaatgttggaaagcctcgtggcaaagctgttgccattggcatccttcacatgcaccacatcaaaagaaccaggatgtctttccctgttggtgatcacaccaacacgaccgaggttggctccaccaatcaccatacacaaattgcctgtatcaaatttgataaagttgattatcttgccagtccctaaatcaatctgcacagtatcgttcaccttgatgacaggatctgggtagcggatggttcgagcatcatgagtcaccaggtgagggattcccttcactcccacagtaatcttcctcactttgcacaacttgtactttgcctcttccactgtgatgcggtgaacagcaaaacggcccttggtgtcatagaccaggcggaaatgttcacctgtcttctcgatgctgatgacatccatgaatccagcagggtatgtgacatccactcgaaccttgccatcaattttgatgaaacgttgcatacatatcttctttacctcatctccagtcaacgcatacttgagtctattcctgaggaagacgatcagaggaagacattccctcagcttgtggggacctgtcgatggacgaggtgcaaatacacccgttagtttgtcaagcatccaatgcttcggcgctgcaacacgctttaagtgcttcttggggccccgggccatggcgaaactctgcgacggaagagaatctgttcttttccggtgc

SEQ ID NO: 157489 - DNA, 1000 bp, Homo Sapiens
aaatgctttagtatctcaatgcataaacacactgtttacttttacagctggtccagtgttatttactcttggcaaattgtagacttacaaaacaaggcaaatccctacctattcaccttctcagcaagaatgacttctaactcacacagcacatactgggctccagtaaagggatctgctcatatccatagaactaatgaaagatatatgactaagtatacagcttaaatgaagccaaatgagcttaatacagaaaatatatatgatgatattaatcatatataaacaatgtaaaagattcataagcaaaattttattttgccatcactaattcttgtgattatgaagatataacctaacctaggaagaaaataggcagctgttctttttagaaattaattatctactgtacaagcccacaggcctgcaggtacaatgaaagcatgaaggtaacttctttacactgtgaatgggtaaagaaatccaatgaggccaatgttatcggtttcatcgatgccaatattttttcacttgtcttgatattaagtaaaggctaactgcctatgtgaaaactttggtaaaattattgtggctgcaataaaactacaacatacacacataacctccaacagatccattttaaatgaagaaaaacaactacaattcgtttttaaaaatgcttcaaaaacagcacatactgtggccacttcattgttcctgcatccctaaaaggttcttaaaattaatcagtgaggtttcttccatctaattacatgaactttgtcacatgatgtcacatgctagctaactgcatgagcagtgcagctgctcgcatcaaccaaacataaaaaatattaaaattattatcagaagagtagtaggtaaggattctactttgcgagttgatggaactccaccaaaggtgttctacgtagaacaggtaccttttcttctccttccttccttctccttccttcctttttttctttctttctttcga

SEQ ID NO: 157490 - DNA, 1000 bp, Homo Sapiens
tttttttttttttttttttttttttttttttttttttacattttagagttgtttacttttattaataaaaagttagatcacttatatatatatacattgaaaaaaactattattgtccctttcctggtgaaaaggagtatacacaacagacctttgtgatattctgcaacaatgacccatattgctgtggaattctcactttttagtagaacctttaaaaactcaagtgagctgtacaacgccccgattgctttaactccagtgaaccacggaggtataaagacgctagagttctttgtaattcttcagtgccaaaaataataaagttggaaacttggattcctgtttgactctactgtattaagtgatcagaataaaattactgtaaggctaatcttcaaccacttcatggttttcattcttgctttctatagtgaacatctgttgtttccacttgctctaaacccctttccttttgggattcagcccactactcatccatgtgattctgacaggagttagcaatgacagtgcagatagatagcccaggcctggccaagatcacaggcccccatcccctcttccacagggactggtccaatgcaagggcaggtgatcctgggaagaccagagtccttttatagatttgatttgtggaccctgaaaaaggaagttctctctctcccttttgaatcatggataataaggatgtggacttggagctgacactggcccattatgtagagcgggccagactgaaaatgtaaccaggaaacaaaaacagtccgaagatgatggtaaagagcctgggcaacacaatctggggcctagcatcagctatgcctgtggacgctattaaagtgctgaggttattacttcagtgaatcagagcacaaatgaagtatttcttctctaaggaatcaaacacaattcattttagaactagacaggaaaagactgaactaaagaaaaagttttatcctaaactttcccaacagac

SEQ ID NO: 157491 - DNA, 1000 bp, Homo Sapiens
ttttttttttttttttcatctttatcattattttattttagtaataagaaactggggctcagaaagtttaggtaacacagtaggaaatgatgaaactgaaacaagaaatcatgtctatttgattgcttttttcctgtaaagacagtcattaatgctcttcaccaaatgttttcatttcttctgacacatgccaagatcgcacttccccatccttttgaagttacttgcagccatgataattgccctggcccaatgcaatgtgaacaggtaaaagacatattttacttctgggccaaagcttcaagaaccagtgcatattttgttgtcttctctctctctaatgcagataacagaagtcccatgagcctgggtcccacaaagagacatggagtgtagcatccagcaatgtcgttataaacttgtagtgggaattaacaatacacatttgttgttataaactaagatttggttataaaccactaagcataacctagccactgctgactgattaattcacaaagtggctatatcactttgtgtttttaagtggcaataatttaactcagttctctattagatacctcaattccaaatatttttttttctgagaaatgcatgtaaattttattcagaaatagtaaagttttaaaagtgttatttcgatagtttctgtggaacaggtggtttttggttacatggggaagttcttcagtggtgagttctgagattttggtgcactcatcacccaagcagtgcacactgtacccaatgtgtagtctcatccttcaacccttgagtcctcaaagtccactatatcattcttatgcctttgcatcttcgcagcttagctcccacttacgagtgagaacatacaatatttggttttccattcttgagttacttcacttagaataatggtctccaactccatctaggttgctgcaaatgccattatttcattccttcttatggcttagtattccatagtgcatatatatca

SEQ ID NO: 157492 - DNA, 1000 bp, Homo Sapiens
ttttttttttttttttttttttttaaagattctccagtacgtttatttcacaaacttttttgtacagttgacccttacacacgggtttgaactgggtgggtacacttacgcgcatacttttttcaatcaaatgcaggtgaggtcacacagatcagcatttgtgcatgggatgtgaaactcatgtgtacggagggtcaactggagggccaacttttctacatatgggttctgcaagactttctgtgggacttgagtatgggcagattttggtatatgtgtggccctggaaccagtccctagcgtatacaagggatgactgtattttaatggtttatagtgttaaaaagagaaaaatatccacataaacacaattttgaacactgaactattttaatatgaattaatgtcttatgtttattaccaattgatcttcaaattgcagcagcccatgagtttggttgtaagtgttcttgccattccaccccagctgtcactgagtcagtttaaaatacacacacacacacacacacacacacacacagacacaagccttttgtaaagtaaacaaatcttttatactgtaaataactgttcctcaatggaactttttgtatccagtttacttcttttctaaagctgggatattcatattaaatacacaacaatctctataaagcaaagagtctatctctgtgaaaacacaagtaattcttgatggcaatatttttcttaattcacctaaccaaatgcagtttggaaggccaaaacgagaaaaaaacacttcagattatcaaaaccaaaagagatatgaaaaaataacatatttaacaatgtaggtgggaattttaaatacaagatcctgttgaaaatattgatattcaaagaaacaaacagctttggatccatagccacaatttaggttttcctagattaaaatcagaagtgattttattgttggaagatacattaattctttgaagtcagaataagaggcttgaca

SEQ ID NO: 157493 - DNA, 1000 bp, Homo Sapiens
ccggcccaacatgacccaactattagtagtaggtagagaagcgggtctccgaacctaggtaatctggctttggaatctgtgctcataaccactgtgctataatgtctctgatagcagctactaattaaaaaataaaaaatgtatgttttcctaactttaatcatcaccagataaggaatattcttggttcatttatgtctaaattttcaacatactttttccctttcaacctattaactatcctcaattttgagtcagctgattttatgtgattgtttccttccctcccacccccagtacactgcctttatgtggctgcatttgtattagtctctgcttagaaaaccaaaaatgtatgacatgattaaaccttgtttgttcaatataaaataagagttaaatactttccataactttgctctcttctcaggccttcaaagtcttgctcagtaaagtactgttgatgctgataatcagagtatcccaccaagagcacatgatgccttggactgcaatactgtcacagcagtgtcttcagttcttctctactgtgtataatgcagagcaaaatgggggtggtggtagaaattatggtagtaaatatatattttctagaaatatatccatttcgtggaaagataatattaagaccatatcaagccaaatatacaaatgagaaagtttcatttacctcaaaaaaatccaggctatacaaacagacaactgaaagccacataggaaatttccgaaacacaaaagaaaaagtctcacctacaagattatttacatgtttagggccagtattattaaaagacgtcatcccctaggtctagtagaaacatatagagaagtctatgctaacacacttggaaagaggactattgtccttccttgcacatgacaaaaaccaaatgaaccaaacccctagaaggtattaatgcacaaaggttttaataccttggctttaatgatttttcaaggttaagaaacaaattcaaat

SEQ ID NO: 157494 - DNA, 1000 bp, Homo Sapiens
gaaggaagccacggtgtgttttaataaaacagtgtctcccagttaagtggtgggacaaacaggaaccaccgggtggatggtcggccgtgcccacccgcctcaggctaacctcgaggacgctggtctgattgtccctgtgtctctcctgggcagttctgcctggtgtctaaccgtgggcctccctgctttgttcagccctccccccacgtagggtctggagaggcccctggtgtttgtcatccacagggctcccttcagctctgcaatccggcgacaaagccacaaccacagacggtctccgggacccacaggccccagctggtgggtggtgctggctggccccgggctcagctgggtgtgcctggcctgcagagctgggcacagatggctgttctgaaggtcgggggtgtctgggccccttgctgtcccctcggcttctacacctgaagccgcccctgatgaggggtccttccctggggcctctccagactcacggggctgggtaggggggtcagacctgggctcagaggatggcacctcacatcaaagggacccaccttgacaaccagacccttccctccccgtggggtttcgaggtctggattccccacaagccataatcgcaaaaggctgggtttgcctcctccgagcagccccttgaacacgggcagtgtgtccccctcctcaagagggtgcacacggtgatggccgggccaggccctagcagcagcaggagttcctgctgggacgagggaggggtctttgggtgagcctggggagcctcaactgttagcagtcgaatcctctttctaataaaatctcacatggacccaacacaggagacaggagggctgtgctgactagtgtggcggggccgcccgctgtgccccccatgtccgatctcacgccacggggtcccccttttcctagttagccctcaggcagcagccccttttggcccccatgattcaccaagcagcagggccagggctcaggctgt

SEQ ID NO: 157495 - DNA, 1000 bp, Homo Sapiens
ttttttttttttttttttttttttttttttttttttttttttttttttttttttttttttttttttttttttttttttttttttttttttttttttttttttttttttttttttggaaactgcagggttttattaacacgacttccaaattacatacaatatagttcaaacacatttttttggtacgaaatcacacaaatgaaacacacaacagtacattttcctttcaactacgtcattaccattcttcacacagatcctgaaaaagttaccacagcagttaacgcgaagtgaacaaaggggtggaacaggcaacggcattcccccaaggtagatgtggtgtgtctgggagaaaacaggatggagatcaaacccagagaaacgcactcccgtcatctctccatgtctcaatttccaacgctctcccagtcaacacagcttcgcccccaaccagagccacccggtgcagcccgcagagtgtacacgcatcagggccgggaggccccgtcggcaaagcagtaacacacggtcagacggccgccacctccaagtggagtgagccacgctaccactaacactgaactcaagcacaagagctcctgcgaaagcagaggggcgggaaacaaagaagcgggtggttaagggcacgaaccgcacactgcgggacgccggcatctttgaatcgccactcactcctacagagccaaactgcaaaacaacagaattaaaaagttactctctccaatcaaagacctggaggaataaatcgtgagtgaagacctgtcgaagcaaaggttgagaggtgatggagtggtaaacacagtgtgaaaatcgtcagcaccttcccacccagcccacgtggagttctcaaggctgaggcggagcagagtggcaggaatacggccctcacccagttgaagccaggaggtggagggagaggagcatggaaagccagggagatgggaaggtctgagagagtgagtcttggaatgggacagga

SEQ ID NO: 157496 - DNA, 1000 bp, Homo Sapiens
aatagcagcaactagtctttatttgcctcatctagtccttcagtaagggcacgccactccatttagaatacaacctatgaacatggttcttgccttgaaataaacctgtgatttgacaggcgggtgataacaaatggcagcatggcaggggcacacctctcctggtccccccgctccttggctctggctcatagttacatagaaacacaggctgtcatggccagttcttacgtgttttcaagagaagctagacatatgggttgtaaagttgaatctccttttaaatatttttgactaatgcagaaacttttaaaacatgagtgtgggtcacaggtgttagctccagatagtgcaataccatacaactataatcaagaataaggaacaagctccaagatacatcaagtgaggaaagcaaggggaaggctggtgtcttataagctaataatttttgtgcaagcacagtgtgattccctcagaacagcacctgcagggttggggggcacaggtgggagggaaggagatgtcaccctatacccttttgtaaactttggattttaaaccgtatgaatatattgcttattttaaaatgtaaataaagtagggagttgcagaattcaccttgctagatgttgtccagtgtgactgcctgattcacaatttcatcactggaaaattgccccttcctccctggcagggtgggtgctgggccaaaaaaagctaatcgcattccttctggaaatagggaacctggagtccatgcctggacctgtctgggttggtgtgcctcaggtacagggatgagtgggagaagtcctcatgctctgaaggcagaaggtctagagtagcctggcttctggctttcctaaagtcggctggttcacttcttggatttgccagtattttccttccaaaagtcttcccttcgggcttgacactcaactcccgaagctgtcctgcccatgagcccagggttttccggtttctggctcagctccca

SEQ ID NO: 157497 - DNA, 1000 bp, Homo Sapiens
ttttttttggcagtgatgtcatcttttattttctgccctccttgactgagagtgggctgaggttgtgagaacagccctctggcctggagtccctctgcctcctccacccctcccagacatgcctcagccaggtgtgtggcagggctggctggggaaggtaggcccagctctagctgcggaactggagcaggctgtggaggcacagaagtggcagggaaacactcaagtttgtcgttgtgcaggtgcctctgcaatgcattccctggcttgagcaatggaagatcaaaccggcatggttccctactgtgcccacagccggggggttgtttttgtcagtccttggagaagagtatttgatgcattcagggagggcaatgtcaggctcgctgacatcctctccagctcccaggacaggcatgcaccacgggtgctatgccgcttcttacaggacctttttagccctcaaaagaccttccaaggagaggccctggaggcaactgggtagggtgcagaacggcatgctttggctggaacacgcatccctccttccacggccggctctcagcctggaagccttttagcctacaggatccacctctctgctccctcagaggtgcctcttcatgtgcagggccaggtggtcagacctggaaaaacacctgtcacagtgggagcatttaaaaggcttggccccggtgtgctttcggaagtgcctggttaactcatcacttcttgcaaaacgccactcacacccttcccatgagcatctgtaaggcttttctcctgtgtgcgtccgctggtgtgctttcaagtgggagcttttggtgtaaactttcctgcagccgttaaagtggcaccggtgcaccctcctcctgccgtcgggggaggcatcgccatttcccttgtcacctggcttccccgaagtcccgctgcgcaccttccctggcgagggcagctccccgggcacgcaaccccacagttgagaaggttccctgctcag

SEQ ID NO: 157498 - DNA, 1000 bp, Homo Sapiens
tttgaaagaaaaacactcgtatttggatccaacaacagacacagagagtgaatggtcagcaagaaacaaaaggaatcagagtggaacagagaggggctcccgaaaaacccctggcaggcaagaggcgacggcgggaagttaacctcatgatggtgagcatgaggcatggaaatgccactgctccactttttttttaaggtagtgtgttgattgagctttatttcagcaaacaaaaaatatttctaagaacttgcataggttctgtcgttagcataccctccctaactcagtttgctcaagaactgtgaattgtcctgccagtggggtgatcagaaatgggacctgcatggtatgaggaccagttatccccatcattgtatgttcactcacaaagacagaacaatcccctccggtgtcacaggcactgttctgtaagatcactttggcattttattgaatactttctggtgaggttctctttccctgcacacaggcttttcttccctaaaggcctctaacctgctggaagatagggaccaagttgagtattttatttcttctgtctacagcatccagcatagttctaattaaatacaattaggcaagtactcaaataagtcttgcctaattatatttaaagtaagtatcctgcttaagtgagagaaattcttggcagatcttacctctagtactattgtttagtgccaggatggaaggtgagtctctgaattagactttttgctgaaagaacgctcccagctgggcatggtggctcacgcctgtaatcctagcactttgggaggccgaggcaggtggatcacctgaggtcaggagttcgagaccagcctggccaacatggtgaaactccatctctactaaaaatacagaaattagctgggtatggtggtgcatgcctgtaatcccagctactagggaggctgaggcaggagaatcacttgaacccagaaggtgaagggcacagtgaccaggcgccagagtg

SEQ ID NO: 157499 - DNA, 1000 bp, Homo Sapiens
tttttttttttttttttttttttttttttttgggttctgttataaatctttattttttaagacttgaacacctgcagaattaaatacaaaagcaatcaaaaatcatcatattttctaaaaacagttttccatttggggcttgcggccctcttcaataaaatcattctgaagatttaaagaggtttcagcttcaaattctcagaataaagactccttttgagaggggctacagaagcccccatgagcttcctgctcctcaaaactaacaggcaaaacaacaaacctcctagaaagcaaatatgacccttctcaatacagagcttttcccaccctaatttgtagtttttcagaaaagactggggaagcaggtaacagcgagcaagtcatcttgtgaagaaggtcctggagcgagccctggagcgggggctccccaggagggcccgagcagcggagacttctcactccacctctccagtctctgatcagcacacagtcggtggggcgctcacacttggaaaagcttccaggaggcagctcttcagtagtgaccaaggcacacgtggtccatggacaattttatcctgtgaagcggatacggcttctcacaaaggttgaccagcacgtacaaatgtctcaacgcatactcgtacgtgggggagtgccagttgaagcagtgggtccggaagtgcagcagggcctctgggtagcagctgtgccccgtgagcggggctctctcggacaggagctgctccacctcagcctcggacgctgccagcaaggagacgatcttacgcactgacttctcaatgaggtgcctggcatccagatgccgctggatctcctccgtgagctgcctggactcctccagatcattggtgttcatcagtttccttttcatgatggtgagaggcacatcagggctgggggtgaggtcaaggtgtgtgactggaggtagggggacgggagaactggctttgcgtttcataccctgaaactgcat

SEQ ID NO: 157500 - DNA, 675 bp, Homo Sapiens
ttttttttttttttttgtgtgccacaagtttattactcaataaatattctgtggtttgacgtgctgtattgtatttttaatgtatcctgatgagaaaaacaatcctaagacatcctgtaagtatcagacacgattgaataagaaggggaatgactccatgaaactatatttggcatcagtaagattcttctgccagttttctcgaaagcgaaccattcctggtctgtgaactaatgcttggtggtcacctacataagaaacaacaatgggtgcatccgaaaaatattcgtcaatttgtttaagacccttttccacagtgaattcaccgtgagtcatccacttgatgtttttcaaagggtttcgctcctcttccacaatcttaacagcataattgatgacatcctcaaccagagctagagctacttgagtcaattcatcctcgtagttcttgtcttgtgtattcggcattgtttggcttgcggctttgttatcctcatccattgctttctggcttgttgaattttgagtctcactcattttctttttccggagtgagcagatcttctttgcttggaacaggagcagtggtaggtggctggggatgtctcaggattctctcagtagcttctctcagattgccagatggaatgtttgcaagtgctagcttctcttcag

SEQ ID NO: 157501 - DNA, 1000 bp, Homo Sapiens
tttaaccttccaaagaagtgccttcgtttatttacagggcttaggaaaggaaaaaagctctacaaaagggaaatttcaaaatagggcttcagcaggggcccaggtggagtgagtagttttgataaggtccaggtgggactcacttccaggtggtgaggaccgctctccccgagtctctcgatcggcctgctctgggccccagagactgaccctgacggcttctcagctcccggtcagccccgtcaccctgggccaattcttcatcatacagaatctcgtaattgccgaggacttccttaggtggcgacttgttccatttgcagtctgggatttcaccattcgggacggcgatgttgagggtgtcattaatcaggttgtacttgaggattcggtcattggcagtgctggacgtgagagacggggacgcattcacctcgatcagccagggcttcagcttgtcgtcgatgatgatgtcgtagccatagcattcaaagcagtgcttgtcattgttcatcaccggcgccacagccttcagggactgcacgatgatccagtggatctcgtcgaacagcttgctggtcacctccttgccgcgggtgctctccaggtagagccgcaggttactcactgtccacttgcccccatggatgtggttgtagtcctccccgtgtttctggatggcgacgttggtgagatgaacgaacatgttgtccagctcactggtactcggggtgtatttcactgtgcagaaccggcaaaacccaagcttgtacatgtaacagcgcagtggacggtacgtggacaccagaacgtacaagcgcaggtcgaacttcctcccgccaattagtaacgggttgttaatatagagagagatcacgtaggcttccttattagattgagacacaaacgaagatgtcttgctgtcccgggaccactttttgatctgtgagagcttgttgataaggaagatgccctttccctgggccttgccacaaggctt

SEQ ID NO: 157502 - DNA, 1000 bp, Homo Sapiens
ttttttttttttttttttgcactgggagcttgcacccttcctccaagtcttttattttttttttgagttattaaaaaaaaaacaaaaaacacaaccaaaagaactgacgagaggaagacaaagcctcgggatcagccagagaccgagcggcacgggatgaggcacaggtcaggcctagctggatctgtggagcaaggtggtgggaagtcccgaggcctttgggcatgtggggtctgtggaaggagaggaggtcacttaaaaaaatacatatactgtacacatctatatgaagcgtcctgtgttgggggagtggggtgaggtcatgggagctggtccactttctccttggaccagcctccccgcaggctcactggcttggccagcacagggacccctgaagctggctgtcttcttctgtggagcgagggaaggtaacagtttagttccaacccatggtgggcagaggtcggtggaggtcagaggcatggggatggccactgctcggctaggaaatccctgtgcctggtgctggtgctcgtcatacagtctgctctgctgtcttcttctttttcttctttttcttctgggacggtgactcagaatctttggttgaggccttttttgctttcttcttcttttcttttttttctttgtctttttttctcttgtcggatttcttcttctccttcttgctctttgggttgctttgatctccaccttcaaccgtccccatccccttctgaagctcctcttctggctcgtccttggccccttgggagccaagagaccccttccctttcttctccttgacatcaccacttgctttgtctctctttgctttccccttggaagtcgtggaggtcttttctggggaaacagaggcctccccaccttccccggcccccagcttcttcttcttcttgctcctgggggtcctggcagctggctggtctcccgatagcttccgcttgcggctctcccagcccttcctgctgctctc

SEQ ID NO: 157503 - DNA, 1000 bp, Homo Sapiens
ttttattttcttcccagcactcactgtcatccagatccatgtgatttctttctttctttatatgtttgctttttgtctctccctccagaatgtcagctccacaagagtggggatttctatctgctttgttcatcgccgattccccagtgtctagcacagggctagccatgtaggaggaactcagcaaatatttgagttgtgccacttggtgctggggctccactcactccaggtggtgttatagcactgagcccaggccctcacccgtgccctgtaggaaatcccagacttcagggtgctggctgcgatgcggagggagggttctaggtaggtcacgttatagattctgaaatctgccgggtcgttttcactccaaatgttgactgcataggtgagatgattatacaggtaattgtcagggggatacgggttgctccaggtcagcagcagagtgtcggagacattggtgtgaactgtcaggtttcctggggccctgggtttcacatgctcgctgggcttgaaggagcccttccacagcagctgctgcccagcccacaggtccagtgtatagttatccgcactgaccacgtcatccatgagcaggtggcacacgcaccccgcgcctccgttgttctcagggatacacgtgtgggcttcggagagcagaaaaaccagctggtacaacaggcggagctcggtgctgcaattggtgggaccattcatcttccactcgcaagtagagatgctcatgtagtcggagacgcaggtgggctcctgcaagaccttcatgttcccagagcttgccacctgcagcaggaccaggcagctcacagggaacaggagcccagagcaaagccaccccattgggagatgccaaggcaccaggctggtctcgaactcctgatctcaagtgatctgcccgcctcagcctccaaaagtgctgggattataggcatgagccaccacgcccggcttctctatgatttcttccagctgtgtg

SEQ ID NO: 157504 - DNA, 1000 bp, Homo Sapiens
tttttttttttttttttttgtcattccaagaaatcttaatttctttattgtttgactttttgactcaacaatttttttaaaactttttgtttttttctgaaacgttcttgttgttatgagccttttgttttgttctcgttaaatgcactcgacccaaaattggtttggcatatcgaaaaggagaccaaggagggaggggctggggcgtgggaggtggggaggaggcccgaatggacagaaagttgaggataagagaagaggaacatagagacagccagaaagacatggggaaagagtgttggagacagagaaaggggaaggcaagggaaagccaaaagaaaccaaaatccagagaaaaagaattaacaagatttaggagcaaacgagttcaggagcctaaggaagggagtaggagaggaaaccaagacccttctctgtaccgtcccagctggggtgggggcgtcaaggcaccaggtctggttaggttggggggacacctgggctctgggggcggctttgcactggactgcagtgatgtccagccccagcagggggccctgccacacagctctgaggcctggaagccacccggcgatgccggctggaacaggacccgatacaccctctctccctttgattgtccgagtctggagagatacaaggaaggctgggcagggaggaagttggcctctctgtgtgcctcagccccctggaactctcctggccctcctcctggtgtcgggggcagccacaggctgggctgcttcccgggacaggccagctcctcgcctgctcatgcctcctgcccgctcttcacagacctctgaccacccctccacacaacagagctcccagcctagtgcagtccgggaagggccatggaactgtcccttgccctcctcagagtcgtctggcaagactgtccctggcctcacttctcctccccatctagacttcacccatggtcttctggtgtaatgggttaggcctttctaccaga

SEQ ID NO: 157505 - DNA, 1000 bp, Homo Sapiens
atagaaaagtacctttaaacagttataaaagcataatagactgcagaagtggctattttccttaggagtacagtcatctcaccaagagccgattggcactgagggcataagcaggtccttgaacaccaaagtggatccgtcacaagtccttgagctaactgccttttccccttatttacggtaagaaagagcccctcactcctggccttggttttttgtgttgacctttaaaagcttcttgacatctttatatttctaatggaaaataacaaaacaaaaacccaaaccaaccaggtaatcatgacattgaaattttcaacataagccgagcggatcaataggaaagactgtgtttggcagctgaatttaggtcagtgtggttttacaaaaatggcttctgtacaaggggagaggttgagctgtcatgaactctggagatgtgtcaactgacaacaccagactgactttggctttgacgaagtctgaatagaattggttccaaatgcccactgcctccgtctcctgtggggtgtggcaggacgtctcacagtgagcacacgccatttgggagctcatggtatgtggtcggtttggcccagtgctgccaagagttggcaacaccagctcagttcagccggtgttttgcaaacaaacatcactttggagatacagacatgagctgcccactgcagccaggtgggctgggcacagccaaccccttcaagggccagggctggcctcccaagccaaggttttcccttaccagtgaggcaggctctgcacttacactgcgggagcagggatgcggggctggcttgtggaaggtaggttaggcatcgagtggctacacatacaggagagtggaaacataaaactgtacaaagtcacacttggcacacagttgatatagtcacagctggagctactagggctttctaagggcacactcagcagttcttaccaatgatgttttcttgcccagttgtgaataagccatagg

SEQ ID NO: 157506 - DNA, 1000 bp, Homo Sapiens
gcattttacatttcttctgtctttattgtattgcttcaattggcaaatcatgcttgtattcattcatggggtacaatgtggaatgaggaaatcccactacttagcatctccactacctcagagagaccaattccacgtgaggtcccagaagtgttgatctaaacaagttgaccccatagaagtagcaagtagatcgatggtgaccaggggtcagagagtggcagagggagggaatgggaggggggttgtcagttaaaggaccaaagtctcagggaggaggaagaggttttgacatgtagtgcacagcagagtgaccagagtcaatgagaatgtgttgcattttgcaaaacacctgagagagtccatgtcaaatgtctctctgcatttagattggagaggacgaaggccctgaggtccaagaacattgaaacctgacagtggatgccaatggctgtggggaggagctgggcgaggcgcccaggttgtcgtctgcccggcaacgtgggagcctgcagcactttcctgcaaagctctattttatctttttaaataaaaatggttactgataagtgaccggttcttgcaaatcttgtagtaacattaggtggcaaatgggtcacagacactctgctgctttgcaccctctttgcacagaacgagggctgtgcacaccctagtttaggcggcatgcagtcaaggattcctgtcagttactcagaaaaactgcaagaaaaagccacctcagagaagtatcagggtgaccccacccacagcaaatcattagtagtggctctgaagggctgaggctctgagcaggtgcagggtagagtcccacacattgttcatggcttccccacactcacactacctggtgaacattttcagaaggaccagcagccccttcaggtcccgtctgcctgtgtcaatcatgctgagaggtccccaggaggatcctgaagccctgggaaccagactgtgctggggtcagtggcggggtgtg

SEQ ID NO: 157507 - DNA, 1000 bp, Homo Sapiens
tttttttttttttttttttttttcagaaagaaagaagtcaaattttatttgtttgtagatgacatgaccttctgtaaagaaaatcacaaagagtcagccaaaatgcaactggaactaacaaacacattcagtttatttgcagaatagaataacagcaccaaaaattagttgaatttccatacattaacaataaataattttaaaagaaaattaaaaaccaattccatttgctaaagaacttaaagtaagaaatatttaggaataaacataaaaagtgaggtttgtaccttgaaatctataaacattgatcaaaatgattaaaaacatgtataaatagatataaatcccatactgattggaaaaatgaatatcgctcaatgattatatactcaattgtgatttagattcggtacaatactcatagaagtctctataactttttgttaaagaaacaaaaaacaggccaggcacagtggctcactcctgtaatctcagcactttgggaggtggagtcgggtggatcataaagtcagaagatagagaccattctggctaacacggtgaaacccagtctctactaaaaacacaaaaaattacccaggtgtggtggcacacaactgtagtgtcagctacttgggagactgaggcaggagaattgcttgaacctgggaggaggaggttgcagtgagctgagatcgtgccactgcactccaacctgggcgacagagcaagactccatctcaaaaaaaaaacaagaaaaagaaaataaaggctgggaaaagtagctcccatctgttggctaggctgttctcaaactcgtgagctccagtgacctacctgtctttgcctctcaaagtgctggaattacaggcatgagccatggcccccagtgcaatcctcttaacataaacagtttaatggcaattaatgcttgaaatcaatgttaaatcaacaaactcaggtcaaggctgatttgactctaatgtcaattaatgcttga

SEQ ID NO: 157508 - DNA, 1000 bp, Homo Sapiens
agtaagaattcagaaccaaatagttttttaatggtatttcttcacaggtatttagtaaacaaatatttttagacctatgataaaaatatgctaaatgtttatacatgcttataaacatattaaattaaaacacaaacacttcaaaagtctaaaagtttattgccagaatagcaaacttcataaagacaccttaaagtacatcgaatatgacaagcaaaataaacagaaaactttgaccaaagaaaagattgccgctgtcatgcacagtcaaattaataccaaaccaaacaagtacatcgaagagtatatgggttatacaatccacactctgaaactaaaggagactcattccaaaatgcttggttttgggttgggggtttgagaggggggctggtgctgggagggtaattttctcctaatacagaatatggaaatatttagatgagaagcagaatgactaaaatatcagtgatccatttaatttttatctccaagaatagaaaactgtattataggcttccaaaattaaagaattgatcaaaaatcgaaacacagaagagaagaaacaaatcctaagttcgatttgtgctattgttacaactgattagcacttcagacgcactgcatccaagtgtactgcttatttaagatgagctaagaagataaaaagccagaacagcctttactatttgatttcaatcatggctatattttctgtaagcatagaatgtcctatcactctactgcaagcaccgggattttcttttctattatttaataaagtggaaattcatataaatgaagtcaaggtatagcaaccactcccaactgactactagtgcccaatagaactactgctaaatgagtaggaataagagtaggaagaattccctgtggcgtcaaagcttcctctccgggacccactgcgggacccggagcgagatccggagcgagatcccgagcgggagccggagcgggaccccggagccgaagacatgtt

SEQ ID NO: 157509 - DNA, 1000 bp, Homo Sapiens
tttttttttttcatttgcatatcacaaagttttattaatgtaattttaaggccaattaaactaattttattcaaagtaagtctacattaaattacaatattaacaatctctagacacaacgaacttataagaaaaaaaaaatagaaatctgtttggtctttcttagaccacatatcatggaactcataaatgaaaattttcaaagatagaaatgacaattaaagagtgaggattttaatatggaaacccacaaggtgtcatatttcaaacccgcatgtttcaaaaagagactcttaataatttagcacaaaatcaaattatataaacttggtatattccagaaaatattgctttaaacacttatgccatgatcaaaattcctttggtagcttttaatcaaaatgaaacatgctattatgtaaaatataaagtacttttaaatgttatctcaaaagtatctttgtcatagttacccttctaacatcactactgaactttcctttcactgttcaacctcatgtatatatacacaacacaaaaccaggtaccaacaaaatccttttaatctttccacaaaataacctctgcttcacaacatcaagactttaagtctccataaactttttacagtttacagcagagaacaaggatcgtccctgcgcatgactgtaaaaaccaaaccaaactttattattgcaatcacacaaatactgcaattaaaaaaaatcaaagagcagttaccccaatgcaaaaaaacagggactgccagactcaatcttagaatggaaacacaaacacactagccccaaaccctaaaacagagattcacaaggaactcagctgacgaacagacgcagcagggcggacaccatggccttggcacctcagggagctcacttagaaacctgacttacgaaaaatcagccatcaaagtttacaacttttggaaatacatgaaacagagaggggccagtggctagggtgcgtcatccattcgcca

SEQ ID NO: 157510 - DNA, 1000 bp, Homo Sapiens
ttttttttttttttttttgaatgtttttgtttaaaatgaaaagtttatttgctgagtacaccaaataggatgcaagcactgtcatgacaaatatacagaaatatgcagatcaacataaaacagtaatttagtttaaatgaagggaaatctctttaaatgttatgacaacatactcccaagaagaaccttttcttcagttaagttaattatacatttcaataaaataaaggataatggattagtggaagttagcttgtgaatttttcttaaaaataaaactccaactctattaatccatgccagttaaacactataactaaaatttccaaataagcgcaaaaggagatgaagcagttagttaccttttttgcttgaacagtccaaaggaaaatggttactataaatacagcaggcaaactgttagactgacctagaacatagtgtactaaatttcagtctcaaattgtgctaaatgctcatcattagtatggcacatttggtccatgatgtggtttaatgccaagacagatcccaatttgttacagaaacacatagattactgttgctttttgtttttaaatacatatattttaaaaagccaggtatacttccacatacaaaggcaggtttcccaggagaaatttataggaagtagtctggggtgcgccgtgtaacatgaggctcaccacgacgaggcgctgggtcaaattgaaggaaggaatattttaaagtgtcatctaattccatgatagcagcctggttcccacaacgataacagtaattgggtgcactgaaaatggtaaccacattccgatcatgacaccaattgtatccctccattacaagctggtgggcacgagaaaccagtgtgagaccattggcatggttaaaggtttcagaaatgtcttgtccaaatgtgtagccagcaccacgtggtgaaataccccatccaccacgatcatctggatctgaccataacagatcacacattgggccctca

SEQ ID NO: 157511 - DNA, 1000 bp, Homo Sapiens
ctgcctacgttagagttagatttcaaggcgagtcagcaaacccatcctttctgctcagtctcccgtactgttctcccaagttctttgttctgggagtcagaacccaagtgcaagaggagggcagaagagtctgatgctgttactttgcgatcctgctcttggtttccactgtccaggccatacaactctgtctactcccattagtatttaccaacaggtgttaaaggaaagctgaacaagcagcctactcaccgatctgctaggtggtcttccatgttcatggtggcttctgcagtttcattgagagtaacattgctgttaatacagatagatccagtagtagagacatcatcggtccaaaagactttgcatctcattagttgtccatagtgactaccaggaggtggctggcatctataacgtgtgggacgtttttatgtaaagaactgcctgtgtttttttttttttttaaccaaagacactgaccatagattgacttatacttttataagtctaattgaaatacttggggtactatgaaaggactgttccttgagtggctacgattagaaaatcaggactaacaaacttttctttgtctggaagcatatatatttgtgatataattttaatatgtataattttggtttaataaatcaaatctatgacaaaagttgttctcatcaaagctaataattctgcaacttccaaaaaggactttgtaggaaaattaaaatacaaagaaaaataaaagccactagaaattttaagtctgtacagaaaagaacaggttaagacaatctgtacctctacagttggagaagcccttttgactcttccctgtattgttttgctactaggcaagtatgcagcatgttcttatgaagataattttgtcatactttgtatatttcttaaactttgaaaaattgggtttctctaaatgtaattttgcaaaatgtttaaagttccacattgagttccaaggatttttaaatga

SEQ ID NO: 157512 - DNA, 1000 bp, Homo Sapiens
ttttttttttttttttttgaaagttcagttcagtttattacagtgtcaagtagatttacaactgttgcacttatcattctggtgacagaaggccaaaactgaagattgagattttcctctaataaagataggttttcagaatcttcaatataagatgttaaaattataaaggcaaagatatatacctcatgttccattccatatccttcctgctgttgtacagtttgctgcaaatgataatttaatttggataatgctttaaatcattgatttctcatgaaattacttttgagtgaaatttgacaagaattttctttatactctcttctttaccaaaacgtattagaagtccccatagtccaaaataaaatgtaaccatagaatggggagataactttagtcaaagaccaagtaaatattaccttctttgcagaactccaggttgtagtcacgtaaaagtgtggccacttgttgcttaactttttggacaatgggaaaaaagaaacaataaaagctaaaatgtggtccagcatatgaaactcttctcaaaaacagaagaaagtcatgaccattgttgggaaagtgttttacatttccaatgaaattctattccattgatctgtttggatgattgtcttcaacctatttggctctagcccataaattgtaattgattcagtcatgtaaagaaccacttttatcttaagcttagaatttataacaatggaaagcaggaaagtggtttttcattcactctaataattgtgcagggataagctagagaaaaaataaaacagaaaagtaccagtcttctgtcctcttaaattatttttcattctgattatattacaaagaaatgagctgtggaggtttggcactgttttccatcttaacagttgttctgtattgtaagattttatatgtgattcataatgtactactataacaagacacagtttttatatattactggaataatgcaaagaaaatgaattttcct

SEQ ID NO: 157513 - DNA, 1000 bp, Homo Sapiens
ttatgagcaaatagatttttattgcctgcaagctgttatactggagcaggagaatatggtatcttgacggaagcacacttgctaccccacacctggggattacttatagttgaaagaagaaatgttgagaatggaacaaagacacaaacccattggataatctagtctatatttgggtttggcaatcctttcatcccaggaatatacctgtagaccaattcaaagtactaagaaccaagattaaagattttatacacatcacaataatagcaaattaagtacaaaacgaacctggcacataaattataatttgtaaggtacacaccattttaacaaggatacgacagtgttggtgcagtggtccgaactgacttctcacaatgctgcattatgagaaatatgtatctcgctttacacagaaaacatcattttgatgtgattacagaaaaatgctcaaatcttctttaaaaaaaaaagttcatgttctgatcacaagcagagccaaggttcatttttaggtcaaactacacaaaagaggatgctcttctccaaaaaaacaaacaaacaaacaaacaaaaaaaggaaacaaaaaaaccccaaaatcttggcatttccccttttactctacattcaggcttactttttaaagaaatacaagcatttttatttggccaaaacaaacaatgaatgtaattacaaggacaaggttaaaaaaataaaaaacaatgtcgatcaaggtcttccttccttctgcaaagctgtgtgatatcagccttcttcttcttcgtcactgtctttcatagtaatgccctgaagtcctcctccttctgaaacagaggctgtggcctcctctactgttaaacgtctgtgcacagtatcataagtcttactgttcagtgttccttccaacacaccctgcaatcgaaagtccctgtaggttttcttcacaatcttgatgagcgtcttcagctggtaaatatggagttggaggtctaatcta

SEQ ID NO: 157514 - DNA, 1000 bp, Homo Sapiens
gacacagaaaaaaaaaatttaatattcaacatgcaaaacaacctttaaaagaaacatgaaatcataaagcaaagctaacagccaaccaacaaataccgcctagcaatgatttccactggatgtggaagagggttaataaagacgctgttggtaacgcgtacagaactatcactggcaatcagcatactgagctatccagtggaggccagcatcgtgtttttgctaaaatacatgttgtagaagtcataattcatagtgaagaatctcaacaggttttcttacagatttaattactctcacacaaataattcatttggaaaccataaaagatacctatttacacctaaactgcctggccttccagagcggggactaaaggggcagggcggggaagaaagcgagcgtgtcgcgggctctgtggggttgcagggtcactgttattttgatctgctgagctcaaggactggaaacggaataaaaacgcctactcgccttaggcaggataagaagttgtaaactcacccatcagcagctgcctccacttctgaggctccccctgcgggaggagctctgaacccagccctgaggccactcggtgtcccgaggagtgctccagggctcggagaaggggctcaggggtccttttgccactgaggatcaagccagccagtgaaaaagaaaaaacaaaagccccagcaggtgcccatcacccggctcccaggggtcatctgcagagtcacgtggcactctggccactgctgaagagctgctctccctcgaagggcagtggctgccccctccagaggctgcttccattcaagctcaagggcacgtgcctttccttatctcgtggagtgtccgtcctatcaggtggttgtttgtaaaacaaaagtacagtcattctgctttctgatacagactagagcaagaggacaggaagaaccagtgggctgtcaagagacacttggtttttgaaacaggacatgaaagcaaatcccac

SEQ ID NO: 157515 - DNA, 1000 bp, Homo Sapiens
ttttttttttttttttaactcttgtcaaaaagatttattaacttaaaatagaagtacttcaaatacagacaaaatcaactttccattcaagtttgaatgttcaatatacaagtatggaaaagaaaaaaaatctgaatcttcatgttgtaattttattttatttttttaccttttaaaaagtttttggcactacaaggttctgtaaagaatagaagtgacaatttaaaacacatgaaattctttcctaacttttaagaacaatatataaagtctgaagcaaccaaagtatgaatacagctaatagaaaataaagaatgtaattttttaaattctctctttatacaattcatcaaggttaaacaaaacataaaattcccttaaaaatagggtaataaaatagatgaaatttgtatcactcaatttggtgatactagtaaaaactatagttcatatttatatacaaataatacagtctgtaaaaacagtcttagaatttaaataagctatctaaacgtgttaaaattttaaatcaggacctgatttgttttgctttccattaaatgtcactttttctgctgaatgtaactgacattgaggtacggatacccttgagacagcaggattggctggttgctgtgcatcggtagaccagctgaaagaaaatggactcgcattactccgacacgtttcctcttggtgggtggggacaacgctctctacaccgacgggtggcacatctgtcttgagtatagaaaggtttgttgggctggaatcgggcatttccctgatgcatgaagttttgatgcaaaccataaggccacgaagctgggacaagggggaaatggggacgcggtgcatgttcccaaggaattggaggagtcagtcctcgaaagcctggctctgaattccccactgcaccactgtttaccagggaatttggagccacagtacggggccagtgtccatcgtgagacgtgttagggattgccacaggtctggc

SEQ ID NO: 157516 - DNA, 1000 bp, Homo Sapiens
gaacttaaacacggagcatttattgttagaaagggcaagtcttacactcaaataggttttaacatgaacacattaaagggagatggccctggcccccacagtgtctgctctctccaaggcatgcttcagttatactgcagcctggccaaccactgttccctgtagaagttgaagttcctctgtattatccagcagctggaggagacggagtatggcagactctggaatgccatttgtgtgagttccacctactttctaggcttcagggtaaatggaaaaagtcgcaataggcgaaatgtatttcctaaaaagctggacagaggtatgtgacattcctttgcttaacaagcaaaacaaaatcaatgagtctggtgaactgacgccatgacagcaatgtggagaagactgggagtctacactgggaatggtgctgtggacgctctgggcacagaagcccaatttggaacctcttctcagaagcgtgggaggtggtggaggccaagcccaccagaggcggggcctctccccagctgcctcgggatcatctctggttctcctgggccaggctccatggagtcatcaatcctcagtcacaggtggaggaatgagctgcagctggaagttctcattctggaagatgctgttgaaagcaggagcactctgcgagccactgaatggcctatagctctcgctgctgcgattctgggagagttccgtgaggagagccagcctggagcttcctcggtagagacggcaaagctgatcaaatgcttggatttgctgtggatccagaacaggttctgaggttccctttttagcagtgggatcccctttggactgatgatacgatggagacatttttacctgtgatggggttatccttccctttttaatttcagatgaattttcactgagttttcctactttgttacttgaactgcatttgtagcatgtccatcttgtttggccctcaaattccacagtgcattctttgttttgt

SEQ ID NO: 157517 - DNA, 1000 bp, Homo Sapiens
ttttttttttttttttttggtttttttaccacaaaaaatggtatgaggcaataaatttattacattgatttaatcattctacactgtaaacatatatcaaaacatcacattgtactccatatatataatatacacaattatcaattaaattttaataacacaaaggacaaaagaaaaagtggcatagttttgaacaactcccatttaaaattaattcatttcaaattaaactattcaactagtgaatacctattgccaggcacttataaaataatgttggctctttagtacttagtaaatttattttgatgcatgaccaaaataaaagggaaatttaacatgtatatcatatgaaaataggttttagtgaagaaataaaaactgagtttgattttaaaatccatgacactataaacaaactactacttccaacataagctaaagttaattcataaagagttctatgtactggttaagaagaccccagaaactaagaaatgaacaacttgatatacactcattttttttttatacatacatctttaatgataaaagaagctgagatgctatgcaccaaaaaattcgtaagggtattgttattttacttttttcaaaaataatccaaataaactatagatacaaattctgcggcagggcaacctaacttatttcagggacagataattctagtgtacttaagatctgtctaagtatttaacattcctgtaagcattataaaaaagaataggaaaagaatgaagttgtctgttaaaatgttaacagtagttctctctgaaagaagggattgttgagagttttttaccttctttcttatagaggtataacctatacttatgaagtcagagaaagaaaaaatatttaagggtaaagttatgtattttaagttttgcatactgaatggtaagggatgtagattttattcttattgtgaatgagaagtgttgaaggattttaatcatcgagttgacgtgtcatgaac

SEQ ID NO: 157518 - DNA, 1000 bp, Homo Sapiens
tttttttttttgttttctgaaatgtttgaagttaactcattttatttctaggatttggatttcaacattttaatttctttggaatataagtcactttttgcaagctaaaaaatagaatcaaactaaggtgatctagtcctctaggcatccaggctgatccttggaatcatgagcagaatgatgacatactacaaggtgctagcaatacggctataaactctaaataataaccactacatgtttcattaggaaacagccaaaagtccggccgttaaaggaataatctgcagaacatcttgatttacaagggacaaaatgatgcaaattatatgctgtccaacctactggtgaactggatcagaatggtccaaggactgttaaacagaggaagtatttacattttgaaaacttgctctgcaggataaaaaaattcctggttgctgtcagtaagaaagcaagtaaaaaaaatattacagatgaactcactgatctttgattttactaaggtcttccactggaacatgaaggtagggataagtgtacaggataatatactcagatatttttaaaataaattacttaataataagaaattagccataccacattgttccatttgctacaagaacaaattggcaatgaagactatttaaaagaaatgctcagctctacagagggtggtggcaggcaacacttttccattacagaataacctctattcttccatgatacatattcctgtggaaaaacttgtcagggcccagggatgaaaaatagagcttgtcctaattagctaactgtaggttcacttaacatctttgggaaggacccaaaaaatctggccattattttcttaaacatctgcaagctgcagaattccttagtcctcagctatagtttctgctagatatcttaaagctgggacagttccactgtgactcctcctcagctatggggtgggtgctagtcatcaaagtctggaatgtcatcataggagtaa

SEQ ID NO: 157519 - DNA, 1000 bp, Homo Sapiens
ttttttttttttttttttttttctcagaataccaaacacacctttattcaagtggaagtacaaaagcacattcctaaaccaaacgcatacatgtgatttttacatattctgctttttagggattacataatcctgtttcagtcaccatacgtgactactggtctctatacataagggtatacatgtttgacaggaaaaaacacatgcatttttcatttgcttttacatttagatcaattcatttatatatcaatttcatttagattcctaccttgccttgatgaaatcctactcttgctgatggcaaagaagtaaaatatagtggcagaactatcctagaggttagccataggaggattatagagtgagcaacatatttttatatatttgttgagggtccctactgaatattataacactgaactatgaaagcctcaattgctggactgacaacaagaattttaaataacatttgtcttactcacaaaatgttataaagcttaagatggaaaaatacaaaatgttttgacattacctaaagaatcatgaactcttgttaggtatatgatggtggccctgaacttgagccaacatctgtaatcacttttatcagtcaaaaagccatgttcttttatatagcctgtagactattaaaatacaaaaatgtggtaatggataaacaactatacacaaagccctcacacttcaaatactgtcctggattgatgagagaggagcagaattcaaacatttatctgcaatcctaatggttaaaattttaccaggaacagacctgccactctcttgaaatactgtctctgagattaacatacgaacagcatcatctctgttggaaggctacattcccttatgatgctgatttgtgtgtgtgtgtgtgtgtgtatggttttttgtttttgtttttttgtgtttttttgagagagagtcctgctctgtcgcccaggctggagtgcagtggtgcaatctcggctcactgcaa

SEQ ID NO: 157520 - DNA, 829 bp, Homo Sapiens
cagagtctgatcttatttatttgttactcaaaaaatcttatttctgactggattcagacttagaagtagaagctcgcagagaggaaagtctgcgtctcttcgcaatttgttcctggcgcttctccttagcctccttcattctcttggccaaaagtttagcatattctgcagcctcttctttatttttcttggtacgctgcttcttcagagcaatacgccgccgtttgtgctgcaggacacgtggagtaacaagacgctgaatcttgggtgctttggtcctaggtttcttaccttctttatttaagggctttcttacaacatactggcggacatcatcttctttagagagattgaaaagtttgcggattctgctagctcttttggggcccaggcggcgaggcactgtagtatcagtcagtccaggaatatccttctctcctttttttacaataaccaagttgagaacgctcagatttgcatccacaatgcaaccacgaactgattttctctttctttctccagttctccttggtctgtaacaggaatgccccttactcagtagcaggcggacacggccatgggtcaagacaccctgcttcatggggaaaccttgtttgtcgttcccaccactgattcggaccacataacccttccattcttcacccagagcgtcagcagcaacttctgtggccatacgcttctcatagaaagtacgaagtttgcgttcatcgtccacttcaatgagtttctggcagccagtggctgggaaggagatgttcagcttcatcttgaagcagctgaacgcctccgaggcgccacggaaaagagg

SEQ ID NO: 157521 - DNA, 1000 bp, Homo Sapiens
tttttagtttttttctctttatttcttatggataaaatgcaacatacatattctacttaacaatgaaagctgatggaacagaagaatcaatattagcttttgagatgggcaaagacataaaacattggcgttttctagtgtcatgatttgtcaaattagttttagaaaatagttggtaaatgtctgacagaaaaaaatttttaattaaggtgtatgtaagtgtgtaaaactgttaaaaatgcttgaaaacaaacattttaatcccatgacatattatttttatttgtggaaaacagttaaaaactgcctgtcagagaaactatttaatcctttaacataaagtcttttaaggcacataaacatttatgaagaacagttgaaatatgctcgctaggaagaagggacattttaactcatatgagctttcagtcaagtgaaatacgtggacagcagatgaaaatgcctgaaagaaaagatggacattaattcctactcctgaacgcttgcatctgcacatggttagaaactcaagacaatgagcaggacacagaattctctcagagtataccacatagatcacagttacacagtatttctggttttaaagctttgctgaaaatatttttcatcattaaatgtatattattaaacatacactgaaagctaactgaagtgatttaaataataagattcaggcacagtttgtaacaacaattgttaaagtccattcattttttttttcccaagaaaggcaagtgaggtagtttatactgtatagacgttgtaaatagttgataatccagtttgtttagagatcattgactccaagaatcatatttccaagtgagctgcttaacaaagggatcttcttttgcaggatggaggaaaacaatgaatcaactctaggatttttttctgaataagcattcctaaaatgttagttccctctaacactttctcctggaggacattattttcccaagtgtataccaagagcact

SEQ ID NO: 157522 - DNA, 1000 bp, Homo Sapiens
agaaaaaaatagtcttttattttgataaacatgtagatagcagtaactataaaggctagtatacttaatatgtacattatatcttttaaaggagaatctggggcatttccttgtgttatatacaataacagaatcatggtcccttcaggttattgttcttttgttttaatacatacatcttgagtttcttctgcatccttgttctccttgacatcagccactctgtcaaatctctgtattcctaagtttcttttctaagagttattttcctgcagaaattctccttttatccaaatcctggtcaagcaggtgtcaaaaggtctgatgctgttagtcagggacatcaattctctcttttcacatctcattacagaggccctaagctcagatacccactggtgatagacagggcaggtcacacattgagagaagaactccttacagtactgaaaggaaaggaaggtccattagctctgggattagtgcttcattctcctaaatgctacttcatcagaacttacaaaggtcctcattcagcatattcactcatggctgggggaacaggaaggagttactgatggcaaaataagcctggaaaacagaggaattggaatgtgttttagactcagaagggctggagggagctgtatcaaattatagactgaaccatagactacaggtccattgagcaaggctaaatgttaatattttaatgatactgggtagcagctggcaaaggtggaaagttaagaaacccagtccagaactagatgcaataatatcgggaaggatacataaggtaggtagaaactttctaggtggagaaacaaaggattcaaagagtaaagggaagcagagccagtaaaagggaaaaaaggaagagatgcaggtggtagaaagagcaccatagggtagaactaagtgaatcaggtgttagtcaaaggacagctgagaaacaggtacctcaagggtttggctgtgaagctctagaggaatatgc

SEQ ID NO: 157523 - DNA, 1000 bp, Homo Sapiens
tttttttttttttttttttttttttttttagtgaacatattttattacatatgtataatctgagaattgaaaatgctccatagactaacaaatctaaaaatcacaatttaaaaatgaagaaactgaaaatttcttttaaatattttaaataatgtgtactttgatttatataggtcatctctttgtgaagtatatatgcatgctcacatagaaactcatacacacacacacatgcacataggctttcatagaagataggtatttaaagatgtaaaaatagaacaaattttttccactctgaatgtgcccaaattaccaatgtacttttgctttgcaagtgcatacaatccatttgaaatatgcatatatttgtgtatgtgtatatatatgtgtatatatatacacatatacacacgtacacacatattttgaaatatatttcagatgtataaatataatttacatacaaatataatctatatatttcaaaatatatattcagaatgattttcaaataatctacagaaaatattttaattgtaaattgcagtatgataacatacaatgtctgtattattaacaaataagtacacatctaaataaaaatgttacacttttaatgtagctataatttccacaagaatttgaactaatgacataatacctatgacacatctcactaacagattgaacaataaaagaattaaattattgtcaaaataatgagattcaagtaatttaaatgtcaaaactttaaaaaaatatttactttaaaaatcagatactttttaaattaaattttattttttgagcgacataagaattgaacatatttgggagatacataataatgtttcaatacatataatttatagtggtcagatcagagaaattagagtatccatggtttcaaatatttatcatttctttttgttggggacaaaatctccttttagctatttgaaactaaatggaatataatgttcttaactatagtcgt

SEQ ID NO: 157524 - DNA, 1000 bp, Homo Sapiens
tttttttttttttttttttggttagtacacaaatagtttatgcagtaaataactgtggttacagttcattgttgtcagcaatacagcattttccatcacaattataggtgaaacaaaacctcatgaagtagtcatagcacattcatgctagcgagagcatattacaaagcaatgcacgtgcattataggggcagacaaaactggggaagggctatattttcactcacctctggttaactttgtgtattttgtcattaagacttacattatgtttgggtcaaacaaaaaacccaaagagattttataaaagtttacaaccattaaacagtattgtttaatcccacaaatggataaagcaaactactatagctcaacaatacacaaaccaggactaaaaatagtcaatctatgtatatagctagctaccatacaatagatattgaatatgctgagtctttacaaaggcattgactattttagacgagcaggttccagaaatacacttgtttgtttccaatgagaactaactgtagtgccatttcagttgaagactatgcactcctcagtgtcagacgtgaggataagcaaactaggggaaggcagaggagggttaggagggagacctgagcggactctttggacagctcagcattactttctctgtgcagatccagacctggttcacaaagtagaacaaagtgtattgaaatttttggccctcaaaaagggcatttgtacaaagtcccatacttacagcacagattgaatggtaactgagtgcctctcaaaatgaactcttctatgttagaagaaaactcagggccaaaggttaatggaaatcagtgtttgaattactgtataaagataatttattccaaaatagaaaaaaatgaattttagagaagtattctcctggaaactagcagggggtgggcagagagagagagagagagggagagagaatcatgctatgtgttttattacttagaagaagaaaagt

SEQ ID NO: 157525 - DNA, 1000 bp, Homo Sapiens
cacagagaaatatttaatggagtcttccaaagagaagtgatgtctgaggtggccacaggatggtggattcccacactccctctccaaaaaatatcctttctagagtaagcttttaggggaaaacatgtgcaactggtcacatcacagactttcttgctgaaacccatgactgctggggaggttagataagcatctttgtgagaggttaattacgctacaggcattgttttaaagcccttgatacagaacaccttggtatgcaggagtcagacattggacatctggcgaggtgcagtggctcacacctgtaatctcagcattttgggaggccaaggcaggaggagttcaaggaggccaggagttcaagaccagcttgtgcaacagagtgaggccctgtccctacaaaaaattctaaaaattagccaggcatggtggcacacgaaactgtagtcccagctactcaggaggctgaggcaggaggattgcctgagcccaggaattgaaggctgcaatgagctatgattgcaccactgcaaaactccatctaaaaaaaaaatggccattgtggtggtttcacttcaagatggtatcactcttaccatgcaacaggctgttttcctatagccgcattggtaagatccaattctttggtttgctgacactggagaaacccaataagtggtggaagatggagcagtttctactgctgtgagttggggtgaacccaccaacagactgctaattctctgctgagggctctgtcccaagtaggagccctccattaccttgtgggctcaaagcaacttagcctctaaagcagctcccctctgtcttccaagacctggaggaccctcttccctggactcatgaaagggatacgtgcagctcttctgggcggggatttatgagaatctcgggtctttgcaagagcctcttggaagattcgacctcagcaggccagaaagtctttcccttgggaaaccagggagcactcagggag

SEQ ID NO: 157526 - DNA, 1000 bp, Homo Sapiens
catgcccaagtttcaataaaaaagaccacaaagcatataaagaaataggtaagcacggcacattcaaagagccaaataaatctccagaaactaaccctaatgaaacacagttttcagactttcttggcaaagactttaaaacaactgtcttaaatatgcttatattcttaaatatgagccaaagaagaacacaggcagataagtaaagaaaatcataaaaaagatacatgaacaaaatgcacatattcacaaggaaatggaaattagtcagaccgggtagctcacgcctacaatcccagtacttcaggaagctgaggtgggaggactatccgagcccaagagctagagaccagcctgggtaacacagcaaaaccccgcctccactaaaaatcaaaaactagctgggcatgatggcgtgcacctccagtcccagccactagtagggccgaggcgggaaggccacctgatgccagggaagttgaggctgcagtaagctaagattgtgccactgcactccagcctatgctacagagtgagaccctgactcaaaacaaagcaaaacagagataaaagttataaaaaagaacctaacagaaattaattctggagctgaaaaacacgataactgaattcaaacatttactacggtgtattttttttttagacagagtctcccttggttgcccaggcaggagtgcagtggtgtgatatcggctcactgcaacctccacctgctgggttcaagcgattctcccgccccagcctcccgagtagctgggactacaggtgcacgccaccacacctggccaacctctgtatttttagtggagacggggcttcaccacgctagtcaggctggtcttgaactcctgacctcaagttatccacccacctcagcctcccaaaaatctgggactgcaggcgtgagccaccgcatccagcctaatgttttaatggcagacttgaataggcagaaaaaaaatccttaacgttaaagaga

SEQ ID NO: 157527 - DNA, 1000 bp, Homo Sapiens
ttttttttttttttttccttttcttcagagtttattttgaattttcatttttggataaccaagcagctctttaagaagaatgcacagaagagtcattctggcacttttggatagtacataagattttcttttttttttttaaattttttttaatagtcacattcagctcgcttgctcaaaccagactcccacattgggtgagcaagatgagcccataggattccagagttaatacgtaaccgtatatacaaacagccaaaaaaccataatggtgccacagggatggagcagggaagggcatctctaacgtgtcctctagtctatcttcgctaaacagaacccacgttacacatgataactagagagcacactgtgttgaaacgaggatgctgaccccaaatggcacttggcagcatgcagtttaaagcaaaagagacatcctttaataactgtataaaatccaggcagttccattaaaggggttaagaaaaccaacaacaacaaaaagcgagggactgtctgttgtcactgtcaaaaaggcacttggagttaatgggaccaggattggaggactcttagctgatacagatttcagtacgatttcattaaaaggcttggatgttaagagaggacactcagcggttcctgaagggagacgctgagatggaccgctgagaagcggaacagatgaacacaaaggaatcaaatctttacaaccaaattgcatttaagcgacaacaaaaaaaggcaaaccccaaaacgcaacctaaccaaagcaaaatctaagcaaaatcagacaacgaagcagcgatgcatagctttcctttgagagaacgcataccttgagacgctacgtgccaacctaagttctcaacgacagcttcacagtaggattattgtgataaaaatgactcaagcgatgcaaaaagtttcatctgttcccagaatccgagggagaactgaggtgatcgttagagcatagcgacatcacgtgcggttt

SEQ ID NO: 157528 - DNA, 1000 bp, Homo Sapiens
tttttttttttttttttttttttttttttttttttttttttttttttttttttttatcctaggaaaacctttatttcctaagaaaaaagacagacttagctgtcaccatcaattccatcccttttcctgccttgtacattatgcctccagcagtggtgatcttctttcaagcattggggaaaggccaaaagattcaccaacactggtcttgatgttattgactcaaaagtagcagcaacttaactacagactttagctgtgtgataaaaataaacatgtttggcataaagcattccattttatctctttcttattgtacccgaaaccatacctaaacttattcaggcaatgaaatttataaaataatccgtccttttcctactaaaatgaatatgaaaatattttaaaaccttagtaaactaaatacctcacataaacccgagtaaggtaaagagataagagagagcaaaattatgtaagatttgtaatgagtaaaaggagacatggatattgaatcatttcatatctacctacatgtaaatgtaggtagatatgaaatgtagtaggaatgatatgaaatgtagtaggtagatatgaaatatagtaggaagagaatactacctacagtaaatgggtgatctagtaagatacaattgatcaaaattaatgaaaaactaaaaaaaaaataaccataacttataaatatcatttatagagctatcatttaaaatttaccaagactataggaaaagatttttaaggtagtaccctttcctcaggtgtcccgcgtccgccgattcctcctccctggtcgtcgcgtccttggcaggcgtcagaaaaatggctacaaacttcctagtacatgagaagatctggttcgacaagttcaaatatgacgacgcagaaaggagattctacgagcagatgaatgggcctgtggccggtgcctcctgtttggcagcgacaatgaggaggaggacaagaaggcggcacagctgca

SEQ ID NO: 157529 - DNA, 1000 bp, Homo Sapiens
aacataaaatagaaactaactttatttctctggaagaagcaggtactgaatgccggagcagcaacttcgccaacaggctggtgggaaaacatggaaccgcgtgggggaattgggtggaagaggaagcactgatgtccctccagggcggctgccccttggtctccttccagccctggggccttgggccctggtccccgccagagaatggtctggcaccctttctccgcttcctgagccacctcaggctatttccaggcacaagatcctgaggccagccaagtcccattcaagtccatggtaaggccacaagtcacattctgcccgacaccccagctgctgccaggggccccctggaagaaggcccagtcctaggaggtcccaccgggtgccggtccgcctctccctgtggccaacacatcccgcctgcccaggtccagcctggtttcctcccagtctgtcacccagggcagggcctgggggtactactccacccacaggccccgcccaggaccagggccagaggcaggtcatacccagagcctgctggggcagccctcaagcctgtcttcacccggccccttccacatcttggcaggggcaccgggactgaaccaaagtgtgcagggacagcgctggtgcaggagggatgggcagggcagggctcccagcctcccgcagccttggccttgctccatccccgggagcagcaggagcagcgggtcctccaggactggatgggggcatctccccactcctggtggacggacaggctcaggtgattccttcaggcaggccctctggctctccagacgcatctcagcgcttgtggtgggcagggccccaggagcccagaaggtggcagccggcctgctccaggttccagtcgaacatctccagcactttgtggcactcccctctgggccgcagacccagcccgaagagctgctccaccatctggatcttgtctgctggccggcccgcctctggcccatcgccaggg

SEQ ID NO: 157530 - DNA, 1000 bp, Homo Sapiens
tttttttttttttttttttttctggaaaacaaggtttttttttatttgtagctatagctacaacttggcagcatgggggagggtgggaatgtcctggagggtctcccagccctccgcaagcagagtacaaaggctgctcggggggccggccgagggcgcgggtgcagcagtgaaagcagcagcactaaacctggtgcccccctcaggtggggtgtctggaagacggtgggcaatccctgcaggatgggcgaggaccagaccccagggcggggatcctgcatccctagaccatgttgggtcctgggtcagggcacctgggatgctagggaggggttggaaatgggaggggctagacatcaaaacaataactgaggtgggggcaggtggtctcagtgtgggtggtccacaatggggcatggactgcggtctgaagagggcctgtcctcactcaggtctgggctctagcagtgtggcacttccgacagagcacgtgaccgtccagggggaagcagccattgtcatctgcctcaatcgacaggggcttcccgcagtcctcacacttgtaacacttcatgtggaagttcttgtccagggcgaccactcgcacagtctcatctcggccaggctcaggcatgatgggctcagagcagacggagcacctcggggcgtactgcttgtggtagtcggggacacagtggggccggttggcctggtccacgatgaaggaggtgccctccagggggcgggcgcagaccacacaggtgaagcagtgcgggtgataggccttgcccgtggccctcagcatgcggtcagtgatgggctccccgcaggtgttacacttctccagggtgtcagtgtaacagccctcgcagtacggcgccccctccagactgtagaactgctggccctggagctgctgcgcacactggtggcaggtgaagcaggcgatgtggaacagctgccctagagcgcggacggctggctgcgcccgggccagggg

SEQ ID NO: 157531 - DNA, 785 bp, Homo Sapiens
aaggaggagagaaaattcctattcagaaatgatgtgtagatcccatttcaaaggctgcttcctgcccttgtgcgctaggatttgattttcatgtgaagggttatcagtgccattccagccagccttccatgctggcctgagtggcccactcagggtccgggacaggcatactcatcggaccagtcggagcagtgctgtacatggtcgcggcagagatgcctcggtatacagtcgcagtacttgaagaaggttgaaggacagcgccaccacccagggccgcagggtgggcacacagttactgggctcagttcatctgaacagtccccgcagttgttagtgccatcacatttttggtctgagtagatccaggaggccgggtctccacagtgggccacaaggaagtgggggaggctctggggcacatctcggcacaagctctcatcctcgtcctcgccgtgggtacaggtgcgaacgccatcacagaccccactggctggaatgcagctcctctggtcatggcacaagaagcctgtcctgtttgtcagtgttatacaagcttgggctcctggggtgcatgatgggagtccaagaatggtgaccaaggcgatgagggccgccacagttgccaggaggagcagcagagaggcagagaggcaggccccgcgacgtgagcagcagaggtggccgccgcctgcttcccctccagggtgggctttggattcagcagcagtgtagccattctctccctgggggaagaccttgttcatgtcttcggtttcctgctg

SEQ ID NO: 157532 - DNA, 1000 bp, Homo Sapiens
ttttttttttttttttttttttcagggtcattcatagtaaaactttattgaacagaaaacccagcaaaggttttcacctccgcaaagttccccttagtttaaagtaaagcactgcattttaaaaagcaattatacataagtctttcctagaaaagtcctgctaaaacatgtctagcaatttcattgattatataaagtagtacacttagtgtaatttaaacattccaacaggaatcaaatcgtaccagcagaaccacttctgcatctatgacttctatgtacaaacacacatgcagacacacacatttggaaaagttcctcaagcatagacatgcaacacctaaggccttctacgtacagtgcttattaaactacatagagtatatattaaagctcttcagaataaagacatgagaagccttgggcattttttgttcaccaatttgtatcacggcttcacgtttctgcttttgcttgctcacaaaagcatatcatcatccacactgttttttaaaaactcatcattgccatgtccaggagaggcaatctagctggagtcaggtgatccagtccattcctgtcaaagcctccaacagctacagcacaaacaccatcagtttgcgatggctggggggccttctggaagaagagaggcaaagaaagtcttgaagacaagccatgctgtgctcataaaggaggggctggtctgctcgccatctagtacatccctgtctggagggaggtggttggggtcttcagtttcaggatcagtgccttcctgtaagttattgttggggtcctgatttacaacgtcaggaggaggaccatcatttgggaagttctgaaccggcctcggtctaaatggaaaccacccaacgtgatgcaggtacataacaacggtggcccccatgaccatgaggaatctgctcagggaggagtagaagtagaggatactgagaaaaacagaaaatgtagctgctgaataggtccaatccaacca

SEQ ID NO: 157533 - DNA, 745 bp, Homo Sapiens
ttttttttttttttttttactgtgaatatatactttttatttagtcatttttgtttacaattgaaactctgggaattcaaaattaacatccttgcccgtgagcttcttatagacaccagaaaaagtttcaaccttgtgttccacattgttctgctgtgctttgtccaaatgaacctttatgagccggctgccatctagtttgacgcggattctcttgcccacaatttcgcttgggaagaccaagtcctcaaggatggcatcgtgcacagctgtcagagtacggctcctgggacgcttttgcttattttttgtacggctttttcgagttggcttaggcagaattctcctctgagcgataaagacgacatgcttcccactgaactttttctccaattcgcgtactagccggacttggattttctggaaagatttcagttgaggaacgggaacaaagattatgatagctttccgaccaccaccaacttcaatttccttagctgccgtaatattcagctccctgagctgagccttgaggtccgagttcatctccagctccagaagagcctgggagatgccggactcgaactcgtccggcttctcgccattgggcttcacgatcttggcgctcgaactgaacatggctttctcctgggagaacttgccgagcgccggcttaggaagagacccaaatctcgcgagagcacgtcaaaatccggcgtccgaaggcaagaggcggaaacagcgc

SEQ ID NO: 157534 - DNA, 1000 bp, Homo Sapiens
tttttcaactttcactttaattttctttagttgcttagttgtacattttgagaaggcaaatccattggaacttggggaggcttagaacataaatcagtattagaagtaaagggaacacacagctaaaagttttactttaatcacaaattcacaactagagatatcatttgcatatcttagaacgctaaagacctgttaaaattttttaaccaatcagcaaaaatatgtgccccacagatttctaatgttcataatttagaatttatcacatataatatttattaatagtttatttgcaaaattattattcttaaaacacttctttccaacacatttacaatgttcatgtgttttaaagaaaaaaaccaccctcatttaaaaatgtactactgactttaatgtgtggttataccagtgccaccaaattagaaaagaaaaagaaacatacagctgtattggatatgtagttactactacaaataatgacaacacacgtcctatacaaagatcatattcacgcttttctaccacttctcagtcattgtcagaaccatttggaggtaagaaaaccaatgcatcattgaaaatatgcccaaatgccctaaggcggtataccccatacatcatcacatgcatctgatttggagtcagtccattaaaagtaacagccatatctgaacaacagccttctactacctggttggggtgataagtcattgcctctttaatagaaagcccaacagatttggtattaaatacatcttttccatcagcatcttctgcattttctgcaaatactccagcatatttcaggcaaactgctagctgtttatcttcagatatcttccaaatcatccctccctgttcaggacacttttctgggatattgagaaggctgttaagtcttttcattgattctacacttaagacaattcctccttccatacccacatattcaaggtctccagattttatagtgtggcctagatagaaaggctgt

SEQ ID NO: 157535 - DNA, 1000 bp, Homo Sapiens
ttttttttttttttttttttttttttttgcgacacatgcacacgtatgtttattgcggcattattcacaatagcaaagacttggaaccaacccaaatgtccaacaatgatagactggattaagaaaatgtggcacatatacaccatggaatgccatgcagccataaaaaatgatgagttcatgtcctttgtagggacatggatgaaattggaaatcatcattctcagtaaactatcccaagaacaaaaaaccacacaccgcatattctcactcataggtgggaattgaacaatgagatcacatggacacaggaaggggaacatcacactctggggactgttgtggggtggggggaggggggagggatagcattgggagatacacctaatgctagatgacgagttagcgggtgcagcacaccagcatggcacatgtatacatatgtaactaacctgcacaatgtgcacatgtaccctaaaacttaaagtataataataataataataataataaaagaaaaatagttttataccctagggtaaaatgtcacaccctacaaatgcaccccttataaatacttgttgttaacatcattgctattaaactctgtttatggctgttttgtttctaatattcatttttaaaataaatatttcaattatgaaatagaccgtaaacccattgttcacagattaatcctatagtatgcatcacatctatcattgctactgattaaataaagcaaattcataacaaattgtatctctgatagaacataattattgcatattgaatatgaaatcaaaatcaaattagtttcagtttggagggaggacaatccgactgtgaactcaccatgcaaccttggactacatgtccttgtctgtaaacacaaggggctgagtcaggtgacttcaaagtctcttctagttctatttgattataagttgcatatgcatatcggcaatgtgaattactgattaatcacgcttgtatttca

SEQ ID NO: 157536 - DNA, 1000 bp, Homo Sapiens
tttttttttacatcacaacatcgtttattatgtgaattttttacaatacaaacaaaaaatacagaaatgcaatatatgaatacagctaaatgcagaatggtgacttttttctcttcaagaggccatgattcccatttctagtaaaataaagagactgcatataggtagaaacaggttggtcattagcttcacaattttgcctagaaatgatctataaatgcatttccccccctgctacttaccataaagtgtaaaaagggagttaaaggaaagtttccttgttggttcctaccatatgaaagatgctatattctattttagcagtgccaatatatggaaaatatctaaattaaatgttattacaaaaatgaagcagtaatgagattctggctaaagagggcactaaatgagaataatatatatttaaagaatccaaaacaaacaaacaaaaagacgttgttataaaaaagctctaggtgcacagtaagcatatagggttttttttttttccatgtgtatttttaaacaatggaagtgtcaaaaaatagggtcaactgtgttagactaaattacattattgtatatgctgcactgaatggaacctttgtattgtaattatcatagagaagcacagtttgcatcatattatggcaatttatcctcaatgaaaatcttccagagtccttttattttggaatatcctgtaaacaatcaaaccaccagaacatgattgtacaacagtaaaatgttctcttgcattaaactgaagatatctgtttaataaaaaaagaaaatgtaggaaaggtacttagagctcttactttctaagtacagaacaccctagacaattcaaggcatcttaatctccatcaagaacaaaaaaaaaaataatttttgtcatgctgttaaatccatcattatggataaaactggtgcaaattggtcaaacggatccaacaaacactgatgtccaagctggcatattggcaactaatacgtt

SEQ ID NO: 157537 - DNA, 1000 bp, Homo Sapiens
tcaaggtgaaatgaaatgaatcatttaatgagaatcttcaaactgtggcactggctgagtactaagcaaatccaggggaagacgtgaagcccaccaaggcgcacagcctcaactccggtgcctgcccctgatctgaaatacaacatccaagagctcgaggcctttttaccacccgtttgtggagcacctgcacctttctgacaacaactctcaagccaactttcagagagaaaacatgaagggaaaaaatagatttcctttggccagacagctctttcttcctcaataaataggaaccacacttggaacaaagagacagcgtgagctcggtgggggaagcacaagctttattggctgaaagttcttctcaggagcctggtctgctgggactgcatgttcctggatgggctcccccaggcctaagctccaggtttcctctggccttccgaaggattttgtgggttacgaccaattgatcaaagatgactttttcctggcgcttgctcagctgcaaaagcttcatggtgttttgcaacttcttttcttgttcaaacaattttttatgtagtttggtgacctctgccttcatttctccaatctgctcacagtgaagggggcactggccatcctcggggagtgagactctccagagaagcttcagccgcctgtaggcctcttccagggtcagcttggccgtgctcacactgctcacaaacttgctcagtggtgctgggtgtggaccctttgttcccagctcttgacttgtggagctgggagcctcttgggtttgaatgtccatttcagcaaggagcctctgtccctggctgatctgtttgagcagggcctcatagtcctcaatcaggcccaggacatggcggccattcttgctggcccacaggtggtggccagtgaccaggcgggacacacacggagtgctagttgccgaactgccactgtcgcaggagagggagtccgtgtcattcccagagagtggaggagt

SEQ ID NO: 157538 - DNA, 1000 bp, Homo Sapiens
atcttgagcaaacatctttatttaagaaatcaaatagggtaaaaattatgcaatttcacacaaggatacaagacaaagcttagaattacttgctcaaaagttactcagaatggaacaaaattgttcaagtgctcccaattagcacaggctgtattacttgcttttcaatggacatttactattttacattaagatctacttataggaacaaagagacaattcccagccccctctggtgtatcacctaaaagactgaatacaaatgttaatgtaatccaagcttttctttgacaacaatactaaaaattgccttacaattttttacaagtacgagtatcaacagtttactgtctgagggaaaggaaatataagaatataaagtgacagaagcaacacacttcactgtggcctgcaactgctcccagcgtcctattttataaacatgatttgggttctcacattatagcaggatcactattcctagcctctggtggaagcagacatgtgacacttagcactgcacaagtgtttctttggcttcttgagtagtgctgtgtatactgcctatacatttttataacatctctaaatgcataatgtcaacgtatgtgctatcacatttcactcccaactgcagaatattttaattttaaatttatctaccaaatcttgactatgacatttatttttgggttgttacattaagatcaacctatctgggccgggcacggtggctcacacctgtaatcccagcactttgggaggctgaggcaggagaattgcttgaagtcaggaggcagaggttacggtgaaacaactgccattgcactccagcctggacaacagagcgaaactccatctcaaaaaaaaaaaaaaaaccccaaagatcaacctatctgaattgggtaagtcaaaagcttattcctggccgggcacggtggttcatgcctgtaatcctagcactttgggaggctgaggcgggtggatcaactgaggtcag

SEQ ID NO: 157539 - DNA, 1000 bp, Homo Sapiens
tttttttttttttttttttttttttttttttttttttttggaaatgattcattttttattcaaatataactacatttaacaatcaaggtcatgtggcttagaaacctgagcttggttttagactcagacagacagttcattgtcggcagccattaaaacaatgttcttgacccaagaccagatgaagagaagggacaaaagcaatgttttcaagtacacattaaatttcattcaataatagtatgtcttcataaaactaccatgaataaaacaaacgattctaaaaggcagtgggcataaggagggctgcttcacagtctaccccagtcaccacattgaataatcgtattgtgtttatatcataaagtgaagttctagtctcatcccagtgttgagttcacctgatgaaccctgacccttttccctgcccaactcatcctgcaaatagaaatcttacttctaagggaatccatttgtctttcttcccattactgtggttcaaaaactgatactacagctgcagaaggcaacccaatatttaaggattttaatcacagaatcctgtaactaagactttctttaaagaaagacaaccagttcttttttatgtcatttatttagaaaaacccatttgcccctagtgaatgtactaaccttatttaaacaaagataagtgagggaagtaagaagtgatttgaggaatgagcctgggatctgaggcccaccacacattccttaccttcaacttacctttccagtcttctcccaccactgctccacccacctgagattctaggtggagcaatctacaggatactctctgaatgtggttccagcttctcttgcctcacactcttgctcataacatttcctttccttggaaacattgccttcatctcagccccattcagtctttacttgttcacatcatactcttctttcaaaacccagtggaaaagctcaatttctcatgtagccttacctaactccatgcctccag

SEQ ID NO: 157540 - DNA, 1000 bp, Homo Sapiens
ttttttttttttttcaattgcaaaacaggtttacttttttatcaaacaagattatcacataaaaaatagctacagtgctacggtagtatataaagtgctcaagtatcctgaatgtaaccatgagtcatgacaagtccctccctgaacgagagagagagggcgggacttctgcctggctgcttgaagaaaaatcttcgcttgggctgatgaacgtggcctgagcgggggctgacgaggcacccgggttgtcgtcctcagacaggggcgtgttcttgggtgctcccccagattctctgcaggcactgtcttgattgaaataccaccggctggggggcgccatgccctgggtctcttcccagacttcctggtttgccaaggctgcctctttgcttgcctctgcggagagttccagcacctgggcaaagctccttcggagctcaaggtcctttttcgccgtcacgtccttgagttcgctcagtaagtccagcacctgcacattttcttccgaatcaccaacatcaagttctcccaggaggcgctgagtggtcaccagttcatgctgcagggcgtctaagagctgctgcccatctccctccaggtggatggacctcacgggcagctcgtgcctggtagtgtccagggccgtggcgaatgtcctgtattgctccttgaagcgtgtggccactgcctcgaaggggctgagcatctcgatctgggcatccaggacatctgccagctcccgcttcctctgagagaggagaagcctgcgcttcagctcgtgggcctttttctgtagcttctccttctccttacacattattaataaattcttttctgcccttctttcaaactcagcaagattgttctccatctttacggatagtagcgtcagcagtagtgtctgagactccatcatttccattgcttcagataaatccgggctctttttccgaggggcagaaaatgatgttgactcaggtttctttgatattgtttttgc

SEQ ID NO: 157541 - DNA, 1000 bp, Homo Sapiens
aacctatgaaaattctttattgttaatttctttctccaacagatatatttttagttgaaatatggagccacagcaacactttgacttttcctcttcagaagatgagacaggccggggtcatcattgttacaaaagcaaggcctgtgatcgtgacaaggacaggctggggcagagaccacacactcaaccaggtatccaccaggtgtgggccctttataggagctacaaagagggggcagccagcaatgtggcctcgacacctgactccaggcactccgacctggaggagggagatgaaagaactcacctttccccaggggctcagccagacctccaggcccctgagcggggagagtgcgtgtgtgtgcacatgtgtatgagtgtgcacacgggtgtgctcactcacacagcacatgcacacatgcgctgcccctcctgagatgctctcaggtccctgccagggtagggttgtagctgtgttccccacagctgactgtcagctaaccagggctaggggtgagtgcatggtggaggacacagggtcttagcctgatgctcgaatcctccttctggaacaggctgatggtgccagagcacagcacgaaccacctacccaccatggggctctccagggctcggtcatttggctcctgtgcacttcatgacactcaggagcccctacggcccgagccccaagccccgagaaaggggaaagatttggttctgagagggtcccactggccctgggcacctaggggcctcagcatctaccagcataggggagggtggcggcccccttcctgaggactgcatctttctccagccgctctccccagatcccacacctgccagtgagccagggagataggaggaccacctccctcccagggaagggggtggcaggtggaaggacttaggtttggtgcaggaacactagacctgcccctcaccccctgcctccaggactgccattctgaactgcaattctgggcctgagttt

SEQ ID NO: 157542 - DNA, 1000 bp, Homo Sapiens
tttttttttttttttttcatgggtaattgtttttattgcattgtagagaatgccattgtccacagattacatgcagctaggtttaccgtacaaggccctggcagcctccacggagggctgggaggggcagattacaaaacacatcagtgctacttttttaaacagtatctggtggggagactctgagaccaagctgagctccccagcccctctcgaggtaccatgggggacagggaattcaccccaggccctacacaagcgtccagaggattagggctgtggtggagcaggcctgcagagtggatgaaggtgagacagagaaagcggggcgagtgagcgacagacagaaatagatggacgaaaaggacaaaagacatgcctgagagtagagagaggtcagcaaagactcaccctccaggtccttctcccagcatttggctggagagttccagcagtttggtgatttgtgggaagggtgattgactccagttcagctttctcaacaccctcccctcccctgctccccaaatacactcttccctgggccttgtccctagggacaggcctgggactcctttctgccctcaaggagggagtgtccagaaggtggcgtaagaccagtgagagccgggtgcagtggctcacgcctgtaatcccagcactttgggaggctgaggctggcggatcacctgaggtcgggagttcgagatcagcctgaccaacatagagaaaccccgtctctactaaaaatacaaaaaaatttagcccggcgtggtggtgcacgcctgtaatcccagctacttgggaggctgaggcaggagaatcacttgaacctgggaggcaaaggttgcagtgagccgagatagcatcactgcactccagtctgggcaataagagcgaaactccatcttaaaaaaaataaaaaataaagaccaatgagacggctgaggccctggggatgtgcacaggggtctgaggcggcgggaggggctctgtgttg

SEQ ID NO: 157543 - DNA, 1000 bp, Homo Sapiens
tttttttttttcagacttagactaagtatatattttaatttctacaaggtcccctttcaagttttagggaaatttaactgaagtgtatacaaattagacattgctaatatgtacaaaagtattttatacagtttttgaacgatactagctatttgcaataaacaggatgttacaaaaacagtccaataatgcatttcctattaagaagcacaatacacaacataattcaattttattaaaaaataacttcaaaatgtagaacaatcccctttaggaagaaaagctatttctgtagttcactctgtcagtaaacacacaagttgaacgctgcagcagagggctgtccttttccatggagaaaagaaatgaggcttctagggcctatcttttctgggtaaaaattccacctacagctgagatgggcagttattgcctgtggtaggcagaatttgaaaatgcccctcccactttcaatgagctaatctccagaacccgtgaatatgatgagatgagacagtactcctgcaattatgttctatcgcacaatcaaccttaaaatatatctgtgggcttgagctaatcatatgcccctaaaacaggaggacgggagagagatatgaagcatgagaaagagcaggaaggctggtttgaagctggaggggaccacataagaaggaatgcaggcagccttgaggtgagagaggggcctccagctgagagccagcaaagaactgaattccgccaacaacctgaatgaacttagaagcagattcttccccagagcctccatgaaggaatgttgtcctgccaacccttatttcagcctttaagaccctgagcagagaatccagccacactgtgccagactcatgagctacagaactgctatgggtattgttttttaaactgctaaatttggggtaatttgtcacacagcaatagaaaactaatacactgcccaagggtaacttttcttaacctaattacatttggcagtttc

SEQ ID NO: 157544 - DNA, 1000 bp, Homo Sapiens
tttttttttttttttttttttaagaatcaccactcatctttaatataatgaaaactggaaaatcaaaaaggtttatgtgaacactaagtcatgtctgggtggtgggatgacaggtgatttaaaaatttttctttattcatatcaaatttttattttttctacagtatactattagtgtgttatttaaatagatgtactacttaaataattttaatagtaaagaagatactctaagtaaatacatagagaaaaatgtaaggaattcccaaggcaccccaggttttgtgttaaaatttcagatgaaattaagtaaatgtttaggataataccagatccttctgaattctcatctcatcgacttcattttcagcatactgaggatctctcgcagggtccttgatatctttcagcgtgttaatactctttggtggaaagagcttttcatacacttttttccacaactccataggtgagtgggcatgaagctttccaatgtcattttcaggaacaggaggagatcctatttgaccgaaagaatccaatcctgctgtgataaacagcggtttattctgatccacacatattgatttgcttttgtcaatgccaaatgccaactggttgataactccacgtatttttagtaatagagcttctgatttactggtaaacattaatgatgctccataataatgtgcaacaaatcgaagtgtcttgcatattacctttctcttctcagactcaaaatcctgaaaaacatcatatttacttccaattatgaccagaggtaccggaaatgggtcaattaattcatgatcaggatgatccttcggcatattattccagatcttctgtctcatttcagaaactgctttagcatttgtctttcccagtttcattatcactttgtctacatggctttttgtggcttgcaagagattttccatggtgggccagagatcattaggttttgaaagatccagaacgagaacaagagaaaacg

SEQ ID NO: 157545 - DNA, 1000 bp, Homo Sapiens
ttttttttttttttttttttttttttttgccacttccaagagtgtgtttataaaaaaacagcaacggagtacagtgctgaccccacagagtcttccaggccagcaggagcagcaggccccgattcccggctccctgtggcccagggtgcgtgagtctgggactcctggccctccaggcccctcctctcccagagagcctgatgcagcttgtgggctggaccctggagcccagctgcaccctggtgggtcccaggcggctgagcagagggctcggacagtgtgcgtctggcctcggggtcctcccatctgctcctgggccatcgggggccttgtggctcagcccaccagcgggccacagccgcaagcctcatctttatcatcccagctcccagaggtgccgtgggcgcgagtccctgccctcgagcccggggagggtccagctgagccccctgcaggggacaccaggggcctgtgtctgaggccagtgacagaaggggcttcctgcttcccgggctgagtgagagctgggggagccggacagagtggtatttggaagccgggaggagtcccctctgcccatcctccagccatcggcttccacctgccctccccaggtcatgccctgccgtggtctgggctactgggccggctgcacgccagaccccgcagtggccccgttctcctggggggtcttggagatgtggaggaaggtggtcctcatggcccggtggcaggtgtccacgagcgcagggacgtccgccgcagtgaggccgctggtggggatggcttccagcacctgcactgtgactgttcctgaagtgaagaacttcttcttggtgttgtagaaggaggagaaggaagagtacaccacggggacgatgggcacgttctccctgaccatgcgctcgcccaggtcggccatcactgtcatggcagtgctagagcgctgccggttgatgaagaagacgcccccgaggtacatgatgaggcccacgggccc

SEQ ID NO: 157546 - DNA, 579 bp, Homo Sapiens
ttattttgttcgaatgccgtggttattttagtttaaaagcatttctttcaaagctgcttctctcttcacaacagtagagctctggcagtgaattaagcggtcgaggattcagcgaaactgtggctaatttctggttccaatcaatctcataaaatggcagagaatagtctcgtcggtaagtggtttctttataccatggctcggcaggctttgaatgtcttcgaagacaaatatatcgaatgagtgtttgttggtctaattgaggctgatagtgatattttgtcttgggtggaattgtcaagtctatgagcggtctgggagctctctttgcactatgatcaaaatggagtcttgccagctgcccagggtaatagccttgaacgtctcttccttggtgagcgatgaatatacttggcgggatcactgggcgacgctcaataaattctcgtagtcggatggcagtcatgatggatgggaatctgcttgggctgccgtgggcagagacctccttgttcttaaaagtactctgaggacagtgatgggtacagctgcctcctgctgctggatcaactgcagagt

SEQ ID NO: 157547 - DNA, 1000 bp, Homo Sapiens
acttgctgtattgtacaacaaagtcaaactgctgttagactcaggtgacagtcaaatgttggaggctgtgttgggatgagttgttacaaagcctctttcattcttcccatgccatgtccaggagttcttctctgttaaacctgaagagatgccagccctcctcagaggaaaggtctaaagcccctcgactagtatagtagttgatagaagcctggttccaaatgacgacaagaaagtgcatgcagttacattgagttgtgatggctatcttggtaagcttgtgtgacataaaagtcctctaggtaaagtaccttgccagtccatgagtcgtatgtaaagtagtacatggcaaatccaacagtcagtttgcctgatggtttttgttgatcgtttacttctgcaatcaggcagtagaaaaggggattgtccccaaagccatctctgagtaaatcagctgctgttaactccattgcatctagcatgttttcacaggcagccaattctttaatcagtcgcaaaatttctgggcagtctccagcctctgcatgtcttatttgaaagtaatccatgcttgtttgcctcatgcccatttggctcacacttggttggctcctgcctggttgactcaggcctggttggctcagcactaattggttcaggtcttgttggctcaggcctggctgactcggccccggttcccatatgcctggttggcccctgcctggatggctcatgcctgtttggttcttacttgattggctagtgcctggttgtctcatgcctagttggctggggacttgctggctcatgcctggttgccacatgcctcgttgccacatgcctggtggactcttgtttggttgcctcgggactggttggctcaggcctgtttgccatgtgcctggttggctcatgcctatttggcttgtgcctgattggctggtgcctacttgtctcatgcttggttggctcccacctgactgtctcatgtctagttgcc

SEQ ID NO: 157548 - DNA, 1000 bp, Homo Sapiens
actgataaataaatttaataaaggatgtattagacagctccaaatggtgagatacaccatgttcataaattgtaagacaatattttcaacatgtcagttcttatcaagtgggactatgaattcaattccatctcaatacaaatttcagcaggcttttttggggatagaaatcaataaggtgatttaaaatttatacagaatggcaaaatatatagattagcaaaaacagttttggaaaagaagaagtttggaagacttacactaggtgacctgaagattttctataaaggcacagtaaccaagataatgcagacgcacagaccaacaggaccgaatggtgtctcaaaatagacccactcggccgggtgtggtggctcacgcctgtaatcccagcactttgggaggcgaggcgggaggttcacctgaggtcaggagttcaagaccagcctggccaacgcagccaaaccccgcctctactaaaaatgcaaaaaaaaaaattagccaggcatgatggtggatgcctgtaatcacagctacttgggaggctgaggcaggagaattgcttgaatctgggagacggaggttgcagcgagctgagatcgtgccactgcactccagcctgggtgacaagaatgaaactccatctcaaaaaaaaaaaaataataataataatagaccccctcctgttctgtgaattgctttttgacaaaggcaccagacactcgcgatagggaaagggcaggctttctaacaaacagttctggaataacaggggaatcacgtggaaaaaatggctctgatatccatttcatttcctacaaagcaattgagatggacagagacccagatgtaaccacagcttctagaatacaatatgggaaaatatctccctggccttggtgaagatttcttaggacacaaaatgttttagccataaaaaaaattagctaaaatttgatattatcaaaagcaaaatctgcccaattgaaagacaccatta

SEQ ID NO: 157549 - DNA, 1000 bp, Homo Sapiens
tttttttttttttacaagatttagcacttggttattttatttcctcaaaaataaaacagaaaggaggcggggccccagctcagcaccaggtgggcagctcggagttgtggcctccctcctccagggctcgcctccgcctttcctcccgcccctactggcagccaacaagtcaacggaattcctggcctttgagatgtcaccccaaatgccacctgagttgagtgaagaaacactctcttggtgaaagcagaagcggagctaccaggccaggcattgctggtggccggcatcacctgagctcgcctgtgtcctgcccagcttcagtgggtcttcccccggccctctgagatgacatcctcgggccgggcgcgcatgtaccactccacccaggagccatcgtagatgggcacgtctggcttgccgcagaggtaggcccctagtgccacgtggcaggctgtgacgccagagccacacgtggccaccagtggcttagacaggtccactttcttctcctggaacagatggcggatctcctcagggctcttctccagcccctcctggctcaggaagtctgtgaaggggatgttcacggtacctgggatgtggccaggttcaatgccgtctcggggctcgggctcggtgccgcggaacctgccagtggctcgggagtccaccacctggaagcgccgggattccaggttctccttgatgtcctcgtaggtcttgatgaaggcggggtcgagctgagcgcggaactcggcgggagcaggttggctcttgccggagctgagcgggaggttctggcgcagccagtggcggaggccgccatcaagcagtgacacggcgtggtggccgaaggcgcggaacatccaccagacgcgcggggcggagtagaggccctggtcgctggcgtcgtagatcacgacgtgggtggccgcgcccacgcccaggcggcctgcgtactccgcgaaatgctcggccccgggcagcatgtggtcgt

SEQ ID NO: 157550 - DNA, 1000 bp, Homo Sapiens
ttttttttttttttttttttttttttactggcctaaaacacctaccttttattttttaaaaaaccaacacattatcagtacttcatgccagacaccattctaggaaattaactcctctgactttcacatcaatcccatgggtagctgttatttacagatgaggaaactgaggcacagaggtaaaacaactttgctgaggtcaccttgctgctaagtgacacagctggcatctagtgcagcaggctggctccaagtctatgcccctcacccctcagacgctgctcaccaagccggaggggctgtgggagcgagttagaacacgggacgcccctggcagcagcgccctgcgtgttaaagcgccgcggaggaagctgtattgtcgcggtacgcaggaaggcaggggcagcacctccctcttcaagaacgagcatctgagcttttgggggaaacctgtagctccccgaatgccatccacagagcccccctcagtcggcctcccctgaggcaccaaggctggcggaagcagtcacctgtccatctcccccacttctcacagaggaaatcctgggtggtgccgggcaatgagtcagggctgaggaccaggacagaggttgggtggggcgtctcagcattcctccaacgggcaggtctcagcgctcctccccctgctccgctcctctgcagggcccaggcgcccttggccttaggacccaacttctcttaccgccatggagttcgacctgggagcaggtgagctcctggggagtgtggactggaggtgcagggggccggactcaagcccagaagctgcctgcaccaaccacccaacttctctccacagccctggagcccacctcccagaagcccggtgtgggggcgggccacgggggagatcccaagctcagtccccacaaagttcagggccggtcggaggcaggggcaggtccgggtccaaaggtaagtcgcctcatcaccggctgcggaggggcgggaaggctgg

SEQ ID NO: 157551 - DNA, 774 bp, Homo Sapiens
taaaagattcaacaaaaaaaagtttattttccaaatttgcttttactcccaccccaaaatttccctgtttcacagttctgactgggggctcttgtttatttcactgagtcgctatacgggtttttcagtgtgtggccacttggtccatatgaagttccaggtttgtatttctggacctcagctagattaggccctgcccagagttctagcatacgtggacttccaggtgggctcttaggatttggctggtctttggggacctggagtatgacctgcagaggggtgtgagctttggagttcatctggggaattgaggttggcagctggggagcttggaattatggttggacttcgtgcttgttgtacagtctttgtgatagacttctttctgagtttcttctgactgtctggatcatggggcttgcctaagatttcaggacacagcccattggaggccttgagtaaatcaggatttttctgtatccatttggtgagggaggcagcaccagcagttgtacgggaggtcagggtcacccgagcagggggtatcttcagaggcatttgccaggtgcccatgaaggaaccccaaggatttgccttggaacggggcacagaaggcagtagatgaccacgatcgttggcaataatttgagtgtagccttcatgagaagagatgctctcttttgttggcttagtgggagaccagttctgcagatacttggatgagaaagccttttcatactggttggcactgtagttagtggccatgatctt

SEQ ID NO: 157552 - DNA, 1000 bp, Homo Sapiens
ttttttttttttttttcttttttttttttttttttgactttcaatcttcatttaatgccttagcacacatgcagagcattctgactctcagagtggaaggtacttccttgatctgccctgaccacatttgtccatccattttgcaaatgtgacaccccaatttttcatccttttttttttaatgcttaaaggcaattgtgttcagttcctttccatgcagcacacaataaggttatctatgtgcttatttcttttccaaatcaacagttcgggacaacatttcaggatccactcatcctccacggtcagctatcttgcaatgtgttcttgtaagtgtcttgcataggggtagagggaccttcttgatgacctacagactgactaagtagggggcgtactggaagaagagctaaggactattgtctcttctgccgccatcaagctcatggtgccacattaacttgtgccaacagatgcttatagaagccagtcaggctcatggtgccacattaacttgtaccaacggatgcttatagaagccactcggatttgccacagcagggaggaaggcatgggagaagaggaggagggactcaatgtcctgtgatggagtgtagaggctgctggctggaaaaaaccaggaacaatgaaaatgaggtatcttctttaggatgccatgccaagcagaaagcctccgaaaaatcccccagtcactagaacatttttcttcacaaatgacaccacctcctcagctttgctcctgacctggttaggtatctgagtgctcttagggatcttcagctgctctttggctttcttcatgtccttctccactcgttgccaatcaactttgatgtacccagaatggtttgcaagctgaaggagaaaaaatccacctcccacagctgttgcagccaactttccaaccttctggaatataaaacccgtgcaccatccagtgacacctccaatgaacaggtgggttgccacgctatacttt

SEQ ID NO: 157553 - DNA, 1000 bp, Homo Sapiens
gagacggagtcttgctctgttgcccaggctggagtgcagtggctaaatctcggctcaccgcaacctctgcctcccaggttcaagcaattctccttcctcagcctcccaagtagctgggaccacagccgcccgccatcacgcctggccaatttttgtatttttagtagagatggggtttcaccatgttgtccaggttaatttcgaactcctggcctcaagggatccgcccacctcggcctcccaaactgctaggatcacaggcatgaatcaccgcgcccggaccagtgtaagcatttggtgtgctgccaatcaaggacttatttacctttgcatccctgctctgaggccagcacaatcctgtcacacagtaggtacacaatgcacatttgtctagcaaaaagtactggaaagcagaagggtggatagagctctgcctgggttcaaatccaggctctgccatttactagctgagatcttgggcaagttgtttaacctctctgtgcctgtttcctgactgtgaaacagacagaagctttcttatgaggttgtataaagactcaatgaattaatatacgtaagatctaaaagcactttcactaatgcctaacaaaggtagtggcacacacctataatcccagcaccctgggaggccgatgcgggcagatcacctgagctcaggagttcgagaccagcctggacaacgtggagaaaccccctctctctctctctttttttttttttttttgagaccgagtcttgctgtgttgcccaggctggagtgcagtggcgcgatctcggctcactgcaagctccgcctcccgggttcacgccattctcctgcctcagcctcccgagtagctgggaccacaggcgcccaccaccacgcccggccaattttttgtatttttagtagagacggggtttcaccatgttagccaggatggtctcgatctcctgacctcgtgatccgcccgcctcggcctcccaaagtgctgggact

SEQ ID NO: 157554 - DNA, 1000 bp, Homo Sapiens
atgaataacttcgaaattatttttaatggaacatcttagcaacaaatataaaatataagaaagaagcacttaagtctttaatccatcttgaattaatctttgtataaggtgtaaggaagggatccattttcagctttctacatatggctagccagttttcccagcaccatttactaaatagggaatcctttccccatttcttgtttttgtcaggtttgtcaaagatcagatagttgtagatatgtggcattatttctgagggtctatatctctgttttggtaccagtaccatgctgttttggttactgtagccttgtagtatagtttgaagtcaggtagcgtgatgcctccagctttgttcttttggcttaggactgacttggcaatgtgggctcttttttggttccatatgaactttaaagtagttttttccaattctgtgaagaaagtcattggtagcttgatggggatggcattgaatctataaattaccttgggcagtatggccattttcacgatattgattcttcctacccatgagcatggaatgttcttccatttgtttgtatcctcttaaatgttagacctaaaaccataaaaaccctagaagaaaacctaggcaacaccattcaggacataggcatgggcaaggacttcatgtctaaaacaccaaaagcaatggcaacaaatgccaaaatcgacaaatgggatctaattaaactaaagagcttctgcacagcaaaagaaactaccatcagagtgaacaggcaacctacagaatgggagaaaatttttgcatctactcatctgacaaagggctaatatccagaatctacaatgaactcaaacaaatttacaagaaaaaaacaaacaaccccatcaacaagtgggcgaaggatatgaacagacacttctcaaaagaagacatttacacagccaaaagacacatgaaaaaatgctcatcatcactggccatcggagaaatgcaaatcaaaaccac

SEQ ID NO: 157555 - DNA, 1000 bp, Homo Sapiens
gtagagatgggatcttgttatattgccgaggctggtcttgaactctggtgctaaagcaatcctttcaccacagcctctcaagtagccgaaactacagatgcataccaccacgcccagctaattttctcttatttctttttgttgtttaattgaggggggtgggtctcactgtgtttcccaggctggtcccgaacttctggcctcaagcatttctcctgcctcgacctcctaaactgctgggaccatggttgtgagcaccggcctctgtgtccagcaatcacaagaggtctttataagtgaaagagggaggtaagagagtcagaattgaaggagatttgatgatggaagcacaggtcacagagggagatttgaatatgctttgcttctggctttgaagatgcatttaggggccatgaggcaaagaataggggtggcttttggaactgggaaaggcaagggaacaccttctctctggaacctccagaagggatgcagtcctgctgacaccttgactttagccttaatagacctattttggacttctggcccccagacctgttaggtagtagatttgtggtgtattaagccactcaacgtagggtagtttgtaacagcagcaagaagaaatgaacatgaagccaggggtagtggcccacacccataattccagctatccaggaggccgaggcaggatggttgctctggcccaggagttcaagataagcctgggcaacaaagtgataccctgtctacatgggaaaaaaaaaatagcgggtgtagtggcatgcacctgtagtcccagccactagaggcgctgaggcaggacgatttcttgacctaggagttccaggtctcagtgtgttgtgatcgtgccatggtgccccagcctgagtgacacagcgagattatatcttaaaaaaaaagtaaaaagaaatgagtgagcatggcaggaatggggacacatagcaatattaaatagagtggtcagggttggcctcct

SEQ ID NO: 157556 - DNA, 1000 bp, Homo Sapiens
ttttttttttttttttgtgtctaggggagaagattttatttcacaaggtgaggaacccaggctggtggccgacgcccacacaccaggctccgggacgcatggggtctgcacgtggagagggtgctggccgccccagcaggaagcccgacgtaggtcccagcgtgtctgtcagtcatgctgctgccctgtggggctggagaggcaggacgtgcacccagcctgtggctggcggggcaggggacctgcaggtcaggccaagcagagtggctccggctatgcccccgagcctgcaggctacgccacggtctggcggctgaagagctcgagggtgagcgagctgaggaaggcagggatgctgtcctggcgccgcaggtgcacctcgatgagctcgcccacggtgtgtgagaactctgtctccagtagctgcatcttggaacccgaggggctggtggccttgaagatgaggcagtcgcctgggtgctcggcgtacagcgaggtcagccggtactggttctccgtggtgatgtcgatctggtagccggtgagcgtgtagcaggccttgcggaactcctggatcttggtctggaaaacctccttgagccgctggttcttcagctcggcactctccacctgcttcttcagctctgccacctccttggacgatggcagactcgcggcggcagcctcaaggtcggctgggacggtgcctcctctctccatggcgcgcaggagcccgcgcagtcgctcgcactccgcctgcagctggctgtggtcctcgcgcaggcgctgcctggccacactggtggggttcaggctcatgtgcagcactttggtcctgctctggtcatagtcaccctgcagagctcgccgctccagctgtgcctccagcatcctcttttcctcctccagccgactccgctcgccttccagctcctcgaccttcaacctgagcgtgtccgcctcctccctggagaacaggaagctctgttcggcagagctg

SEQ ID NO: 157557 - DNA, 1000 bp, Homo Sapiens
ttttttttttttttttttacacttccaggtgtggatttttattttcacaaaaagacaacaatgtcttccccacatacaagtatttacaaaacccaactgattcacccatctagaacctgggtttttttccacttctcaacatagttgggaacatggaaacattaatacccacacaattcccagagatggaatttatccatcaaacaaacagtgcagattacctaaaagtgcacttacctgcacaactcggtctaagaaccttgtgaaacaaacctcatggccaaggtttcatgaatctatttggtttcataccatgcaaacctgaacaagtgtgctgctacactaaactgaaaatcggttctcattttacaattaaaaaggttctcaacactttagcaactatacagaatatgaaggtttatttcaaaaaagattacatttttttaaaccaggatacacagatgcacttaatgtaacagtaccttctgcaaaaataggttacataatactcagaaatgcaatgaacaatcttattctctaaaaattagacagctaagacttcttaagtgtagacagccttcaaaatggaggctgaaaatgcttggtaaaaagaagtaactctagagccagacaccacagagctaaggctgcaaattaaaccactaccacacagctgcaaactactctttatattcacacagcgttaaacaaaacgacttcaattccatcttttcaaatgtgcctcggtgctgcaagaaaaaaagttgaatgatacacaaaactattaaaagttacaacagaactatttaaacatcttctccaaaattgagaaaagcaatcatgttaaatttttaaaaagaaaagtctgacagaactctcaagcaagtcagaggtcctcttcataagtagtcaagtaaagtttacaggagatttcaataaattatcttaaaaccttggcagagagctcattttcagaatcgtcgcggaggtccacccttaa

SEQ ID NO: 157558 - DNA, 1000 bp, Homo Sapiens
ttttttttttttttttttttcatctacaacacatttatttgtacaatccagaaactagcaggaccaaaattagcagcaatgctgagacatttactggcagctttgccttctaccctaaggtcaaagtacttgagacattgcctgtgtgcctaaggaggcatcacacaaggaaagccccaccccctacttccttcatctgagcaaaggaacctgtttacatgcacagtgcttagtgggtgggactctccaaagcagtggaaattcatctttaacctaatttatacaggtctgcgtcacgatggcaaattgaaggtgccatgatttagctggtttctctggaacattcctttcaggagcccacacttgtcacacttcatgccccaaagggatcaggtgctctgggatgtctacctggaatacatccttgcctcctttcctaggtatgggctccagtaaccacctggggtttgaaatcacagtcaggtacttctgcttcaggttggtcagtgcagcttgattttctagttccacaacctcatcgggagttaagtcttcggggcattgcaaagtttccccaatgtcaacgagtcccgctatcactcctcgaccaaacttttcccctttcctgagcaaggcctgaatctgagcaggagtcatcccgagtctctccaccagcagctcccgacaggcatcgccttcccagtccctgtgagcaatgtggacggcgatggtacagttccgctggctgctcagcagaggacgccagcgcgtctccacagtcttgattccatttaagacaaagccagcataaggctgccggaaggagaggcagccaaacttcatcttcgcaagcgccccgggcctcccgtagccttgatggtctgctgcttccgtctgtcactgatgtcgagcaccacagcaggcccaagggaaggggctaggattcggctgactcaggtccatcccatggagtctttggggcggtccggagtagggcggg

SEQ ID NO: 157559 - DNA, 1000 bp, Homo Sapiens
tttttttttttttttttgttaaaccatttccctgtttttatttaaaaatgataaggttgtgcttctgtataaagtttgtacatctagcaatgtaaaatactgacacattaaaaaaaacaaaaagtagaaactcaattcttttgattcagtgctcttgtgtttttaaaaaaggaacaaaaagtaatgcaagactcaaaattttggagtggttggcgtgcctctcttcattttactttttgactggctgcctgtatgccgatgatgatgtagctgagctgtttgtgctgctgctgctgccatagccatttgatgctgcaagaatcgcaactgttgtatctgttgctgctgctgttgaaaggcagaggagagctggaatctctgctgaggaaggctttgctcaggtctgttctcgacagagccaagctgagacaacacagctgcctgtgactgcataaaacttcctactccagtaaggttaataacagcagcttgctgagcagataaggcctgttcttgactggttgaaccttgctcagaaccctgctcccctggctgttgaggactacaagttgtgggctgctgaggttgttgtggtgtaaactgggagagctgctgttgctgctgctgcagagtgttaaaaataagtgaaccacctggaagctggagtagatttaagggcctgagacttgaagtattttttaaaccaaatggaacacctgcttgagaagctgcctgcattgcactgggcagtgcatttggtagcagacctcctgagggtagaaggccgctcaggtttattcctgcaggagttatggcaccagtgttacagcccagcatggggtttgaaccactcatcaaagcctgggccccacaaacagagcccactacattgatgaagttaagtccagcagagtttgccatgacctgggtggccgtggttctttgtgatgagctggcaggtgatagggcagctggagaaagcatgctaacttgattgaga

SEQ ID NO: 157560 - DNA, 1000 bp, Homo Sapiens
ttttttttttttttttttttttgaaaagcaacttttattgaagaatttggagggaaggttccatattatattataatagtaaaaatactaaagttgaatgttgtaaaaaaacgccgtggtgcagcggcagcggcagcgtctggccaggaggcgtggaggggcccagggatggccacccccacagggagtcagggagggcctggggcgacagcggaaaggttaagcgtcgaaaaggtcaagtgctaccgtggagagatcatctgagggggaggctcccggtgggacagtcaccaagaactgtgacacagaaggggaagggggagggctttcctgtcacaaagattaaaaacccccaaaatgcatttgaacaacataatacacaataacaaatttaaaccttgctcctctgtcccactgggtaaaccctggcccatcccccatccctggtcccatcccaggggcccagcctccgatgacgtcctcagagacacggccttagtgctggggggctgctgtgtgcctgccacccccaggagagggtgctggccagcataccatagtgaggttgcatctggtgccaccaggttgaactgaggcccagggccccagagagatgacagatagctggtgacagacagcccagggcggctggctgacagagtgaggggacacatgggcaggacctgcccggccccccaatgccacattgcgcatagctgcagaagtccttaacatttccctacgtgaatcggattgttctgagggctgaggccacacccggagaacaaactggatgaaataaattaaaacccgcaggatagttttcttccctaccccgctgcgggggagggtgctgcccacagcacaaaaacgtctttccatctgggctcgagaggacagcgtggcttctctcaaatgcacccgagaaataaaaaccattaaatacagatcatggcacgaggccgcctctccatccctccaagctatcgtccagcgcagt

SEQ ID NO: 157561 - DNA, 1000 bp, Homo Sapiens
tttttttttttttcactgttgagaaaaatttattatcaatgtctcagagccaacgacgacacgaacctacatgaacacaactcttaatttaggacccaagggtgactgtaaacatgataggagcgctgggacattgtcactgaggcagacagcagccactagtccacaatggtttaaaaagtcagtcctgtgccccctcactggaagcttccattctgggccatctgcagatattccttgtagagcttctcctgagcctcgaagagcttcttcagcttcttggcttgccctttgctgagctctttgccctccatgtcatgtgtgggcagaccattttcatcaaacttggagtatttgtcggtttctgacaagaacatctcactggggggaatcttcatcttggccagctttgctgcttcttgttcctgtttcctccgggccgcctcctctttcttcttcctcttctcctcttcaacccgtctcttttcttctctctcttttaataaggtgtttctgtctaccagtttcaccactgtgggcagtccttcgtggtcttcaaaccgcaccccaagctcgggcaggatgttgtcccgcagggcatcgctgagctgcagaatctcagggactttttgctctcgggcaatcttccgcactccttctcggaattctgataacacctgaaggtagggcatgactgtggcctcgagactgaggctggttccaggccctccgaccgggaatcccagggagctgtcctcttctacggccccaaagatcttcagcatatgggtgaggtacagggcgatgttctccagcagagcctggttgggcctcttcctcacggctttccgggctgccatatagaggttgcactgactgaccaaggcccgcatctcttccatgacggtgcgggtgtcaacattgtcacagagggctttgtgaattgctgtcttcttgtcataaaagttcttattcagttctgcttcttcttctccccact

SEQ ID NO: 157562 - DNA, 1000 bp, Homo Sapiens
tttttcattttttcttaataaatttattcacaaaaagtgatattgcagagggtctgggggctgtacatgggcaggggcttggtgagctttgtacatggggctgggagacaagggagcctccaggtggaagggtattttttaataaaaaaaataatggagctacaaccaccccctcccccctccccgattaaaaagacacaaaaatagacgtctctgaggtaaacggggagcctggggcttaagggtgtttaaagggcttcacaggtgccagagcttagaggtgtcacaggcaccggggtggctcctgcatcagttggtagaacagcacgtagccctcgctggatgccacctggttttcactgacaggggagacacgagagtcattgtagacatgccaaccagtctggcaccggcacagggctgtgtagtggccatagtggacgctgcctgagtggttgcaaagggcatacagctggtatacaggacttccggctttgtcactggcaaagtcccctaggctcagtcgctgcagtggaaagtctacacctactgaactttttttgatggagcctcgggaggcagaaaatcgattcagatggagcacgaggattcgagggaatctttgtactgtcaactttttggtacttcgagttttctgccgacatcggtcacacactggggcattctccgactctagctcttcttccttagtgaaaaggttgaaacaatcccgcagagacaccttgcccccagcaaatcctttcttggggatgggcagggacaggtcacaaaaaacctcgaaggtcgtggagcgatacccacaggcctggcacttgagacaacttttcaactggcccacaaacaggtccacaatcttgctgtcctctcgctccaggtaacgtttccacattaggttggctcggtcatcatcacttaactcaggttcttctagcagagcccctcctcggcggggtggagagggaactggaccattggcaag

SEQ ID NO: 157563 - DNA, 1000 bp, Homo Sapiens
ttttttttttttttttttaagttaacagagatagatgttgagagtcagttttattgccatctctgggaggggctcaaatccgcccaatctccttcagcttggccaccaggtcctcagtggtctccaccttgacgccggccgtgcgctggggcgggtcctccacactgatcacagagagcttggaggtcaggtccacacccaggtccccaggcttgatcacctcgatcttcttcttcttggctttcatgatgttgggcagcgtggcgtagcggggctcgttgagcctcaggtcagctgtcaccacagctggcagcttcaggcgcagggtctccaggcccccatcgatctcccgctccactttcaacttgtccccctccagcgtcacctgggaggcgaatgtgccctgtggccagtcaagaaatccagctgtcatctgccctgtctggttacagtcatcatcgatggcctgtttgcccagcagcaccaggtccaccttctccttctctgccagcttggccaggacccgagccacctgcaggggacccaagcgttctgcttctgctgggggcacctccacgtggatacctcggtctgcacccatggccagggcggtacgaatcgtctcctggcactgtgcaggcccacagctgacggcgatgacctccttcaccagcttcttctccttgagccgcacagcctcctccaccgcgatctcacagaaggggttcatggagtgcttcacaccatccgtgaccacaccggtcctgtcaggcttcactcggatctgcccagcaggaggggaaggggtggggtcaggaggaaacaggcaagaaggtgggggcctcagcgccaaccctctcccaggctggatgaggacaacgacagcctggaaaggggcagggccttgtccggggtcacacagctccagggacagaactgggttagagtttgtaggcaggggcaggtcaccctgtctccttctctcatccagccattcctg

SEQ ID NO: 157564 - DNA, 1000 bp, Homo Sapiens
ttttcagagacaaggcttttattcactgtatgccttggcatctcctctcacaccagaaagtttaaaagaaaaaacacagcgacaaggattcacttgggccattttggaacccatttatattgtgggtgttactctgggcttcatctagccccatactagcctctgagactgcctcagaccgtctgaacattcatggcttccttgggccaagtgtagctgtccagtgtaaaggagtcatagtctggagtgtagaccagggatcttacaaaagcctccttgtccttaggctctgggtagtaggaagccaggttgtgtttgtacgcgtagtcgagaactttgatggcaattctcaaagacacgtctcggatggtgctgagtggtgggtagagtctcccctgggacagatgctgctcagagacttcctgggcaatttgctctgctgtcaggaggaagatctcatctgggatgtgccggatcccgccggcgatgactcccagtgccaccccggggaacacgtaagcattgtttccctgcccaggaatgaaggtcttgccatcttccagagtcacactcttaaaaggacttccactggcaaaaatccctcggccctcggtgacccggtagcacttctcagccgtgcactcggccttgctggtggggttgctcagggcaaagatgatagggcgctcgtggaaggaggccatgtccctcagaatctgctccgtgaaggctcctgcgatggcagcaacacctatgatggctgtgggcttcaccagcctcaccacctcctccagggagttgacttcaggatggtcttgggcaaacatctccttttcatggttcaggtggctcctccccttgacaatgagccctttagagtccaccatccagatctttcttgtggcctctgccttcggtacaccttctttctctagggccatgacaaggaggtgggcaatgcccatagctgcctcgcctgcaccttggaaaacaaacacgt

SEQ ID NO: 157565 - DNA, 1000 bp, Homo Sapiens
ttttttttttttttttggtgccattctggcccagacctttattggggaaaatgttgggggtcacttggtcttgctcttgcctttacccggaggtagctggaagggccgctctagtgcagtcaacttgctgctgagcctttcctcgctggccttgagccgctcctccaccagcccctggagctgctccagctctttgttcacttgggtcttgatgtaggctcggaggacgtggatgtggcttggctctggctctggtggggccactgtctctagttcctctttctgcggggtaactgcctgctcctccatctccttgctttcttcttcctccgtctcactctctggccacagtttgggtggctgtagccccatgtaagtcaaagacagatccagccgcacctggggtgtgaagacgtatttatagagcttgaagtggcggaagtaagtgttgaccacgtagtcttccaaggccagcagctgttcctctttgaagaggtcgatgctgaaaggaggccgcctgactccatggcaaaaaaggacactggtgaagtagcggtagcactcctccacgttgcccaagggggttgcaatacaagccttgtgaagatcctggagcagggcacaagccgctgacgtctgctccagtgagaagccctgctggcggcagaaaatgagcgcgtggcagaagaggtccagggtgatggcgtccctcaggctctgctcaggacaccctagctccagcagctcagccagcacctccctcatctcagcattggtggtcttctccagctggtgcatggaatggacgtccaggtacttccacatgcagatccggggtcggggcagcggcggctgcggaaagaaagcgaattggggaaggcagctgcggtgtcctggcccgtagcgaatctccagcaggccggagaagccgctgtaacttgccatctcatctcaaggactaaggagaggcgcgggcgagggagggcttcagcaggcccta

SEQ ID NO: 157566 - DNA, 616 bp, Homo Sapiens
tttttttttttttttttgccttcaatttttgtttatttttagaaaataaatggcaaaatatatacactgtggagtctgaatctcctcatcatagagtgtgaacgatggtccggctgcgaagctgctgaatatactctttggcatgggcaactgccgtctttggtggctcaggtggaggtgggggcccttccaccaacttcacaaaataatggcaataaaccttctccatgatcccaaagcgacctctgccatggtagcggatgcgtttcaggcactggcctcgtcctgaggtggactcagctatatataaattggacctgaattccacgttatggtctctcactgccatatcttgtgcttctaagagaacctctttaattattttggccccttttttgtcattgaattccaactgagccaaagcctggtcaatagacattcctcgtatcaattttgccaaataccacatcttgtctttgctatattttatttgtcttcgacagtggtagatttccccaaggccagcttcccccggctcctcaggttatgtatccataacgcacccaactgtcccagtactgccgccgccatctttcgccctcccgctacggaagcc

SEQ ID NO: 157567 - DNA, 641 bp, Homo Sapiens
ttttttttttttttttttttttttttttttttggaatgagaaaataactttatttcattgtggggagcgggccgatgtccagcctcagaacttctggaactgcttcttggtgccggcagccttggtgaccttgagcacgttgaagcgcactgtcttgctcagaggccggcactcgcccactgtgacgatgtcaccgatctggacgtccctgaagcagggggacaggtgtacagacatgttcttgtggcgcttctcgaagcggttgtacttgcggatgtagtgcagatagtctcggcggatgacaatggtcctctgcatcttcatcttggtcaccacgccagagaggatccgccctcgaatggacacattaccagtgaaggggcatttcttgtcaatgtaggtgccctcaatagcctccttgggtgtcttgaagcccagaccgatgttcttgtagtaccgcgggagcttctccttgccagtttctcccagcaggaccctcttcttgttttgaaagatggtcggctgcttttggtaggcacgctcagtctgaatgtccgccatcttcccggccgcctgaaaaaaagaaaggggcagcagcgtccgggtttccttatcgattacgcaggggctggagaggaagt

SEQ ID NO: 157568 - DNA, 1000 bp, Homo Sapiens
cgaatatgcaagtctctttctgcagcagagaccagaattaaagggagaagggatgagcaaaaaagtctctggatttcaggagaaggaagaccaccccagggccaggagaaaccacttgtgatgggtccattgaagagacagagaggggccagctctggcctctctgctgcaacttccctcattcgatgcacagcggtggggcctcaaaaccattttcccaactcgagcctacttccgaaaaaacctgcaacatctatcgtttcctttcaggggctggagctggttcccacgatgccctagccaaaatcaggaagggggtcctggggcccagcgactaccactgtgaccagattattataaagatgggggaatgtggctttaaaaaagtggggaaaggacccaattttccaaaatgcaaattttttcttctattgccccccatcatttgcacctatttttgtcaagtccaaacataatttgaagtgaggtaggtagtttctctctacttctgccgttgtccttggggtgatgtcggggcctgtgccctaaatgcacttgtctcctgtgcaggggcagttccagggctggcatcagtggctggtggagcttctcagttggctattttctcaatctcgtccaaatcatctgtgtccaatctttctatcttcttattaaaatgctcctggattctgttcaggatgttcatgctgtgcttgctgtccaccatgttcactgccaggcccctcttgccaaagcggcccgtgcgcccgatccggtgcaggtaggtctcattgtcaggattcccgtccttgtccacgggaagatcaaagttgatgacgacagacacttgttcaacatcaatgccgcgggcacacacgttggtggtcaccaaaaccttctctttgccctctcggaagcgctcaatcactgcagccctctgttccaccatcatctccccactcagcaggaccacctggtggccttcttttgagagctctgc

SEQ ID NO: 157569 - DNA, 1000 bp, Homo Sapiens
ttttttttttttttttttcactctgataaatttattaaaataagaacaagcatcagttgtacatagaaataatcatttgcactaagcatggtactagagcagaagagcagttttaaatgtattttttaagtcacaaaatatatcggttaaggcactataatcctgtctcatgttttcaataaatatgctggtttttttttttaaaggcagtagtgagtaaccgattacatgagtataggcactatactattaaagacaaactgctgtggccattgtgtgtaacttattctcaaaagaacttttgttagttaagattagtgttttttaagaatgagaatatgaaaattgtcacagttttctctttctaatttaggtctcttccagagagacctatatattaaaaggtgctgtttcttcactttattccttggcaacaatgaattatgcataaagtaaaaacattgcctctcaggaagtaaagccatcagaagatgtctcagaacagcttgaaatctttggaatagctttttttttttttcaactgcaataaaatcagtgcagttcagaaaactcgacctttcagtatccgagaaggcagctttgtaagcactttctgttcgaggaactttgttaagcagctgaggggaatctgacccagctcctgtgttgtctggtgtagacagggcaccagactgggagtcaagtggcctgggtgcttcttcactgccaccagcacttcctaataatggcaaatttacattttgttacggtgctcacagcttacaaaacacatacatgtgcatcatcacagtttgttcacctgtaagatgaaagggttggattctttgttttctgtggtcttttccagttctagtgccttgctagtctgatagtgtgaattattttttattacagctggcgctgctgctgcatcagggccatcctttctgcaagacacaatgaccacagcaaagagcgggaaagataactttccacgaca

SEQ ID NO: 157570 - DNA, 1000 bp, Homo Sapiens
tttttttttttctgttttgaccaaactttattactcatttaatggaactgtaacaaagagcaggaatcaaaacacatggggatcacagaggctgttatgtttattgtgcagaacagacagtgataatacactagagaaatattttcaacaagcaagcgattcaaagtacaatcatagacagcaattctacataaagaacaaagaataaagttagaagacactcaaaggaacagggagaaagtcaactgcagttaaacgtcttgatacttttctcctgcaaacatacctaacttgcagaaatggtagaaaagttaaatgtccagtcttatgtagctgcgaccaacaacagcaaagaacagtcctataaaatttatctcccacaaaaataaactatatatataaaaattttatgatgttcttactgttccattggccacaagctttttttttcagtatgaaaaatgaggtatactgggacttaagaggtagtagtgtgttttgattgtacaacatacaggaaataaaagtgtaactttaccagagatggaaatcactcggtgcaccatgtttggccaacatgagcaattgcttccattttatgagctggccaatgaggtttctaaaaggcccatccaaagatatggaatgcgacttttatttttatgagccactgtttatttgcttatttaacgcacagttaacagtaatgttgagttttaattctctccatagctcctttggtgattcacaacagtgagcgatctgccagtctcagagaggtatgtggcctttgaaactacctccctgaagcagctggaagagagatggttttgagtttcatttggcttcagtactaaaagccatactgacaaaagccgtcatgagaaactacctcctggcccagttgataataccatgttaaaaagtcagcacactcactaggagagaaaggcataaaaactctacataagaagcgtttaaaataaatctggttgagaca

SEQ ID NO: 157571 - DNA, 1000 bp, Homo Sapiens
ttttttttttttttttttttttttttttttttttttttttttttcaaaagaaaaaaaaatagtgttttattaactaccacactgttataatacactttaaacgtacaataaggtagcctttaaatttgaggtggtcttaagaataacaaatgaacagaattccaaatttttgaaataggtgaactgctgcagttacaggtatacatttaggaaaactgtatagctcttacaagaccagcaatgtaactttattttgtacatttttgaattgaaaatataaacaataattaaaaaataaaaagaaaatacagcataataaaaaacatacgcttctcaattaaatgtactggatacatataaattttaagggaagaagcaaaaaaggaaaatgattgatatttaagtgcagactgactacctagacaaaaaaaaaaaagacttaaaaaaatatcataaaacctctagttcttctatgactaatatccatatggttggagtatcgtcactatggaagtgattttgttatgtttgcatatgttacactttactggtaatttacatgatggcttttaaggccctgggagacatggtttttggaaacaagattggataaaaatcactgctaagacgcaatacaccttatttttttggtcctccaatagtcaagaaaagggataattcactataacattctcttaccacccaaatgcctcaacttatacattttaaacttttttaaacattggttatattgcccaacttcgttattgaaagaatattaacaagacattattttggcaaattaaatcttaaacatggcttttcaacaggatttaaaaggtgactatccctagagttccatgttaaaatgtagttttcaaaatcttacaagagtaatgcttaaaatattgtacatagttaacctaattaaaataattagcttcaaaatgacaaattgataagctaagtaaagcctacactatgtaacatttgcttggaa

SEQ ID NO: 157572 - DNA, 1000 bp, Homo Sapiens
tttttttttttttttttttagagatggagtcttgctctgtcgcccaggctggagtggagtggcatgatctcagctcactgcaacctctgcctccccggttcaagtgattctcctgcctcagcctcctgagtagctgggattacaggtgcccgctaccacgcctggctaatttttttgtatttttagtagagacggggttacaccatgttggccaggctggtctcaaactcctgacctcaggtgatccatccgcctcaacctcctaaagtgctgggattacaggcttgagccactgtgcctggcccaaagccaggatttctttacagccaatacaagtggcatttcccgctcagttctgtggctgatgccctagccactgctgtgtcccctaatcctggggtgtcagagggatcctaagttttccagatttttgcccatacttaaaacttcaacgatcctgcttcacaaggaaggatgagtggagaattgagtggagttacacgcagcagagtgctggggaatctggagagcgggggcgatcacatgcctggaaatagagcagctgcagagcccaccccaggaggagcctgcctctccttacaaaggctgtaataagacagcacttgacgatgccatacgtgcgaaaagtgcagagtctcagagggtttacaacccccatccctttgtaactgtagtttgcttacactgtggattctaaagagacatgtaaatctggggccgatttcatctgtttaatgattactccccacccgatagagctattctatactgttgctaaaatttcattaagtctctcaagatgcattgatgagatgagacaccatgaataacacattcatcaactcaagtatggcaactgttcagagagcttcagagctttggtacccgagtgcagacttggtaattaccgggaatttgtctcccccgtataaattctggcgaacaacgagaaaacaccatctgtgatcgtttccacatc

SEQ ID NO: 157573 - DNA, 1000 bp, Homo Sapiens
tttttttttttttttttttttaatagctgaggtctttatttcaatttctatatacagtaaaagtgctgctgagaatctgcagcgaccagacagaacataaatttaaatctctctcaacaattagcagcttaagatctatcaactacagtgttaacgttcacacgttcacaagtgtcatttctttacgtttcaattcgtgcaagtgagtttttattcttacacactttgataaaacacacagtctagtagtcaatccctactgaggatatcacctagcatacacgacatacagacagcaatgttaactcttagagccacattcaaaatcccaggtttcatttggggtttgggtgtgggaaccataattttgcctgtgtcagattacaataatgtttggttttgttttagatgcatattttccaaagctgaaaggcagctcctcattggaactctctcagaactcagcattttcatctgactgtacctcaaaggaacatgaaatcagaaacaaaaccaaatgcagtgaagaccacatgaaaatacgctcattatttggacatggctagtgaggaaggctcgctcccaatatttgtcttggcatcagacttttactccattcagaacaggggagagagaagaccctagtcagtgaagtataaaatttaacctacttttgcttcttaaggagccagtagagtggaaagccttccttactaggacatactgagtataccaaggaatggaaattggagcagacagaagtacccttcaattatcataaacaatgtaaaatgcgcattctacaacctgaacaatcgcccaggccaacacagccagcttcactcacccaggctagaggcatggacaaataaaccaggaatgtttcattttaaagggaatgaatacagttttcttttcttttttttttagaggagcattcaaatgaggggacgtttccacccagaacaactgttaagccattagagcgaggttatagaag

SEQ ID NO: 157574 - DNA, 1000 bp, Homo Sapiens
tttgtcaatagtctcttttatttcctacttgacattatttagcaatatcacatattgtccacacctatagattctgttatgtgtttttcctcaagttgctttcaaaagtccacagatcaagtcttccctgccgttcgtctgctctagggtgaacagagtaatagggtcgttagtaggttggggagggtctgtttggtaattcagcttctcgaatccgacttgaacttccagaggaaattcatctcaattcactgggaatcacgtaggacaatctaattccagacagcctttcagaaccaagtccttttctgagcttcaccctaagcaaagatcaagagaatgcagatgcctagagtcaaggtcatctagtgcctaacctttaataaaataaaaatataggccgggcacggtgacttacgtctgtaatcccagcactttgggaggccgaggcgggcggatcacgaggtcaggagattgagaccatcctggctaacacggtgaaaccccgtctctactaaaaatacaaaaaattagccgggcgtgttggcgggcacctgtagtcccagctattcgggaggctgaggcaggagaatggcgtgaacccgggaggcggagcttgcagtgagcggagattgtgccattgcattccaacctgggtgacagagtgagactctgtctcacaaaaaaaaaaaaaaaaaaaaaaataggactgggcccagggaagagaagagtttttggagtcaggaggtaaaattcagcaatggggatcacgttaaggcagaccttaaatattcagataatttttcactaaatagggagctattttaggtcttgaggaaggcagtgatgggcaggaaggggtcatttgcaaagactggcttaacagtagtatgcaaaatataactgtgagagaggttcttggtattaaccaactttcgaggtgcttgtttactttcctagcttctaggtgctgggttctggcttattagatgtggacaga

SEQ ID NO: 157575 - DNA, 1000 bp, Homo Sapiens
ttttttttttttttttttttttttttttttttttcctcgttgaacctccaggctcttttccaaagatttttatttggcttttcatttttacatcacttttgttaagtttttgtgcttggtccaggattcctccccagtggagaactaaaggcgggggatactgcccagcccagcttccttgacttgagagctcttagtttcaatggcatgccaatctccaccatctttgtctgtcaagtgtaactgtcccattggctcaggctcagctgcagctcagggtaatcttactagctacacaccaggggtggtccaggctgtactttaggctgcatgaaagtctcctggagatggaaagcattccaacccaatctgcccccaaccaaaagcaaaggcggcagatgagtggggcaacgggctggaagctgtagcatcacttgcaggtggcatagtagagcacgcgcccattgatgtggtcacggatctgctccacacgcttctccagtcctgtcaggtccgctgagcgcagcatgatggcctggctgccccgcagcagctccaactccatgtctttcatcctgtccatcatctccatggtctccccaaacagctcctctgcctctgtcttcacactctggatccgggcaccctgctcacccagcatggaactctgacccaaccggtccttcaactcagcatacttttgttttattctctcaaatccctcttgggcactcaatgcctgctcgctggcaccttccgcaagctgctgggcctggactgcctctgccccctgctgccgggcttggtggcggagctcctccatccgtgtccagaagtcacccagctgcttggtcatgcttgtcaccagcttttctgctggccgcagtacctgctgaacctcagcaaccctgtcctggataagccgaagggagcggctggtgccttgcatggtgtcctgagcttcctgcagtgccactgtcccctgccgcaggttcccaac

SEQ ID NO: 157576 - DNA, 1000 bp, Homo Sapiens
gggttcaagagattctcctgcctcagcctcccgagtagctgggattacaggcgcccaccaccacgcccagctaatttttatatttttagtagagacaggtttcatcatgttagtcaggctggtcttgaactcctgacctcagatgatccatctgcctcagcctcccaaagtgctgggattacaggcatgagccactgcgcccagcaattccacttctagggattcatccttggttagtgtcctctgggtcttctatatgagcaatgacactcctgagataaagctgcttctgctgttctagatttgactgtgaaaacgtcggaacattagtcctggtcttagtttgtagaacaggaatgactttgcctagtcttctctcatggcctttcatcttcccagaatccttgttaagaacatctttgtttgatgaggtggaaacaaccagagatctcatttcacaacttgacttgtgtgaaccaccatttctgcaggataactccatattaggagtctctgaatggtctgagatccgagagaatacagacgtagggttctcactgtcaggcatatttttatcagagacagtctgttgaaagttattgtttgaagaagagagctggggcccattccaggcagagttattggggctgatcccttcagattcagtacaaagtttgctttcatttgggctaagaccatcttctctcatctcttctccaagggaagagagtttttcagtatctttggacgaatcagtctcgtccttatcaagcagagcatcacaaactgttggattaaatggtgcaacagttacttttataagattcttttctagtacagagcgtctgtttaatggtttagtatgagctggtccatgaccacttgatgtacttagctgaggtagtttgaagaggtcaggagtctcagctactggtcccaggctgtacgatgaatttttctctcggggagtatcaagtagaatttgactccctctttctcc

SEQ ID NO: 157577 - DNA, 1000 bp, Homo Sapiens
tttaacgtcaaggaaacaaaatgtttatttaaaaaaatgagatcaatatcattttaatgtagaagatgccatctttatttacaggctaataaaaaaatattaaactcaactagatataatacattatcataaatgcaatagatttgaggccaaccataagtgtaagactggatagatggaatagggattacataatcaggatgtcaaatactgtgcatcttacacatgaatcacatgaaacctttttgtttctaaacatgaaaacagcataagtccactgcagtggggaaaaaaacagcaccacagacaagctgtgctaactttcgatagctgttgacttgtaattatcaagactcacaaaattttcgtctttctcaaatttattttaacaatagtctcaccaccaaaatgttgcttttccatcatattcataacagagatactgtagaagagaattttagaggttaagtgtaaatatatacacgcacacatacaaccctcacattttattaaaacgttttctcaaccattctgtttgtgtatacatgtgtgtatttctccttctgtccccttctcgatgaaatggctttgcaacagttccctccttacttgtttggttttgtcctagaagtttcagggacatatgaatttctttcctataaatgtgaaaatattaaaattggttctcagtcctttggaactaataactaattcttagttcatccccaaaaaccatacattctaaaatgaacttttaactagttactttctaacaccggacaggaagctcacagtagcatctgagcaacggtgctctcccgtaggcttataaaccacagtgaagcaggaatgaaaaggaaactgacctgtggagttttaaactacctggaaacttttcattctatttatcagtccttaaaaggaatttatatcatgacaatctcacacaattcttcaaattacacagtgacctcataaaaattccaacttgaagttttaa

SEQ ID NO: 157578 - DNA, 1000 bp, Homo Sapiens
ttttttttcacgcacaggcttttcataaaaaactttatttctcaaaaaagggggaagaatccaaagtattaaaataatcctctaatttttgttttggaggaaaagggtaggacgacaaaataattcatacaaaaatttcaagcatcactgctgtagatattcctccagctcagtggggaacatcctgaaacttgcatctcctgctgcagcttgggttccagctgcatcacggggaacacagcatctcctggatgcaggaagctgcaagcatctggaatgcttattaatttaccccacaaataaatacaaaaggtcaatcttcccagtggaaatgattccatcgatttttgtgactttctgatgagaatgctaaaaagaagagttgccccttttctaaaattccaaatctttcctttttgaagatgactacatgtgaaagaaataaaatgtgaaaagatttgttaaggatgactggctctagtaccaactaaatgccaagggggactgtaagtcactgaggtgacacaaagcagccatgggttttcctcgccttttttatggggaaaatgcacctttcaatcctagaagataattggacttggcaaagtccctatcggtagcaactattttcttactttaaaaaaaaagggtgagctgggagccagactgtgcacatcagccaagactgctattgccaaacggagcccagaagcatccaggtacactttccaacaggcagaccctaccaggaactgggagacaagagcgggctctctcctgagataagacaagtttaacgtgaagaccttttggaaaattcccgggttttcctggctcttttcagttggtgtttctctgaggaatagggaggttctcatgaagatattttaaacttccatgctctgagaaatctgagaccacgtggtccttccctcgcagcagccacttagtagtaagcagtccctcaagtcctactggtccccgggcgtggattctcgat

SEQ ID NO: 157579 - DNA, 1000 bp, Homo Sapiens
gcctgggaaaatcatttcttttaatgacagagaaagcacaccaaatgataacagaagcctcattgggagttaccactgtacaaatcaatgcctggaggccctgaactagcattagacattcacagggaagtcagctgaggttaaggaaacatccacgcagcatctctgaggatacagaagtgggaggaggaaggtgacagccgcaatgcacacgctgtgtatctgtagcttggactcttcttcaggcagttcttgttttccttccacattggatggtaggggctgggggaggtttgcaaatgatcatgtggaagagaggccttgtgtatcagcctcgcagaagagccaatactgtagacagatatcacccagatgctccatgggccatgcccatgaagcgatgtgacattggtcctctgaacaatggttcagggagctcgtacaacagaagaacagtgggtccttcacaatctagggtctggcacaacttcctgaaggcatgctaggaaataggtttatcaacaaaacttggctgtccccaagggtaaaagtcattctcctagtttttactgcatgtatctaggtttcaaattaaagaacgagaagaaaggccgcaactgaaaagttatctggaatactgtggcactttaccaatctcttttgcttataatatatggcagagccaacgaaaccctgttgatataaactttcattataataatcctgtactgtacactctcagaatacagaaagaatccatcctatcatacatgtttcatctttaaaaataatctaacatagtcatactctctggctagtaacaaactattaacatcttctgagaatacagagaaaactctgggattaatagtaaattctctgacgtgctgcccccctcccccattcagcatcatctatgaacacatttctgcaaaagcatccccaaatcatccgtaactaggaaaagaaatggatatgttggtttcaccaaatggagttt

SEQ ID NO: 157580 - DNA, 1000 bp, Homo Sapiens
ttttttttttttttttttggtttgcataaagcatttatttacagcagtacttgcaacaaagtaagtgctatataagtatgagccatttttattaccataagcaaagctttctacattggttgacttgacaaacttctggcaaactttttttctctttggaaatcattcagcaggcactgtttacatcctttcgctgccatatctctagctttcactaaatctgccacacattcctgccttctctgttgacctcgcttggattctcctacatgcttccagttagccagccagaggattttcctgtctctgggaatcttgtggaaaatcttgcattttggggcaccttctccttcagttataatgatataccttaaaagttttacatttacaaatgtctatttcacactctcattctaaagtagaatcgatgatgaccttttctccccgttcagccccataaaaactcattttcccctcttttcttttcctcccagctcctagacttcctttggaggagtggcctaggtggtggggcccagggctgagtaactgatatttccaggagttccccgaagaaggcagggccagagggagagctgggaaggtggtgacattacaaagacaaatgcatgttatagatgaggcaacagcattatccaaggctgaggtggagagcccagcaggccagggccacatcgtggtggggtagggtctgattcacattgaggcagaggtgagtctccttccttctccttctgatgggttggtggagttacaagccagggaaggaaggaaagggtcccagatccagacttgctctttctgaaatccagggcttcccccagggactgggtcagccacctggggaatgagagtgggggtctgagctcaaacatggtgtagtgaaaaggacaccggaccatgactccaaaatctggtcctgtcctggtccacttctaagacggagtttcgctcttgttgtccaggttggagagtaacg

SEQ ID NO: 157581 - DNA, 1000 bp, Homo Sapiens
ttttttttttttttttttttctgctgtagacatttattgaatcatctgttgcaccaacagcacattgtatttcacagaagattggccacaggcaaaataaaataacccaccacaaatccgcttctgggggccttcttcagctccttagtcatccagtgttcactttggcaaacagaccagtttacagacttttgttgcaaatctaaggttccatttctctctgtagcattccggctagagagagacacgattgtactttggtagtttgtctaaggcggagttttcccacatgtaaacatttcactatacaagtgtgtgccagctgattgaagaactgacggcacccctacccctgaagagtgtacagtctaaacaggaggcgaacactgtcatccggacaggctgagaggaggcggggaaaggggctcgaaggagcctgggcagaccctgctggggaggggcctggactacaaccacctgctcccagaaatgacactgcctgaggcaggagacacagcaaaagccaactatgggaaatctgagcattagaggagactggcccctttctctaagacggcctcaggtaggaaaagggcagccattacaagaagaagagtcgtcaggtttggaaactgtatattaagcccttcactgaagtacacagtgtctgtgtgtgtctcaagctaagccatgctcctcaaacacccaaaaagaaaggaaaacagggagagaacagtcaccagatccaagaagcacatgatcggtgttcttttttttttcttttttgagcctgtcgcccaggctggagtgcaatctcagctcactgcaagcgccatctcccgggttcacaccattctcctgcctcagcctcccaagtagctgggactacaggcgcccaccaccacgcctggctaatttttttgtatttttagtagagacggggtttcactgtgtttgttagtcaggatggtcttgatctcctggcctcgcacacgatcag

SEQ ID NO: 157582 - DNA, 539 bp, Homo Sapiens
ttttttttttacaagtttggatgctttattacctaaagtcaaaggggaagatacaaaagctgtttaatttaccaagcaagtgcagcacgcctatggaaagctttggccctttttgctaagctgtcagatattcgaggcagctggccagacggctgtgttttaaatccaggcttaacattttcgaggctgctgaataatgtagatccttttcagtggaacaaccttttccagagcaggtgtgggtttttgatgtgccatgtgcactgttgctggaaatttatagttgagcttctccagtgtgtcattcagggcatccagtgtctgtattttggcaacatttgcaatggcacttgttttctcgaatcctgtttttttggtatgtctttccaaggtgccaatttcttgttttttggaaattctcattcctccagcttttactgcaggaggatgtccccctttccgaggggagagcaggtcttgcacttcatttgccatagcgtgtgccagtgccagtgccagtgctggtgctctggaggctg

SEQ ID NO: 157583 - DNA, 882 bp, Homo Sapiens
aaaaaaaaaaaaacaaaaaacagaaactcacaccctggctaaagagggtgccctgaactccaggcaagcttggccaagtcttgccagaaatccagatctttgtgtttgcattgccaggtttttagcaagggtgactgattcaaagcttaaaaacaaacaagaacacttctgtctgggttaaacgtctgcacctggcctgtgggcctatttgaaaactttttgactgttcagcctgttctgatgcttagacaggactttggctctgccgtagggtccccctgcagggtgctggtgactcccaaggacactgacagcagtggctttctgtctccattctgtaatctgcattccgggctcacactgtggtcccaaacactgcaggctggaggtggtccctgtccgcctcttccccagtgctgttgtcaaggggtggaccaggcccaccggggggtgggtggccggggtcactggccggcaggggccccaggcgctcagcctcagccagggcatccagcagcccagccaggggtggccggcggcggcagatgtcctgcagcagctcagcccggggctgcaactgcctaatgagctcgtccctctggtgcacggtggcctgcaggctgtggacagtggcttctgaggtcatcagctgctcctggagtgtggcaatctcacggtccttggcgcgacccagttcgtctagggcggcgcgcagctgctggtcgtggagggccaggcgctcggcttgggcgtgcaccgtgcgctccgccgcgtccagccgcgcctccagctccgctgcgcgccggtgcacggctgccaggtgtgcgtttgcctcccggatctgcagggccggcggcgccgacatggcccaggctgctgtac

SEQ ID NO: 157584 - DNA, 1000 bp, Homo Sapiens
tgttttttttttttttttttttttttttttttttttttttttttgtttgtggtcccggccataatggcgactctgcgttgataccactgcttgggcattctagaggccgaggcggccgacatgttttttttttttttttagagtttttttttctaatgcccagaagaaaacaaatgagtagaatctgaagaaatgagcggacaattagtctgaaaatgagagccatcttcaattttttaaaatttattgttaactaacattgattatgaacacaatccaggtattagacgagtgcagtggccaccgtgaggaaggtcagtctttgcctgcaaatgtctcacaaccaatggacacaatgtgcatactgtccttttccccagaggtgtgaagtcaaggaaagctctgtggaagacgtaatgtacacacttgagagaggcctaaaaggatgattaggaatgggtaaaaaaggtgggaaggaggaaacgtgtggagatgtcacaatgagtctagttcatgtttacactcttagaaaggtttgcatgtggccagtgagggaaacggcagggagacagatgtgaattaaatcctgggaatggtctcccctagaagggctgttcagtgggatgatgagctgatgttgggattcttggggcccctccattccacatgggtccggctaagaggaaatgaccacctctcatggatttcataggagggctttagacattgactaggggaaagcagcggacgtatgggtgctcttccttctgggtatggccctgcagagtctgctctctgccagacccagggctgcagccaatcccctactcttccttggtgctgatggctccagcctgcccagcagcaccaagggctgtgctcacaggggaacagacacctacaaaaagagactcacattacccaacagctctcatcaccctgatgggcagctctttggaacatcacatttatgtgatctcattaggagtttgtcatgaag

SEQ ID NO: 157585 - DNA, 1000 bp, Homo Sapiens
tttttttttttttttttttttttttttttttttttttttttttttttttttttttttttttttttttttttttttttttttttttttttttttttttttttttttttttttttttttttttttttttaatttttaataacaatttatttccctttaaaaggatcaaatgtttttctcataatatattattttacaacaacaaagaaaaagaaagagagaaggaaagaaagacctgaagagaaagaaataaccagattttagctcaaagagtatagcctgggattaattttttaagatttgtttgtcaatttcaaaaactcagcagtggaataaagagcttaatacaggtatgcaaaaaggaagccctcgagatgttttcaccaggatgaaatgggattagctttgtagttcctataatcttcttcacagaagaatgcaatttcagtttcactggcgattccagctgctttcagagtgctgtcttctttcagcaggagtctttcgtcatcttccaaactcaacacaagttcatttgtctttgatttatgtgcttgatgaataatctttagtgcatcatatttataatttctgaatggtggtggcaggttggtccttaaagggacatcttgctttagaaatacgataaattcctttacagtttggtccaaattcactccgtgatacactacaggtttgaaattgcgatgttcaaaggaacggatgaggcgaactgtgatggtcacttctccaggagccatgtgaagaaattcctatccactgcaatcctggacagctctgtcacagtcacagatgttctgaccagcagaaaactgacagagtacagaagatgaaccaaagtaacacaggggcatgtgtacgtgtggaagcagagaagcaggacggccgaacacaaacacacagcagacacacgcctattgtgggtgccctatgtccgtgggcccctcagctggcccaaaagttcagaggaagaagcctcggc

SEQ ID NO: 157586 - DNA, 1000 bp, Homo Sapiens
aatttttaaattgacatttattaaattcaaacagtatttgaggactatctagtttatatacatgttgaggttgataaagtattgaggactatctagtttatatacacgttgaggttgataaagttcaaattctgttttaggaagttaacaatgaattgagttcattttaactgaatgttactataaaagatggttttcttgctgcaatgtaaatctgctattaagaaattagcaaagtggctggtggtgtttgtgcctttaagatcatcgttcaaaagaattcagcaaactcgataacaaaggtaagacaaacataacctttattctctctcaaaaacccagagaacagggcctggaaccatattcgttaatttaaccagaatcagaatactttaactttcatagtctcatttaaaattttatagcaatatactgaccattctaaaaataacaaaatacatgttgctctcaactacatagttaaaaaaggtagtaaattctcttacccaaaatagaggaggggtgggctagtgagctgctcaaacatttgtaacaaataaaaatgtatctatatacatataatgatcatgttttcatagcctaaaatcaccatacaaaatctaataataaaattgtgtcgtgttcaggagttgggaagccaacacattaaattaacaaagtatttttggtatatgtaaataatgggatagaatctctcgaatcaggattgtcccagaagttctaaggcagatgtcaatgacatgcacattgtccatgttcagtaattttcaaagactagaataaactatgtaaactattcaatacaattcaatattacttaactgctaaaaagtacttcaagatcttgcactgccttgagtgagtataatcaaattagtaattggaaaatagctgtaatagcaggcactgaagaattctgacaaataccaaataactgtttgtttttaccaaataaactggtaagatgatatcacaaagg

SEQ ID NO: 157587 - DNA, 1000 bp, Homo Sapiens
ttttacatcttatgttaaaatatagccacgtttattttactattaaaccttccctactccaactctttaaaaaaaaaaaaaaaaaaaaaaaaggatgcccctggatgaggcaccacattgatcctgtggcttcgagtatcccggtcagcaacacaaagccgcagccaaggattccagaacaggacggtttctaagacctctggtcctagccaggcccaggaagggagccaggctggacaggcagtgggacccatggctcccagtgcttgaggaccaaaggcaacaggcagacagccttgacaagaagtatcctgaaagacggtcaggccagggtaccccaaggccagatagctcttccctcaacccaccccccaataaataagcacaaaacctggccactgtagtctcagcccccaggaattcccagacaggccacagggagctcccagaaccctggcgacagctacactggccccatattctctttccttattgacctgggagctgcctgtaaggagggcagactcacgtcacaggattgcagagaaggtcccaaagtgacctctcttccttgactgacaggtcccagccctagatcctcagtctgaagctgtggggccctccttcccagtgtggacatggtggggccctcatccttcctcccacccactgggcttgctgtcctgtctatcctgctgtcccatcctgtcctgtcctgggagcccaggctgaggaccggggtgcaggcaggaagggtccatccccatgtgcagagtccagctgggcagctaatcatcggagtagcggttccccaggacgttgaatttgcacagtgggcaggtctgctggagcatcagccaggggtccacacagtctcggtgaaactcgtgcttacagggcagcacccggagccactgtttgttgcagaagtagtccaggcacaccgcacaggtctcagcacccggatctgggaggccctgcgctgccctgctcagccggc

SEQ ID NO: 157588 - DNA, 1000 bp, Homo Sapiens
ttcatgatgaagcttgaaaccagtcaagcactttttttatttaaaaaaaaaaaaaggaaagaagtcaaatggtaaagtatatagcctacacatgctacagctagttgttctcacccctcccctcacatcctatatactcatttatttaatgtgttaaaggaaacaaaaaccaccaccggaatgccaatttgccaagagggtagagtaagtgtggggatctccagcgtcatcctatgagcagacacgaggtggtgggcagtgcccactgttcctggagggaggtaagaaatggcctgttacttggaagctccccaaagcaggaaatgtgggttgtaatcaaggtggccacagtttatcatcacccctctaagtgaaaggggcgctaacaataattacacgggcacaaaggcatacatgggcacacactggggtaaaatgtggacaccatcgttgcattagaattgcttattgctgatgtaagcctggtgggggcaccttcttttttacatgaataggacatctaaaagtgaaggctaccgactgtggcactgcgtttggcctctttgaggacagaagaggttgagcccctcatccctgattggagctaagaaggcttactttggagtcgaggatagaaacgggaagatggaatgttgaaacatgaggaggagctcgataacttggcagaatagcaccagaaaccagatgccaccccacggagctgggcagtccagtctgtagaaaggtgctctgaaggaggtccatgagcaggcaaggactgtggagcctccggttccagctctgcagctctgcctgggaccctcgtggaaacttactctagttaggagcaattcctccaggccaagagagggcgccctgcaccctcaggcctcgatgcatgctgctctacctctcatcagcccacagtctgacacgaggtcatctttggtctgtggtgaggtatggatgtctgcagtctacacaacagccctgcagaacg

SEQ ID NO: 157589 - DNA, 1000 bp, Homo Sapiens
tttttttttttttttttttttaacaacacaactgtatcgctccaaagacgacagagagttgacaggttcacacacggtttgcggtatgtacatcaattacagaggtggcgacgcaggggagagaggttcacactcgtgttttcacttgttagaggcgctcggccacacccagcacccatgtgtgccagcgcacacgtgcacacgcaccccacgcacggccacacgcgcacccacgctcgcttgcacacacgcccacacgcacagacacgcctgcgggcagcaggcgcaggggagcgcgtatcaccagtccgcgtcctcctctatgtaataatcaggggcggtaccatcaaagaggccggggtcgagggacttccgctgcttccctctggcgaagacgcgggagatggagccgaatcccatcttctctttcttctttttccgtttttggtcttcaagatcctctagtgactgtacaatagggttgtgcaggttcttctgaactgggccgggactgtcgccgttgcagagggagtgtgtccggtgtcgaggggagttgatgtcgctcggtgtggacgaccggtcgccttcggcggcagatgcgtcggagatgacagagggctgccgggagtggcaggggctcaccctgaccgcttgccggtccgcagggtgaggggggtgtgagtggtagagagtctgttgactctgccggatggctgcggtcagcgggaggtccgcctgcaccacccactcctggttgccattgagcaccgtctcgcccggcatggcgagggaatgccgcttggggacgtccttggtcagcgtagctaaggactgtttggccatggccagctcggcctccagctccttcatccggttgtccttgaggtccagctgggagcgcagtgccgtggcgtggtctgtggcctccttggcttggcgccgcagctcccacttctcacgctccagcaggtccttctccttggccagcgctttgaccgca

SEQ ID NO: 157590 - DNA, 1000 bp, Homo Sapiens
tttttttagcttacacagtgtttatttgacactgaaacgaagagcttctgtacaatagaaagcacagtgtgtgcctggctctaaggcaggatgctaagagagagaaccagggtcagctggagaatagacaaatgcagagctcagagaggtgggacatccagctcgacgagggagtcttgggagaagtgaagcaaagaaacttatatggaagtcatatcgttgagagcgtggtccagctcctcgctgatggctttgtacttcagtttctgagcgtacagctcgtcttctaagtcatcaatgcttttctccaatttagttactgacctctccgcaaactcagcccgagtctcagcctccttcagcttgtcggaaaggaccttgatctcttcctcatatctgtcttccttctgcgagtacttctcagcctgagcctccagtgacttcaagttgttcgtcacagttttcaattcttcttcaagctcggcacatttgccttctgagagctcagcccgctcctctgcacgttccaggtcgctctcaatgatgaccagcttacgggccacctcttcatatttgcggtcggcatcttcagcaatgtgcttggcctctttcagttggatctcctgaatttccattttttcttcatctttttgggctcgactctcaatgactttcatgcctctctcactctcatctgctgccttctcagcttcctccagcttctgcaaagctgttgccagacgctcctgggcacgatccaactcttcctcaaccagctggatgcgtctgttcagagaagctacgtcggcttcagcatcggtggcctttttctctgccagctccagcttctcctgggcatctttgagagcctcagagtatttgtccagttcatcttcggtgcccttgagtttcttttgcagtgacaccagctcatcttccagctgcttgctcctgtcttccgccgccttcttgtcggcctccgcctgctcagctcgatcca

SEQ ID NO: 157591 - DNA, 1000 bp, Homo Sapiens
ttttttttttttggcgcagtgggagaccacgttttattcagtccagttcaggatccccgctatctcagggctctctgggccagtcctcctgggagcccccaccacaacacttcccaggcatgagccctcaggggcccacatgagcttccacacactgagaagtgtccgagaaattggtggggcctctgaaggaggctgtgagcagcccacctgaactcccagctcaccagcccaaacagggtgcaggggctctggccctgaagaacctgagtggagtggaatggcactggctggccactcagctcagcgggcgacgtgcccctacaagttggcagaagtggctgccactgctgggtttgtgtaagagaggctgctgccaccattacctgcagaaaccttctcataggggctacgatcggtactgctagggggcacatagcgcccatgggtgtggtaggtggggtactcgctcataggatggtaggtatcccgggctggaaagatgtccagctgcccgtagttctttcggcggcactgacagacagccaaggcaatgagatagacaatggccagcgcaaccagaacacagaccagcaccagcagcgcgatgccccagcctggcaccccagccccagactgggcagagaaaggaaatggcacatcactcacgctgacgtctgagatcgtcaggttatatcgagaggctgcttccgttttatactgattgaactgtgtctccacgtcgtggacattgatggtaccttctcggaaggccagagtcaattgtaccaccacagatcctggcctgaacttaatattggagaggcccagaaaacccccttgtttataaatctgcaaaaacatttcagaaatgtctctctgcagctcttggtagtagtcggtgctgggatcttccagagaggaattaaaagcattcttctcagtagagctgggcactgaacttctctgggtagccgaagtctccttttctccacctggg

SEQ ID NO: 157592 - DNA, 1000 bp, Homo Sapiens
ttttttttttttttttctcttaaacaggtttattttagcagctcagtatattacattctacatatttgtcttttaatgtgtttatatttctgcctgttctgcatagatggcatattcattaacttttgtagctgactttttcatttgctatttgctgctacctggcctgaagagtcaggaggataaaaaaaattcatttggtggaaacatggagcagcacttcagaagaactttactttgatgcagacttccgtgttaggttttcttcctcttctttttcaaatcctgaacagacgacagatcttcccttgggatactgagcacaacacttacgcagttcttggatgacagcctgacactttgattccatgtagctgttggcttgtaaacatttctgtatctcacaggcttgcttctggcacggatccttctgcggcatatccagaaaaatgaatataatgtttcttgggctaattaatccgccttgagaacagctaggctaaaacttccaggtctcccaccctgggccactcaagccaggatcgcgacgtgagcccggggtgagccgaggggcatcccgggccgaggtcactcgaaccgaagttatgaggcgcgggccggcaaccggaagtggtccagggagagttgtacgagattcgggggctgtgacttggaaataaaacaaaataaaataaaaccttaactgttttgggactgactttcaaaagagcgtccccctggctcaagaggccggcgttcgcggagatgtcgtcttaaagggctgtcccccaagcgtgtaggccgcgcacgggtctccttagcgggcgggcaaaatgggcgccggtactcgggaggcgcctgcccaggcgcccgggcgccgctcacagagtacgtccgcctgcggccccagagcgccgcctccctgccgcccccgccgcccggcctgacgcccggaccgcggccggccaccgccctccgccccgacggccacgcctgcccc

SEQ ID NO: 157593 - DNA, 1000 bp, Homo Sapiens
aacatcagaattcacatttatttcaaaaactcggcatggactctcagttcaggctgctgtaacagaaagccgtagcctgaaaggcttaaacaacaaacatttatttcttacagttctggaagctgggaagtctcaaggtgccaacagtttcatttcctggtgagggctctcttccgggcctgcagacggctgtcttctcactgtgtcctcacatggtggagagagagatcatctctctggtgtctctccttataaagcactaatcccattcatcagggctccaccctcataacctaatcacctctccaagaccccacccccaataccatccctttggggattagggcttcaacgtgaattgggagcatatgaacattcaccccttagctgactccacccatgtcaactagataggacacacggtgagtagtgacatcttacacgtttttagcacactgctgatgtccgacaggcctgggtctgggaccagtgtgtaccagcaagcatggtctgtggggtcagctgtcacgctcctgaggaagacaatggtccctgcttctctccaccctgtcgtggctctactgagtttattttccccatcaatactggaggtggtgccctgcacaaatggccccagggtggttttgatgtcccactgggggctggaggggagggccctgtgctgcaatctgctgtcatagcaccagcctgcagcctcatggccacagtctgtgggaccaggggagggaggggaagggacatcactgcccacacctgcacccctacccctgggtgttccatccacctcgatctggcactggatctcctcgttgacatcgtggaggaaggcactcaaagcttcctgttcgactttgccatcctcacacgactatggcctccttccagggggctgaagactgctgtgtacacgatagtgtgccaactcaggaagcagctccaggtggcatccaggtttgtcctgcctgcagtggaggccaca

SEQ ID NO: 157594 - DNA, 1000 bp, Homo Sapiens
tactgctatctagaccacagactttattcagtatcaccagattttacatgcattcatttgtgtgtatgtaggtccatacaacttcagcacaggtaaagactcatgtgcttaacctcataatcaaatgttataatcaacatcgtaatcatcataatcatatagaactgttccatcagcacaaaggaactccttgcgtcatccctttatagtcatacataccccacaccccctccagtccctatccctggcaaccattaatctgttcttcatttcaataattttgtcacctcaagaatgttatataaatgcgatcatacagtatgtgaccatttgagactggttttttttttgttcaccataatacccctgaggtacaaccaagttcttgtatcaacagttagttccttttcattccagagcagtattccaagttatggatggtttgtttaaccatgtacctgttgtaggacatctgggttgtttccagtttggggctattacaaataaagctcctatgaatatttgagtacaagtacaatataggttttcatttctctggaatgaatgtccaggagcacaactgctgggtcttatgtttaacttgattaaaaaattatgtttaacttgataagaaattcataaactctttcccagagtggctgtaccattttacattcctgtcagcaatgtataaaatatccagtttgtatcctcatcagtatttggtattttcactattttttctttagccattgagataagtaagtcatagcctcgctgtggtttcaatttgcattccctgatgacttatggagtttaacagcttttcatatgcttacttgccatctatagatcctcttcagtgaaacatctattcatgtcttttgcccattttctaattggactgtttgtttttattgttgagttttgtggcctttttttttttttgagatgaggcctcactctgttacacaggttggagtgtggtggtgtgatcaca

SEQ ID NO: 157595 - DNA, 1000 bp, Homo Sapiens
ttcccaaaataaaacaaaaatttacttggacgttattcattggctaatagaacattttagtcccaatccaacaaaattttaggcaaatgtcaagaaccaagttaaccaaaaccgctttaaacagaatcttcattctaggtatataaaaactgtttctttaaattagagatctttttggtcctaaaatctagaactgaatcagctacaactgcaaacaaggtgattagtgcaaagtaatacaactgtccaaagataagctacttcccactttccctactcagtaatacataaaaatccttaatattagcccttcactttccatgcttccacccagtaacacctaaagcaactatttaaggattaagccacacaaggtcagagtaattgagcacctagtatgaaccaattatctaaatagatttctaaaagtccataatgaatcagaactcagatacaaagttaccaccaggcatcttttatatatactttcttgcatatacaagtctcaagaagagtaatgtcatacaagagcactaggaattgccacatactcccaaatgggcagcaaaaggaacaaacattactgatttaaaacagtatatacatactaactcaaaaaaataattcggtaaatcattttctaacttgtgtgggtaactttttcccttccatttagaagtgaacaattggctaccagtttagtacagaagtaatcaacagcacaaaagctaaattctgtccaaatgggaattctaagctcaaaaaaaaaaaaaaaaagatgcaatctccaggagccattaatttctgccccagctcaacctatggaatttacctatatgaagtgttcataattctcatctcatagaaaaacctctttgcacaacgcaaaggacttacacaaagggatctgagtcactaaatgtgaaatactaatcatggtattttttaacagattatacaccccttaacagctttcaaaatatattttatgttgcaggct

SEQ ID NO: 157596 - DNA, 1000 bp, Homo Sapiens
ttttttttttttttttttggcttttagaaagagaattttatttggaatgaaaatatagagcccaccctcccgcctcctctggggagggagcagagggctgggcagtggtcggggagatggtccctcagaggtcgaggagctcgcctgggcgtagacatcctccacaggaacagtgaggaaagctgggcgctggcttcggcctgggcctgggacgggtgggggtgggaactgacccctgcgctgcctcagaggctctgggcagccagctagcccggtgcgacccgctggcagaagctgagtgggaagggggcggcggaggagatgaaggtggcgtgtggctgtggccctacgcatccccgttctccatgcggcccagctgctcctccaggcggcagatgcggtcgccctgctccttgaccagcgccctcagggcccgcagctcctgcatcacctcctccagcttcccagcctccccggctctggccaggctgccgctgggggtggcatcagcagcagtggtggtggaggcgggggcccctaggtgggaggagcccggggccatggcgggccggctgtcagacaacacgttgcgccggctgatcttcaggtcccgctgcttgctgggcacgtaggcctcccgcagtgagatgaggatcgggtcggcatcccgcccgctcacccactcctcagcctccagggctgcctcgggcccggctgtgtcggggtacagatcatcctggaagaggtccgactttcttggcacagtcatgacgatgggctcacacttgcgctcatgcagtttgtagaaccgggcgatctcgcacttgctgacctccaggccccgcttgggcatgctgcccataccccgctgcggctccttgctggtgaacgtgttcaggaagtggatgtagggaggctcctctgtgatctcaaagtaccggatgctggagtcacccttgccgcagacgtagaccacactggtgtcggggtcgtagaaggg

SEQ ID NO: 157597 - DNA, 1000 bp, Homo Sapiens
agaaagcactgcctggcatatggtgaacaggcttcagtctggtcttcttctcatctcacagacaggccacctgaggcgcacagggagggagggacttgttccaggccacacagccaggctccctctacacagtgcaggtccctgaccaccagcagcccctccctccgtctctgctgagggagcagggggtcaagggtcagtcgaaggctttgccatttctttaaaaaacaaaggctttaattcactccagccaccctctgtcccgcagtgtcccaggcagaggccctctcccttcccagaaggcactgggaggaggaaatctaccacccagcacatggcaagacccagggcctggccaggcagcgcacacaataagctgggcctgagccaggaggcaggcggggtgttgggggagacaggctgaacggccaggccactgcaacagtgagagacccggggagcccctctgctatctcagccaagaggaaggagagaccaaggcacagagccttaaaaaagacatcctctcccggcctcccatcccaaagccctggcccctaggccagtctagacagaaccaggaaagccaaaaacaaaaggcacctagtatgtaagttcatggggagaacgcaggcaggtgtgggaagctcccacctccaaccccgggccttggctactgggacagtgcgggctccagcagcttcaggacaccacccaccaggtgcaggctgccagtgactagcacatggatggcagcagcctcacggagtatgctggccccactgtgagccacagggtgggtgaggaggccctttgggggactaggtggctggaagatggggtctcggccttggctgatccattgcaaggcatgtgaaatgcagctgaagacgagggagctggcactgcaggtgtggggtgggtggggcgccagaagcagggatgcggacccaccgggctctgggctgggggcactccagaggtccgggctggcctgctc

SEQ ID NO: 157598 - DNA, 1000 bp, Homo Sapiens
tttttaaagaaacaatgattaggtttatttgcatgtgccaggaaatatcctacatttattgttacaaaaaccatgttatcacgttagtgtggaattctttagaagcaccggctaaataagctttagaaatggaatgccttcaatggctcaatctcagaaatggcaaaattctaggacacatcaagacctgctcttccgctttccactagttcccaatctttgatttccaggttttggccctttcaaacccattttttgcgtttctgaaatcaagaatagcttgagaaatctcttcattggtgttcatcacaaatggaccatgttggataactggttctcttaatggctccccagcaattaagacaaagtggcttctcttgggatccttgttctccacctggacactgtcaccttctccaagcactgctgtgtgatgaggttctattttttgttgtgcatcatcgggcccaatatacacatctccagatatcgtgtaaatgaagcttgtccaccctttagggataggttgggaatgtttggctcctgggtccaatttgaagtccaaatataaggttggtgtgcgagtgtaaaccttggactttattcccagggcttctccagaaatgacagcaactgtcacaccatccttactgggtttagggatttcttcacttttcagttcctggtactgaggctccaccatcttctctgagctcctcaaattaacccacagttgtaggccatgggctggctcctctgagcaaggcatctcagcgtgcagaatgccccggcccgcagtcatccactgcaaatctcctgggttcattttaccagtgtgtccacagaagtcttcatgggccatgctgcccccttccaggaggtaggatactgtttcaaaacctcgatgtggatgatcaggaaatcctcctggtctacctcctttaaattcatcaaacagtaaaaacggatccagattttttaactcgggtctgccaatgct

SEQ ID NO: 157599 - DNA, 1000 bp, Homo Sapiens
ttttttttttttttttgggattttagttagtctttaatataactccaactttttaatggtaaacaaagatgtaagtacaaaacatcaaaatacgttatcagtagttctaaacagccatagtagtcacagtgccagaagtgaggtcactcacattttaaggaaatataattcactctatttcagtggaatccatgttctggcagttggaaggcaaaggtgaggcttactttgtgcaaaatgtattcactttattcgaaagcagctttcttttctgtcccttgcttggcattttaaagaacctgttcattttccttttttgttaaaagtgctctaagaactaaaagggccgttccttactggaataaaattaactacacatgccatacatttctgggtcaatgttgctggttaaattccctcagaattagcaattcatagaaaattaattgttaagttatcgcactttcatgccaaaagtacaatttagagttcacaatacaaggctctgtggtataaagtgcctatgagcagcttcccatcatacactgaggctacagaacttccttggagaacagacccattgttggcataaactgtagtcactgtaggcttctcagatagaatgttctggatgcggagaacctctgacgagggaggattgttcgggtcatacacgaagagcttctggccattaggatgacagcctacccagatgtcccccgaggaaggatcaatagataaattatccaccagtgtatccagctcaagtaccttcaactgagttaaattcatattagtgtgtttttccaaaacatgaatttcatgagccaatatgtcagcaacatagatatacttatcatcaggtgaaatattgatcccatttgctgaatcaaatccttctgctaccactttaacttcatttggactgtagtaaacaacatttgcccagtgtaagttcaagtatgtttctaaatactttaagaaaggatcagagaagtag

SEQ ID NO: 157600 - DNA, 1000 bp, Homo Sapiens
ttttttttttttttttttgtttttagatacagctataattttattacaaaaccgttcttttggcattagttggttacagtgatagcaagataatgtgagtgtgcagaccagctctgatggaacgactgtattccctgcttactgaaccaaacttcggctacctcacatccattacatacaagtgacctgcagttattactgctacaaatcttgacgcatgtaccactgagggaggagctgatgctaagggattagattatatgttgataagactacaaaagttcctttatgggactttttcttcctcctcccatccaatgactttgctttagaagaatcacattacttagagctagtctgagtagcagcagcacccaaggagcatcagttcttgttaaaaagcaatacctgtgtgatgcacttttacaccacaggcaaagggaaggaccactctcgtgtgaaactcctgcagggtcccttaataaaaaataaaagcattccatcaagttcttctggatggtgttattgctgtacatttgttggtgagtcattttctgtgctgtgtttgctttgaagggatcttccaatgtatctccaatattcctttcttatagtgtccttttctttagctaggatttcacataactctaatgctttattaagaatgtcttccttattgtcacactgattttctagcatgtcttcatagatatccacaagaaaggcaattaggtagggggaactatgacttggttgtaaatcaagtaattgatttaacagattaggatatttggaaagaccacgatcctgcaaaatccctttcaaatagttccatgcactttcattatgtggtactagtttaatcatttccagagtgtattggacttctctctccaatacagcacgatcattgtagccagtggtgttagaaataacgaagtatctttggttccagacagagttatttctcacatcctctttcagaagttggtccacatac

SEQ ID NO: 157601 - DNA, 603 bp, Homo Sapiens
tttttttttttttttcttgaaactttaaaatccctcaaaaactgtttattatacaagtgagttttgagtcacgatgggcttatcggtaggatttctggtagcgagcgcgggcaccagggcctccaaactttttggactcgcagcgacgagggtcagctaccagcagggtccggtcatactggatgaggatgtctttgatctccttcttggaagcctcatccacatatttctggtaataggccaccagggctttggagatggactgacggatagcataaatctgggccacgtgaccaccaccctttacacggacacggatgtctacaccagcaaatcgctccttgccgagaagcagaactggctccagcagcttgtactgtagcgtgcgcggctcaatcatctccaggggccgcccgttcaccttgatgagaccattgccgcgtttgcagtgcgccacagctgtcgctgtcttcttgcgtccgaagacctgcacagactgcagcgggcccttggacggcatggctccgagcgtggactagacaacctcaccgcgcggcgccgcaaccggaaaaggaaagctaggggccaccctggccgcttttc

SEQ ID NO: 157602 - DNA, 1000 bp, Homo Sapiens
tttttttttttttttttttttttttttttttcagattccaaagttctgtatttttcaaaataaagatcacacattgtttagagacaatctacacaagagttacaaaaaatagttgcccaggcataagcatacacaggtttgttaattatacacatatggttacaagtgtgcttgcaaaaaagttcattggaaatatacacaaggctctggaaatgtacaccgtgtagtgttacaattctatattcaaacaaggaaaattgacagtatgttacattcacttacaagtagacaaaatgcaaaatacagttcatcttctgtacaaaagggaagggcgattcacactttacaaggtgagaggggctctgattgtaaggaaagctcgggcaaggctagacttttgcacgtccttttgactgtcacaaaatcaaaacattacttttttaggattaaaaaaacactagtgagaactcaatcttgaataacatttagaaagaatctcgctatacttgagactagatgacaaataaaaccaagctatttttttctttttaaacattaactaggctgtataaagaacatttattccttcaaaagaaaaaaatttacttctggttgaaattacaatttacaatatacaacactatatgctacgaccataaaaggtgagaatatacactgaatgcacagggctggctaattctcttttcttaccaaaaaacgtgtttatgttgattcaaacttctccacatttacattacaggtatacaaatgtacaattgtacaatcaaaagtatgttcgactactagggtacattatagatacagattagacatcaaaacaagaaaatactacaaatttgtatatatgcaaagtctacaccaagtatacactatatatttatagaagcaagaccaaaagcagagttggatttttttttctcatgctaaataatcagattttacctttcaatgttaatagaaaaaaatccagtaggcagta

SEQ ID NO: 157603 - DNA, 511 bp, Homo Sapiens
ttttttttttttttttttttttttttgctgttgtcccagatttattgaaaataatacagcactacagaaaaaattcaaacaggtccccgaggcgttttgaaattcatcccaactgtaggctgagtgacctgaaggttggacagactgccgaagtccaaaagcttcagcatttccttagtgtcaggatctacttcaataatctcctgatccaaggctgagacctcaggaacataattgtctctcctttctctctcctcctcctgcagcttgatggagatacctcttactgggcctctctgaattcgcttcatcagatgcgtgacataacctgctatcttgttgcggagctttttgctggggataatggcgatctcctcgcacacgcgcttgttcgtgtggaagtcgttgcccaggcgcgtgtagtacttttctatgatgacccgggccgccttcttcacggttttggtgcgaacgcggcccatgttggcgggtccttggtaaaagaggaaac

SEQ ID NO: 157604 - DNA, 1000 bp, Homo Sapiens
ttttttttttttttttatcaaataaaaatttatttttacaagaatttaggggaactaccacatagctataaatgtaatatatatgttaactaagtatcatagataaaaaccatgctcccttcagcagcacgtgtaataatagatacaaagattgaaaggtaaaagatttaggatgaaaagaatcctctcttaaaaaggaaaacaaaattatatgtatgtgtatacaacagttataatacccatcacacagctttatagaaacagcatctattcaaaaataccagtatttccaaaatatttaaaataatatttaaagtaataataatatttaaataaataaatatatttaataaatatttcagtaaataaaataatatttaaataattctatacccatgtttttcaaaataaaccaataaaatagatagtatatattagacgtgttagtatatatatctgagacatgttaaaaatcacaactgaattctcacaagtcagtcacaaacctaaacagcaaataaaaatttctatcaccagaattatgtttttttctggtggggaactaccaatagctataaatagaagagattattatggaagtatcatagataaaaagagtgctcgcttcaggagcacatataataatacagaaaaaaaattaaagataataaaagatttaggataaaaagaattctcacttaaaaatgaaaagaaaattatctttaggtatatataacaactataactctcatcaaaaaactctacaggaacagcatgttttcaaaagtacaacaatttccaaactatttgaaataaacctattaataattcaatggccaacattttccaaacaaaccaataaaatgcatagtgtgcatgaagctatctgttacagtctgtggcactcatatttcacaaagaattctgtgccaatctgagcccctgcactgtgccttcaaatgctcctggactgtggcaaccaagtccataagaaacagga

SEQ ID NO: 157605 - DNA, 1000 bp, Homo Sapiens
ttttttttttttttttttttttttttttttttttttttttcaaatcaattgttgaaaatatttatttagaaaaaaatatttagttggaaaacagaagaaaccaaagaaaaacacacttcatgtaaacaacagaacactatgctaagtttagttctacaataaaagccacacaaatctgtgtgtggctaaggatgaggatacagagaaaagaaaaagaaaattgagagagaggtagaatataactctttgcttactgcaggtcttgtctggaggagaacctctggaaaataataagttaggatggccctagtctaccagcatgccagaggcagaaccaatataatctcctaaaatatgagatttgtgtcaattcttagggttactcactaaggtggtttggttccaccaatgaataaattttctaattctatactaagctcatcctttggaacatcaatctcatctccagattcttctccaagcttcttccaccagggtgcttgtatgtgcttcagggttgtgagatgggcctgcttggccttggctgccacaggcctggatctacttaggaagagctcaggttctttcccttctgcctccttcagacttggtgccttcattagctgttcaacgttggtgctgatctgtgctatcagagcttctctgtgctgctgggctcgctcttctagggccctgcccataaagtagtgttgcagtcgttcttgagcttgggcatggagctccctactgaccacatctgacattggagagcccaaatgtcttctgacatagtcatccactcgtttcttcagttcaactcggcgtgcatcagtgagttcttggagtcctcgccaaggagcaaatagtttctttttcttacggcacttcgctaggaatttaagcgctgctctttgaagtgtgacagctgctttatactctatgagagactgcctctgttggtgaaaatttttcctttccctgtaccctctccaatgtttct

SEQ ID NO: 157606 - DNA, 1000 bp, Homo Sapiens
tttttttttttttttttttttttttttttttttttgggaaggaatgtacttttattgaaaatgaaaaaatataaaagtaccatcttcaaagagcatctcacaaacactgtacagcaggtgaagcattgcagtaacatacattgaaacatacagagtcgagttatacaggactagccatctaacaggtcatctggtctccgacggttgtttaacgacacacagtagaaatagagaatagaacccatatctgtttccagagtccaaagtagtatatcaggctgacagcactcaatcagtgagggctcctgaggttgcaatgattctgcaacggagtagattctctaggaaaaaagaccttgctgctaaggaaagagaattaaaaacaaaacaaaacgaaaagctccccaaagaggtactctgctcaaaatggctggtgctactggtgcactaagttgtgaggaattacctctgctcgggacagaataaaaaatcctaggcctcaaggaaaaactggtggcatccttctgggtcttttcaagtccttgcatctaaaaatcaatcttgacaaaaataaaacaaaaaaccacaacaaaagaaagccaaaccaatcccccaccctaaaggaagaaaaaaattgatgtgaagcccatccacccttctacccaggtgccttatagcaaaggtgactgcagctgtaagtcagagctgaatgacagacaaaaatggaggccagacaccacggtctggaggtagctacgctgaattccaaaacccagactctctctgggttaatttcttgtttttcctgagattaaattaataccagatgtccactaggtcctaggagatccccaccaatcagatttttgccaagtcccaggaaataacctgatcaaataggagacttcagattccaagaactactgtattccacctctcccctccctcagatttttaggtttatatccattgcttgggtcaccactgtatacagccgggt

SEQ ID NO: 157607 - DNA, 767 bp, Homo Sapiens
tttttttttttttttttttttttttttttgagaattttgaatagcatttgatttatttttttctcttgtttgagacaggttctcactctgtcatccaggctgagagcagtgtctcagccatatctcactgaagcctcgatctctcggacttaagtgatcttcccacttcagcgtctggagtagcatgtgcatgccgccttgttcagctaactttttcacttttttgtagagatgggatcttgctatgttgcccaggctggtctcaaactcctaggctcaagtaatcctcccgcctcagcctcccgaagtgctaggattacaggcgtgaaccaacacatctggccagtattttatttgttaacagcaattctggtatcttcctattatgcctggcagcttcttgtccatgaattcctgcatgcactggtgttccgtggaatggttgagaaacctccggaaagattcaacatatttcccgtggtcagaaaacaagctcctcatggaagatgccatatttggttttctgagaaagacagagcaggaagcaaggtttaagttcccctccttctcttcccagttccctctttctttccccacccccaccagtttctatccaaaaaaaaaaaaaaaaatgctaagcttgttttgaatttaacatgccacaaaggctggcttgtagagctcattactgagtcaatatttgaacgggactttgcactgatactttaacccctatacggttgttttgtaagaaatagaagtattaa

SEQ ID NO: 157608 - DNA, 1000 bp, Homo Sapiens
tttttttttttttttttttcatttttctaaacttttgtttatttttatagcaatcgtcatgtttagagaagtaaataacacatttaaaaaccttctcagggccaaaggatgccagagtatttacaaacacatggaggaagggcggcaagacatgaggggctggggctctggggctaggactctacccaggaccccgccccaggccctgagccaagcatggacgctgatgtcagccaccaggactgtcccactggccacagtgtgggctcagggaacattctggcagccgtggggttctgttcagtgggcctggtggagaccctctagccgacctgtggccccgcctcccatccagggggcttcccgtgccccacaggccagctcagaggggtctctgggaagcaccgaaggacagggggcagtgtgggggacacagggtctgggacagagacacgcacacacatacacacatacacacatacacactgtaccttcacagaagaatcgcaacaagggagattttttgtgtgatttttttttttttgtcttctaagtcttcatgtctacagtgttattttttgctattattttttgtttcttcgacagtgacataaactgaggtaaacatctgtgaccaacacctctcctaaggggcaaagggtcccagcccgaccagcagaggaggtggcagcaccagggccccaacctggtgttccggttctgctctggggtcaggctggaggctggccctctgggtgcctctgggaatgagggggctgggctacataactatggtcccctcccaactctaacatactagatactacaacggctggggaaactcccgaacaggatcttaacagagagagggagagagagaaagagaggagagagagagagagagagagagagagagagagagagagagagagagagggagagagagagcgcgcgcgagagagagagcgagcacggcaagggacgtctactgtggaatctc

SEQ ID NO: 157609 - DNA, 1000 bp, Homo Sapiens
tggaaaaaaaaagatgatgatttttaattttacattttctctgtgggaataagtgttttttatatgttaaagttcaggcttagtttccaccatttctttttcatttagataggtttgtagttctattcatccttcataaattctcttcttgcacttctgtactacgtgattttaattttctctatcccattataggagagaagcaacaccattaaacctgatttgaacaaacacttgagttacatttttaaaatcttacttgtataatcgcaattttcaacacacattctagaaaactaagggtggatcatgtacaaacacaaaaaacaagctccctccctccaaaacaaatgaacaaaaataaagaaagaaaacccatgaaatgcccaggtttaattttttttccaccagagggaaaaagagcagttaataataatcttgtatggagaatatacaccagaaagcagcattggcctcaaagtacaattagtccttttagttcagagaactatcagcggctgcatggtgacaggtattgcaatctcagttacaacttaatgctctgttagggtgatgtatcaggttttgttccatggctttaaaaaggacttagaaccaggcctttaaaaggcctatatggctgcctccttttagtaagcaccccttagcttcaataaggagttagaaataaagccagccaactttctgaaagatggtattctacagctgtagaagaaatcagaaagtgttggtacgttgttcataggaactgtaggaaaggttttcatttgcccttttatatgaacctcttgtatttgtttacttatttcaaacctggtgtagacacaaaaatatccccgcagctcatactgtatttgaatttatttcctggcaggctttctttccagaataattctgagctgccagtgaatttgcggggagcgtttcatatacagaaagaacctatcttaatcaaataacctgcgattgacagaaaaaa

SEQ ID NO: 157610 - DNA, 1000 bp, Homo Sapiens
ttcatttccatcaacaggtttcaagcagtctttacttgggtttaaaaacagtgcttcatgcatttacaataagttattacagaactctaagtcactgatgcacacacaaaagctaaacccaacttactaactatgcagacctctcctgatctccccaggctgggcagtaattagtaccttacaggtgtgatccatggcccagagaaggcagccactgtcagttacagttggactgctgcatcacagtggaggcagcagagttgaagatccacagagggctgtaatacagcccagaaaagacaatggagagtgaaggctagaaacattgaggaaggggtcaagaagcacttgtacttcctgttatcttttccaatagaatattcctgcaagttacccatcagaaaaaggtgttcagagggtttgaaaaagaagtggttagcccatgccagtgaaggtgacaaaaaacaaaacaacttgatttttggtcatatcagaaaggatggagggaaacacccaagtacatgcacggacacaagtgctccagccaaaggagtgctgttttcaccagccacaaattttctaacagcaacaacaaaaacccacagatgtaagtaacatggaagtggatcagtcctaagccaaataaggattcccacctggggcaaaagctgacttcctaggacatgaactgaacacatcacagtaaaagcccagtagaggctgctgccagttccagctattagtaattatgagggggacaggatgacacctcacacggaccacccctagcaagagggtttgtttcagttctagctgtgagaggaatgtctgcagttcccacatgtgtgccatgctgtgaagcccatggcccctgctcctctctctgcctcccacacacttaacagtacacacagactttgctggcaagtgctgtttgttcctgcactgctatactatacgactgcaggacaatgccatccgctccatggttcattcagcg

SEQ ID NO: 157611 - DNA, 1000 bp, Homo Sapiens
ttttttttttttttttttgttaaacaaaagactggggagatgggtggcaagtctaatctattcgaatctttacaggcacttttctttttacaagttggaaacttgagggatccttgaggaaagcccagggcatgaatttcagttccggagtccccgactcagtggcccacctcagggatccgtcagtccttcgtgccaaggtcaggctcaactccagcctgcggtgccgctcagccgcactcctcgaagatgtctgggtagtgccggaagagcacaggcgggtcccggtcacctcggacgggggcccgaggcacagcccggatcccaggcctccggccccgccgccccccggagcaggagcggtggatccactggtgcgcttccactgcgaacttcctcttgaagcgcatgccacactcggggcaggggaaaggccgctcccccgagtgcatgcgcctgtggctgaccagcagtgaggggtaggtgaagcggcggccgcagtccgtgcacacgtggcgccgctggccggcctgagcatccatgctgggtatgggtgccgggggctgtgctcctgtggtcgggtcccaggcagcatttttgggtggctgtgcccgtgccggggccacgctaatagctgggtcagggttgcgttccaccagcacttcaggactctccttcacaggagcctttctaggccctttggctcttgggacttcctccggttcctcttccttcctgtttgggacatctcctctccgagctcctcccagtctttcccccttctcaggatcctgggcggcggggctccaagcctcactctcctgttccatccaagagatgagggctggtttggggcctgggaatcccctctgtacccgcaatacgcaacggccgatgattggcgacgatcccggaagaagctgcgcggtgattggcctgggactggcggggcatttgaagggaccccgcggtcctgaagcctctgttgacagactggagc

SEQ ID NO: 157612 - DNA, 1000 bp, Homo Sapiens
ttttttttttttttttttaacttacattgcgtttattacaatgtaatcccaacttaaggagcatctatgcagctacagtaattcaaggcagtatggtatgagtgagtgcaaggatggacaaacatttcagtgtaaccaaacagaaagtccagaaacagatccaccattatggttaattgattttttactaattggcaaggtaatttaatgaggaaaggataattctttcaataaacagtgttacaatgactggatacttgtatgggggaaaaaaagaaccctgatccataattcacaacatacatatcaattcaaggtagatcacaaatataaaaatataaagtttatataatagagcagaatatctgaaatcttggggttaaattggagagaaaaaatatcaaacaaaagaaaaaaataaatttgaccttgtcaaaatttaaaacttctattcatcaaaagacataaagaaaacagtcaagccacagactaggtgtaatatctcaatacatatatccgacaagagacttgcatctagaatgtataaagaatttctatgacccaattatagctatcagggatatacaaattaaaaccaaaatgaaacatcactacacaccgattggaatggttaaaaaggaaaaatactgacaacaccaatatttgtaaagacaggaggtaccagaactctcattcattatattcataaattgacaaatataaaaactgctatagtagggcagtcttccttagaaagggattgtgggcatgacagagaacaatattaatctgtccattatattccttaactgtaaaatggagaccatatgttccaccagcttcacttggtaattatgatacatggctattaagagactcaaatgactccatttcatcaactaatatgccctgtcaattctacttctaaagtatcccatgttctatccaatgtcataccactatcataatttaagtgttcataactctctataatatttca

SEQ ID NO: 157613 - DNA, 1000 bp, Homo Sapiens
atggtaattactgtgagattgtttaatgcacggtttatcaacgacctcatgaacattgaacatttggggctagattttttttttttttttgatatagggtcttgctctgttgcctaggctggaatgcagtggcatgatcatggctcactgcagtctagacctcccaggctcaggtgatcctcccacctcaacctcccgagtagctgggactacaggtgcacagcaccatacctggctaatgtttgtattttttgtagagatggtgtttcaccacgttacctaggttgaccttgaactcctgggctcaagtgatccgcttgccttggcttcccaaagtgctgggattacaggtgtgagccaccgcgccaggccttgggtaattctttgttgcagtagactgttctgtgtcctgtggtgggtttaacagcagcactcactctgcctgctagatgccagtagcaacctccttcataagctgtgatagccagaaatatccccagacattgtcaaatgtctcctgggggtaaaattgcctctggttgagaaccactggtatattgtctatgtctccagttagaagggcagttccatgagagtgaagaccccacgtccaagttcctcagggccctgatgacctcagcctggcattcactcttccatgcagctgatcctccccaagccctggactgggccgcaggctacctgagaagcacatcaaagcgtttgttctacaggaccctcgtctgtgggcttgtgcagcttggggccagggatggtggcctactggcctttgcactgccagtacccacccaggctttgctttcagggtggtcagaaaatgattactgggggaacacatgacagaaaagcaggaagggggcctcttggtgctgtgagctgaccagtgcacagtgttggtccttctcgacagggatgacttctactttttggaagggagagttcagactttattagataccttaaggctggccctggggaa

SEQ ID NO: 157614 - DNA, 1000 bp, Homo Sapiens
ttttttttttttttttttaagctttttacaaagacatttattttccccaaaatatacccccagtttacaaaatccctccgagtcccacatttaaattagaagtcctcacatcttccattcctggggcagggagagatgacatccggaaggcatcagaacgtctgaagtctcactctaccagaggccaggagctggccagaggcaagccaggaaaagactgccccagccccagaatagcaccatggtgggggtggggggcagtcccctcggtgtccccaaagcattcctggccctgccctgccccaggctctgccttttctgctgctatgaaaggtccagagggccttggtgcctgcccacctgcccacacctggacagacattttggacaccaccagattctctagccgtggcgaggggctatgtccctctctccaggtttccgccccaaccccatgctctgggtaagaattatgggtgggatgggggtgaggtatccaggaagccttgagccacagaggaggtgtggagcagggagccaggcaggagccccctgcaaaccgcagggtgcagtgtagttagttgtctgtctcccagctggatggggagtccttgagggaggaactttatcttcccacgcagggcccccagcacctaacacagtgctgacatctgtagttgctcaataaacatcaactgaatggatacatgaaaagaaaggaacaaagaggtgagaaggcagagggacagaagctgacccccaggggccccatcacagacccctggagaaccagtgtgaccagcacatgcttccgtggggaggatgggcaggggagaggggcactgcagaggaggctgggccaggggggaaccacacgtgttccagcacgtgcacctgcaggtctccatgcacagctgtgcatgtggtgggcgcagagtgccctgtcttcacttggggcagggagggaaaaggccagtattaaggctagagcaagaggagg

SEQ ID NO: 157615 - DNA, 1000 bp, Homo Sapiens
ttcatgatttgaaatttttattttctgaaatgaaacaattgtacattgtacaaaccatatctactgatggaataaataagtgaaaaattatactgctgtacaacacaccaaaaaaaaaaaaaattcttgaaaggggaaaaaattaggtaacggtgaaaaaaggtctttatgcctctaaccaggttcttggcgataatgaacattccaaaccatgacaccgtttgctaatgggaggtcaccaccctagaggaatcggtccacagccttccgggttgtgggtgtaagtgccagcactttgtggaatgtgtagccgcagcttccccgacttcacgttttggggggaattaggtttgccctgggagcccttgaggccacggggcctgatgtccacggaaggcttttgctcgggatcccccgccccctggctcgaagctgaaaggtcttagattctgtggtggggggagggcgaggggtgcagggtgggtggggggcagcggctcgaggagcgactgcgccagggaaggaagcacatcggatttttgcagtcttgtcattctgcgtggaaggccttcttggccagcgtggagtgcagggctgctggcgctttgcctggcgtggccgtggtggggcccagctggtcccaatcgccggcccattcctaccttcaggcacttcagagaaatactagtgacagccttgggacggtggacgtcgtctgagtcctcacctgcgccaactccccttgcctgtccagagaggctgcggtcaacggcagggccacctacgcctctctgtttctgtggatgtgtgtgtttcattctccttcagctgtcttggttgtagcctctcatttcccaaaaacagagaaggaaataaatatccaaattcatctctcaccaagatggagtttcgctgcaaagaaaaatgtgactctaactctacggaatctggaggtaacgccgcctcgagatgcgtggagaggaaccgcatcaggtaggtt

SEQ ID NO: 157616 - DNA, 1000 bp, Homo Sapiens
ttttttttttttttttttttttttttgagacggagtctctttctgtcccccaggctggagtgcagtagcacgatctcagctcactgcaacctccgctcccgggttcacaccattctcctgcctcagcctcccaagtagctgggactacaggtgcccgccaccgcgcccggctaaattttttttgtatttttagtagagacggggtttcaccatgttagccaggatggtctcgatctcctgacctcgtgatccacccgcctcggcctcccaaagtgctgggattacaggcgtgagccaccgcgcccggccccctcctccccaatttttcatacagttgcccctatacaatatacacacccttgagggcaggtagaagtccagcccacctgcgccagggacgctgtggggagcatttttctctgagttgctaagagaaccctgatgggcggtgagcagaggaaccacagaacagccagggctcaaggctggcagcggataggccaggagagatcgctaggccccagaaagccccctactttcagtcaggatgggcaagagggtcttcgcagtgaagtgggaggcaggcctggaggagggagccagggagacccctgggagccctgaggttgggggccaggcagggagatggggatagcagctgcctcagtacttggggaccttgctgtagtcttcggaatggacgtgccggcacaagcagatggacaggaccatccccaggagctcgatgatggccacacccacgcccacgccgaggatgatgcccaggttctcctgcagccacgcctgcaccttctccatgcagccctcctggtacacaggccagtcctcagggtggttgccactctgggtcctgttgccgggggcctcgcagaagcccttcctcacagaaaggctgttgtcctcttcccccttgacttcgcaggaacaggggtaggtgacctcagggcgattcatgagctcagcgttgtctgtccagttg

SEQ ID NO: 157617 - DNA, 1000 bp, Homo Sapiens
ttttttttttttttttttggtgggagctggttgaattgtctttattaacaaacaggatatccaaggccactacattgaggaggggtgaggggggagggaggagaagggttacttgctgctcacactatatacagatgcaagcaaggggcgtggagagtgagggctccctgctccctccctccaccggggaagggcatgggctagaagaggagaggggggtcgggaatggggggaatgttttggctggcggggtcccccctccattccctggagtttgggggaaggggaatcattaaagtgctttcagaaaatgaagaaatggtccctgcccctggagtggctggtgaccccccaaaaatctagggcccagtgaccccccccagggtctggtacattcaaggggggagccggctcccctgacgtgcaaataaaggggtccagggccctgcccagtcagcagcagtggggtaaggggttcaagccccaagcactctcctctcaaatggagaaaaggggggaggggctaggcccactcaattcctgggaaggggaagctgtgtccctccccagaagctggggacaggcacagttttgggaagaggacatgttggggaagaggatggtcacgtgatcacgaaagcatcaggggtcagaggtcacgttcccagcaggctccagtgaaatcaaaccagtaaaagcaaaagcccagggaggggaaagaggggcggcccgggaagcctggctgcagggggagagctgggtccagtgtgggacagccccagcccagggccccgtcaccagttcatgatgcagttacggttcagagtcatgaagtaaacttggctgctgcccccagagcggactgaggcaaaaaacaccttgtcattccgctcacacaggaacttgagcctctgagctcgtttgtgcatgaagaccccgtcgaggtggcccgtctccacagagcggatctcaatggctttctcaccccagcccattatct

SEQ ID NO: 157618 - DNA, 1000 bp, Homo Sapiens
ttttttttttttttttaattgggaaagttttaataagcattcaaatgtactttacattgataattgcaatattgaattttgtaaaactttaaatattttccttaaaaaaggttagtgatttttttattatttttgggaaatgtggcgatccaacgattatagcattaatgcaaccattccaggtccctaaggttgagttaacattaatatgtaagtaagtgttcgcatttcatgtctacaataaggtagattgtgaacttcccgtatctctgaattttagcaaaaattccatgagataatttacagtaatgtcaaatttttggagtgcaaactcatactctacatttggatcacttttttgctttgagttacctgacttgagaatacaaggcaatttttctttcctaaatccttggaaaaatatttttgcagtaagtcttgtgtctccttttttttttttttttgagacagagtctcaccctgtcacccaggctggatggagtgcagtggtgtgatctcggctcactgcaagctccgcctcctgggttcacacttctcctgcctcagcctcctgagtagctgggactacaggcgcccgccaccacgcccagctaattttttttgtagttttagtagagtcggggtttcaccgtgttaaccaggatggtctcgatctcctgcccttgtgatccgcccgcctcggcctcccaaagtgctgggattacaggcgtgagctaccacgcccggccgtcttgtgtcttctttactgtgactgggtcgtttttaagaaaggttatcagctttgtgtttggtttcccacagttgataaaaatctatcaaaaacattataatttgcaaggaaaaaggtttttcaatggctgcaggaaccagaaagaaatagcatttcttatctgtataaacacaaacatttaaagctagtcacaccgcaggtaaatccaatatagtatgcaaaagttctataaaaatgaacaagagatac

SEQ ID NO: 157619 - DNA, 787 bp, Homo Sapiens
tttttttttgaaacagtttacatgaaggcaatttattaacagaaaatattttgaggaatcttgttcacagacggcgaccacggcgaccccccttcctgcgagtgctgtcagaggggatgggggtgacatcctcaatccgcccgatcttcatacccgagcgggcaagggctctgagggccgactgggccccaggtccaggggtcttggtcctatttcctcctgtggcccggagtttgatgtgtagggcggtgatacccagctccttgcacctctgggccacatcctgggcagccaacatagcagcatatggtgaggattcatctcggtctgcctttaccttcatcccaccagtcacacggcagatggtttccttgccagaaagatcagtgacatggacaaaagtgtcattgaaggatgcaaagatatggcagacaccaaatacattctctccttcagccacctgaggtccgaggctgatgacctgttcttccttcttttccttcccctttcgaggtgccatttttcacaagctcctccctgaaagcaaaacgggccttctgagaccaggaacgaactcaatcccgagttggccaggatccaggtgggccagccgcgcgtctcttgcccggcacctagctcggttcccacggaaagacccccgtctctcgtcccaagccccacagggtcccctcgccgcaggatgccccccgattgtcgcgcccgggcctcctacctgcacgtcgtctccagactccacaccggaaagagagagtgggagggggcggag

SEQ ID NO: 157620 - DNA, 1000 bp, Homo Sapiens
tttgtcagaaagaaacatttaatagggacttatgcacagaagccatgtctcaggcagtgatccccacagttaccccccgacccagggcttatatgccatagagaaaagggggtacatgaaggaacatgtgagacactgaagtcacctcctcagggaaaggcaagaatgctgtttacaacttagcctataacttgcttaaggccaggatttacagtgtgtgtgtgtgtgtgtgttcttttaatagataaaagtagaaatcttagagggcattccaggaactggttatcagaagtcaacatggtagattagcatccaagatggaagttactttagcctcatactgtgcctgtgaatttctttgaggaggggatggggtggccccacacctcttccaggttgtacatacccaagtgctaggcagttcctgtagctggtgagaagcccaggggcaggaagtgagacatccccagagcaagaggcaaggttcagccctgcttgaaactggttgccacagcagtgactttagtatgaaggccaagaggattggaagtgacacacaggaggtctcaaacactgctcttataaatggcctgtgtgtcctaatgccatcagaagtgataaagttggtactaggatgtgggtaatcccagcactttgggagaccaaagtgggtggatcccttgagtccaggagtttgagaccagcctaagcaacatggtgaaaccctatctctacacaaagtttttaaaaaattagccagggcatggtggtgcctatagtgtcagctactcaggcggctgaggtgggagaatagcttgagcccaggaggtggagggtgcagtgaactgagatcataccactgtgctccagcctgggcaacagcacaagactctgtctcaaaaaataataataataataattcactacgatgaccctgacaatagtttctaatctcatttactaggtaagttacagtttggtatactttagattgcatttt

SEQ ID NO: 157621 - DNA, 1000 bp, Homo Sapiens
tacactgtccttggtctgttaaactgtttaatgaatgcataaaaaggcagaaaaatatataaagccaaaagctcataataaaattaaatcatgatacaaccaccacaggcaattaccatcaaatacattcccatgatttacaaatgtatcgcttatacagaggaagttgcaaaatcactgccagtacagacacatccagtctaattaactatcgtctattcatacaacagcaacaactgcagctcctgagaccacagaaggacacagtgagcagctggtgactgagccagggtagcctccgatcaataactgatcagagtaatgagactttgagaggaatgcctataagaaatctcaaaaggtatttgtttgggtgcagaaacaaatgcaccctccacatttggattttctctagaagaatctgtggccaaatctcttatccaatggaggtactgagtggctggatcagttaccatgcaagctcacgatgaatgagattgaatttggttctgtgtgcacactgggctctggggagggaggacacccctgtgtgttgctgctgccttccgtgctgtctactgtatccttcatgtgtctccaaatggtacacgccccatgggattacagaacacagctacagaattaggatctcatggtaacaatgaggaattaggttactgtagaactaaaatatgtttaatgaaattaaaatgcaatggaaaaaaaatcaggcaacagaacattctgatgaatttacaggactgattatatcccacggcactgaatgacaaacagttcttctccatacagtcgcaattagaggcatagaagtcatactgaatgctgaatagaagaacactgagaagagcaggttataaatgaaggttttcacataaaacagaaaaatagacaaaatcatcggtaagaagctagctttcgaaaacctccctaaaagtacacggcacggagaagtggggtactgggatgtcctggctgcttt

SEQ ID NO: 157622 - DNA, 1000 bp, Homo Sapiens
tttttttttttttctaagaattcagattcttgttttttttttatttatgaggaatgtatattgttaagtcactgttatcaagggacacataaaagcagaatcataaaactggactgcagccatcatcacagtacccgagtctatgcttgggggtcttcctcactctgctcttggagtcacaaccaagactccaaaaaaccaacgaagtcccttcaatgtgagtaaaggaaacagcttcaagcactgacaatttttacaagtgattattcaaggaatgcacagtagccacagttcagacaaatcaactacaaaaatcattaaaaagaagagtagggagggtcactgcttattaaaaacaaaagactggacaaagaaagtgaagataacagtgggcagaagctctgcctcctctgtcctgtgtgactcagaggggcatgggggcgcagggatgtgcgatctgacacggctcgtttccagcagatgcgtggaattcagggatgcctcgctctcttcctacaacagaaactgaatactacaggcttgctagataagatcttgggggtgagtgggggttctgatcttgtgagagcctgtgttcccagttaaagaagaggcagctggccagagctctgctggagaacctaatgcccaagatggaccagagaggccaaacaacctgaggactcagcaggtgacaaccctgtagcctgaagaggagaggggctgcgctgccttctgatgctgagaaccacagacctctctgccctggatgtgggtgccaagactgatttactgtgcccccagcagacccagagccagggagcaggcctcttccactccaggagacaggcgccacttccctaccagttccttgggatgctttggtgttctgcaaaggcatccttagtctatttttagaacttgcattttcttactttggtcaatttttggtcaaaagtacagagagcatagaataaaagcaaagatgtgaatgtctcta

SEQ ID NO: 157623 - DNA, 1000 bp, Homo Sapiens
ttttttttttttttttttctaattactaccttttattctaatgtgaaccatggccctgaaagctgataacaagcttggctgagcagagggaactaggggtcggcagaaaggattatgggtggaaaacattggctcttccttggggagtgatgctggggaaagggaagagagtggctcagcctgcaggtaaataggctagaaaagccaaggccaaaggctggaggggagaggacagtcagcatgtccagcctggggtctgggtgtagggttatcccttctccctgtgccttcccatctcgtccatgagcctaggtcttggagccttgtgttggaggctgctgtgatgtcaggaacggggatctgtctagcttttggccacttcctgggacctcacgcccctgttgacagatggagattgggcagcagggccttgctgcattgttatctgctgttccgacttggtttgtcttgtccaagggtgacgaaagagccaggcaccagggtctcatgggatgaggtacagggtgggagatgggggaggggctgggggctgaagggagcaagaaagctgtagctgtgtggggctggcaggatgttgaagaccgcctctgctgctctcacatggggactgggcccagatcctgcttggtcacacccagcccagaagacgggtcctccagttccagtgactcactgcagttatggtgcccgcggcttctggtgttggggacctccgtgccgttggggaagacacaccagcagtagccgatgctcccatagcactggagtggcagatagttgccgttctcgtcgcacttgggcctgaatgaacccgggtggacagcagggatgtggctgacctcttcctggcacttggtcagtactttcggtggagcgtcagtgggcttttgctccaaggagtgcctgctcatttcaaacaggagccaatggtgcatccagctctcaaagaccttccagtctatggtctccatggtgttct

SEQ ID NO: 157624 - DNA, 1000 bp, Homo Sapiens
tttttttttttttttaataaatacataagacgtgaatattttatccatgttatagagaaagggacagagagaaacgggaaaatttgtttgtttgttttgtgtgtgacagagtcttgatctgtcgcccaagctggagtgcactggtgcaatcttggctcactgcaacctccgcctcccaggttcaagcaattctcctgcctcagcctcccgagtagctgggattaaaagtgcctgccacaatatctggctaattttttgtatttttggtagagacagggtttcaccatggtggcctggctggtctccaactcctggcctcaggtgatccgcccgcctcggcctcccaaagtgctgggattacaggcatgagccaccacaccccgcccttatgtttgaaatatttttaaaataaagtttaaaatattaaataaacaaaaataaagatcaaatgaaagacagtcaagttcctgggaagcccactgcagatgcagatagcagaggcctggatggacctgcagtatcttggcagggcctatggcaaaccagaaagggctagcgttgaaacccaggttctaaatggctttattttttccatgactttttcctcctaatattcaatgtccttgcaagactgatggatcctagggtttgaatccacaaagaatcaaaaatgcagtttatggtctgaccaagggactgaagaaagcctgcggttgatcctggtgaccccccgattggcgtttacagtgcagccatgccatggctgggggacatggctcaagatggagtccctcctctcatgatccagccacaaaggcttgcctgagtccttgggaaggttccagatcaggcttcccgtcagacgctgtcctcacctccgatgatctgctccaatggcatctgtgactccgccaaagccctgctctttcagaagggcctccagttcccgcttgactttgcccacaacgggtggcccccagaaggtgagggccgtgtacag

SEQ ID NO: 157625 - DNA, 1000 bp, Homo Sapiens
tttttttttttttttttggccttcaaaagatcctttattcccaaagctgaggtcacaaatacaaaacttgctccttcatggcctctgtcccctgccccccaccaccagacaattccccagccatggtaagatgccttctgaacctgcaatccctttcgcaaaagaccccagtctttgctcctccaggctcccaaggccggctggatcttcattcacagctctatgtgttctgtctggggtggcttctccactgccttcttggcaaagaggttggtccagaaagctacttctttgtccttcagcttctgggccgcctgggtgttggcaccaatctgcagatacccttccttctggttgtactctggccagtggggcagcccttccccattggggtttccattgcgagcaaagttggcccagaatttcatcaccatcttgctaagtctgatctcctcttctgaggcaccctcttttaaaaatggggccccaaagacggagaagagctcatccccgtggtctcctatcaccgtcttgggtttcatgtctgatgagaagcttggacggtactgaaactcatacatgtaggtgggtgctccagcatctctgtggttccgggccacaatcacagatgggacaccaaacatcacatctgctatcaagtccaggaacaggtctttctttttgacagtgtcgtctgttcctcctaagtatttctcagtggcttctggaatcagttccttagcaatgcaaacaaggggataggacttccacaggagtgacatggctgtcttctggtccagttgcccttcggagagtggatagctcatcaactgcattggaatcaaccagccaaactcctgcttgttaattccgaccatgtaggggacagtgtggaaattcctttcagcttgaagctcttcaggtgttttcagcagcagcatcccatcaatcacagtgcccagaaggggttgactctctctggggtctccctgtaagtcca

SEQ ID NO: 157626 - DNA, 1000 bp, Homo Sapiens
cctattctatgtgcttgacatgggttagctcagtttattcttacagctctctgaggaaaatacttttattatcttcatttaatgataagaaaatggaggcctggagagattaggtaacttggcctggaccatacaacaagagtgcctaagccagaagtccagacattcttgttcaggagtctatggtcattattctttgtgcttcttataactgggatcttctaactttaactatttcacttatcattaacaccagacagctctttgctttcagaactccagccttgaccttcagttgacagagcttcttgttcttacttggcaagtcacagtctaaatgttgtccataaatataagattttctcaggtcaggggtcagagaactatggcccataagtgagttctgatctgccacctgcttttgtaaataaagagttaaaaaaaaatcccataaaacagccacattcgttagtttatattttgcttatggctccttttacactacatggtgatttgaacagttatgatagagaccatagggtccacaaagcctgaaatattactatttggtcctttttagaaaaggttgctgacccctgacttagatcactgaagatccctttatgctgaattcgtgacatgttatacaaagggtgtatatacgttagagctgtagacagacctggactaaaatccagctctgttacctaactgtgatcctgggagaatctcttaatatctctgaatcctaatattctctttcaaaaagagaacgttaagacctctgtcttaattgatacatgctaagatattgacacataaacaaaatattattaatatgttaagaaattttaccaatcttttgtgattaggtcaaaatttaggggaccatgtaatcagaggccacaaaataaaagatgcttaataataacaaccatttgtaactgttggggtatgtgaagagaaaacaggcataaacttccgttaggtgtaaggcaga

SEQ ID NO: 157627 - DNA, 1000 bp, Homo Sapiens
ttagtttagcaggaaaacatttaaaatttattgacaacagaaatattttatagcccaacctggtatgcaaaaatgctggctatgtcccactgagttgatttcatggctcactaatgaaatgtgagccacagagggacaattacattgcagggtattaaatggcctggagaatcaccagaaaagaacactcttgcctgtgcttccacaaactgggtggtcaagtgggctgatagttccagaagcactccatgtgtataacccacatcctcaaaacgatgcctggtgtctcacagaatctgatggacaaaacctaagtgacacccaaaaccctgatacaaaggaatctgagaaacatagtaaagaaaggaaagcacactagcaaaacttccaaaagatgttaatcaaggtaagccacagaatcagtcccatatctgcaatgaaatgctgcttatgtatgtgagacagaaaaacctggtggctgaagtattatttcatttatcttatctctataaatggcatattttcttgattacagcctattgctacttcactgagggaaaactcgtaactacaactagtacaatttgcctgatgagatgaaattcaagggaacaaacctaaagtaacaaatccccaagttacatgtctttcacaaacatacctctacccagtcaatagaggatttatcaaaagaaagattaatagtggaaaaataaactgaggattctttttctcaccctcatcacaaagaatcttaagattaaaaagaagtttttagactagtgaagagaagggaagaacaaggaatacctttaatctctccttttcatttttattttagttcagcttatgcaagattttgtaccttgtgaaagaatttgtttactgaataaaaaatattgcttaagatttaaagcaattaaagcaaaataagttgctgaagggagatcatatgagttaaatacaggcttttttttttaatctgtaattgatttacatt

SEQ ID NO: 157628 - DNA, 1000 bp, Homo Sapiens
gacttacagaagcctttaattataatttaccatttctggccaggcacagtagctcatgcctgtaacaccatcactttgggaggctgaggcgggatgattacttgagcccgggagttcaagaccagcctgggaaacagggagacccctgtctcttaaaaaaagaaaatcaaaaaatgagccaggcatggtggctcacacctgtggttctagctactgaggaggctgaggaaggaggatgatgagcctgcgcagtttaaactgcgccacttcactccagcctgggtgataagattatgtctcaaaacaaaacaaaaaggccacatcacattgtacactttaaatataaacaatttttgcttgtcaattataactcaataaagctggggcaggtaggggacacggcagtacagtaaaaatccctcacctatctgcttgcacaaatgcaagcagatttccatctgggcagcttttttcaaacttttggcagttgcatcctcacaactgccttattacttaattacataatatttaaccccttatgcttaaaaaaaaaacccacgaaactacagacttcatcagtctttgcactaatgtcctcttgttgaggaagaatctccttcagggtgggacgatgcacttagcagtcacatctctgtggccacaaaggctgcttctcatttataccgggagaaacgttgccagcacagctgctgtgcaggcttaagcaaattgttttcaccctgtgagcctcaggcctctcttctataagatgagaaaacacccttgtttgggaatatctaataagatactgacatgaaaaggccttatgaacgcaaaagcgtgacacacctgtgtgttctctcggtgctgctgggatgtgcgtttgctgaatgtgtgtcatctacaagctggtcaaggatggaaaatgccttccctcctaacattcagaagggaatgaaaaccctctttcctcctggaatacagaggaggaaagaacttc

SEQ ID NO: 157629 - DNA, 1000 bp, Homo Sapiens
tttttttttttcctttttttctgtgaaatttattgtttccacattaaaagaatttttttgagggaagtattttttgtaaccacatgatgatcctatacagctgcccagaggaggacaccatcagagtcattaacatgccgtatgcgttctgaataaataaaagctacaaagcccaagttatatacaaatatctcaggcaataatgtttacaaacctatgtacaataaaacaaatgtaaacagtaaatgcagcatgagagtaatcaaaggatgcacagggacagccgccgctgttcagtccaccccggagctggcaccggcccaccctggaaccagccactcacccttcctaacacaacgggacggcccttggaagagaaaacaaaaacactccaaagatgtcgttgaactgaaggacgggaaggctggcgagaggctgcccgcctccctcaccccgagtctgaggcgcacggaggaggagacagcacagaggctgggcctgtgtgtgccccgtcccagaggctcctgccacgtggggctcagacgggcattgtgctgctctgggaggcaagtccatggaatggtagctgcttaagtaaaatcagaaggtgcagaaaatgttccctaattcagtaaccttcctgactctttgccagaaacaggcccaaactgtgaggggtggagttgggggacacatgatcatgagcactggagatgcctgggtgggagctcaggagggcacacattgacctgatttgggggagaacttctagaagatttgcaatgtcctaaaacacaactaaatcctatcagtacagcagagtgggggctatggggcaggtgtgatgaatgggtacttctgcatccagtgaccaagtaatacacgtatgtatcaccttgcgacccacaaaagtgcaatcatgtgaaaccaacggcactacggcgagaagagaaaatagccagtattgatatcgcgcagagttccggggctgggcagggcc

SEQ ID NO: 157630 - DNA, 1000 bp, Homo Sapiens
ttttttttttttttttttttttttattcaccattatggtttattacaacaaaagaatagagattaaaatcagcaaagggaaaaggtgaatagagcagaatcaggagagaccacgtgcaagtttccagttgtcatttcacagtggagttttacagacagtgcttaatccccccagcaatggtgtgtgacaatacgtaaaagtgttgccacccaaggaagctcatccaagtctggatgtccagagttttactgggggtcagtcaggtaagcatttagtgcttatgtgactcacttcagctactcagtctcagctccccaaatacccaaggtcaaattaatacagtgcagcccagggtcttagacacaggaaaacaggtattcactataaatcacattgttagcataaactatctggcatggtcaaaggcctcaggcaaacagaaacattcctatccaggggctcagagctcatttcccagtagccagtcaaaggtcagcactggggtcagacctttctttggaatgtgcaaggtttaagcaacccaagcttgctgagttaaccctttaccacacgtagaaatttttgttgtttgttttttaaatttaggagatgaggactcactatgttgcccaggcttgaattcctgggctcaagtaatcctcctgcctcagcctccctagtagctgggactacaggtgtgccaccatgccctgctgcatacagaagtcttaattaaaaaaaatacattggtagaataatattaaagtattactaagcttgatttttctatacattttgaatttaaaaactttattaatgcatccccgagttaatgaatatttttctgttgattcaatttactgattactttgaaaagttctgactttgagtagccaacatatcacatatcataatcagaatattttcctagaagcaaaaaagcaaaatagattttccattgcaagtagaaaaaaataacgatgttctaattttcaagatt

SEQ ID NO: 157631 - DNA, 1000 bp, Homo Sapiens
ttttttttttttttttttttaagaaaagcttgtccaagggcattcaaatttaatggcttttatataatacttggtgtagtgcctcgtggctgcctctgtgagccagaaataaaggaagctcatggattccccaaaaatgaaatgccactttttccctcatcatggatgactttgttaagatgaaccccttttacaggaaaggggttacacaggctgctgataccagtctagagagggcacccaccagccaaggctgtgttctaacttaggtgtcataccatcggccagaagaaccatgtagccatagaggctgtgaagctaactagtttatctgtaatttggtcctagttgtttcacttattttatgtcgttttttttttttcttagataaatctgttcagataagctccttatgaatccttcagatcgatgttcttgaggaaaacagtcaagctaaacagcaatgatgacttttatggtaaaggatgagctgatcactagctaagctacttagtcaccatcctgggagatgagctcacaggcaccaaggctttgcttcctgtggcctgctagttacagtgaaccagctccatggattgacaagggtacacaggatgacagcagagcaaaggagtttgccaagtatttgttctgtcattaagtattcaaaagaacatatatttttcttcatggaacataactttctaagaatgaaatttggggacttgaatgattcaaggtcaaatattaaacattagctccttcaccaatacctgtcattgtcattagaaaggaaggcctctcgtttacgctactgtgattcacagtgtcctttgtcggtcaagaggccccctctgtggcttggctttagctgtcagatggaagcctcaaacttttgcactttaggtcatctagtgtcttccagtgtttgtagttgtcagccaaatgttgcatcagggctggcagatgtgcaaaggcatcccaagcatcaaacatgtct

SEQ ID NO: 157632 - DNA, 1000 bp, Homo Sapiens
ttttttttttttttttcataaagcatttatttttatttgaaaacattatacaggcattacattgccacagccagtccataggggagcatgcaaatatcaaaaatggacagtttgttgaacttatcggtgtaacttttttttggttcgtattttccatttgcagtgttgtcagaattagtgtgctttgttatgtggcttaacaatagaatcctacccatggggtaaaatctgtactggtagctagctggggactactaaatagttataaatcaaaaagaaacccaaaacaaacaatactacacgcttgtcaaaaggttaatagcacaagttagcaatatctaaactaaacattgaaacaatttcatgggacacggtggtgcaaatttttccattgcttgatcacctggtcatgtatttgagagtatgtagatgtgggaaggtctgaccaaggcaagcgctgtccccagtgcaagttttcattgatgaagtgagaaccaccacttaatctctagcagggttcaggagaattgtggttcgctcttacctgatcaaattctatataaattgctaaagtcttattcattgaggagagattggtggtggagttagaaactgaaaattttgctggtgtctactgaggttatgaaatctcagaaactaaaacagctaaagttaatgttgtcctactcccatttcccgccccattcccaaaggatcagtgttttttacacagaaaaagaatttgttctttgcgattttttttttcctggagggtcagtctggaactcctgatcttgaacaattcaatatattatcaacctttctaaatggagacaaaccaacacattgaggtcacccagggacatgaaagtctgagtacaaggacaccgaatgataaagggtatacggcaaattcatcttaacattcacacttggtttccatacaatggagtcaattaaaatatcctataaaataattcagatggcaacctttagccat

SEQ ID NO: 157633 - DNA, 1000 bp, Homo Sapiens
cttttttttttttgtctttttctaaaactgtgttttgtttttaagttttgtacatttttaaaaagtatttacaattgctggttttgtgcagaaagggctcaccttcggcttctgcgtggaggagatgggtgggagggggtggagggagatgggtctgcagggggtgtagggggcagggtgggaggcagaggggcaggagctcctgccagaggacgatgtggacgctgggagggatcttggcgttggttttctgaaagttcccaggaacaaaacctcgcggtccagtcggcacttcagttggcactacagggatgtgacggtgaatgtgtcctcggggtgaggttccgccatgggccccaggaagccgctcttggggcccccacccaggccaggatgcgcctggggcataaagcctgggtacctgtaggcggtgtcctgcaggggcagcagcgagtccctcggcacgggggacagggtcaagtcactaaggagtgggcagccatagccagcagcggctgcagcagggccacggggtgggccagggggccgggccatttccagtggctccttgtcggccttgggcgtggctggtgggctagccaggtgaggggcactgaggcacgcggcctccgtcctgcccaggaagtcagccagcagccctgtacccaccttgccttcatagggcgggctgcgggcagctgagcctggagggtaccaataggctgtgcccttgcagctgggggaatcgtagtggggctggcccagcggcaggtcccggcagctcaggtgggcctgggctgcagctgcgtggcccaggctggccccctggagtccatgcttgaggggctcgcaggcagccagctttgtgggcggtggccgcagctcttccttgaagcccagtgtaggcgagcaggtgggcgagtatgccttctgcaggccggcgtcaaacaccgtgggtgggtgggccagcggtgggaaatgcttgccatcaagctcggga

SEQ ID NO: 157634 - DNA, 1000 bp, Homo Sapiens
ttttttttttttttttttttttttttttttagccgtaaatgccattaagggccttttattcgtattcatcacatcggagatcatctcttcctaggaagcttttaaaaaatccccaggttggattagggcactccctctgggtccctggcaatttcctccaggttagggatcccaaggggtcgctgccttcctgggtctctggcctggcccttggggcacacagtcatcaagaagtgctggggggaagtgagctctttatttagacatagctctgctgagtggaaagtgggcaccagccccattaatgcttgctggctggtggcttccaagcacgccccactgccaaggctcagctctgcagttctgccactgcaggtccctagcacagcccccagggtccttaaaagtcatcatcatcacagatgtcaaggtacacgtcgaaagcctctctgttgcagtttccatcaggagtgaagacatatttgtggaaggtcccatctacgcagatggcaatgacagagttgacgttcttggaagtattgcgaccgaaggcgcagatgcaagctgactcagcaggcacagtgaagctcgccaggctccactgagagtccacgtactgcccaatcataggccccaccttgcccacgcgagccagcgcggagcggcggttgaggcgggtatccttgagagcaaagatatggacagtacccttatcactggaagcgcagaggaaggaggagtcgtggctgaagttaatgcagtagagggtggcagggtcagtgcctcggcgcagctccaccagtttctccttggattgtgtgtcaaagaggcgaataagggtacccttctgggaggctgaggccactacagtgcctggctggtttagagacacacaggctatgtcactctgatgtgcattgatcgtgaatggagcagacgaggtgccaggctttgtgctcgccaggtccacaagttgcagactcccacacttgtgtcccgg

SEQ ID NO: 157635 - DNA, 1000 bp, Homo Sapiens
ttttttttttttttttttttttttgagacggagtctcgctctgtcgcccaagccggactgccgactgcagtggcgcaatctcggctcactgcaagctccacttcccgggttcacgccattctcctgcctcagcctcccgagtagctgggactacaggcgcccgccaccgcgcccggctaattttttgtatttttagtagagacggggtttcaccttgttaggcaggatggtctcgatctcctgacctcatgatccacccgcctcggcctcccagagtgctgggattacaggcgtgagccaccgcacctggctaaaaattgttttagagatagggtttacgctatgttgcctgggctggtctccaactcctggactcaagcaaacctccctcctcagcctcctgagaagccactgtgcccaccatgattctatcctagtattttatcttttttcttgttgttgtagaggcattatcaaccgtttaaaccctcaagaccaaattatctttacatttttttaaagagaagatatccatccaaggttttccaacattgcgtatttgtcctccttgccaaaaaagagggtagaataagtaatgtttaattaatactgaattttttaatgtgcaaaaatctaactctgctttttaaagcaagtagaaggagtgacaatatggcaccattccaataatcaaacaccaataaaaatggcagcagtacaacaatctaagcaaatctcaaatacaacatacttgtaattagaacacaatgcaatgacttgattttagcaagaactagacacttaatttggtaaaagaaaccaaacaatgcattatattgaatactaagctaagttaccataattagtcttacaaattctcaaatttcacaactacttttgaacatctaaatttaaacctaaattttttaattaaatgcctgttcaacaaagctaattggaacaaacacatttatgtaaatttacattctagaataccagg

SEQ ID NO: 157636 - DNA, 1000 bp, Homo Sapiens
ttttttttttttttttgatatacaaaatgattttattagatgccaaaacttttattaacatcactttatttcttttgcagctttaattttcaatattataacacttactggctcctctgggtgactaaatatcttcacatgcccactagctaaaaagaatttctaagtagaactcaactgaaactgcaagctactgctctaagaaatgcatattttattataatgtttatttgctctcctgtagaatccagtttacaaatagcatgactgcaaagatttacacataactcctaaatccttcaggttgttctaccattaatcttctgatgtgtaccaagataaacactcttagtgaacactttgctacatctcttaaatgagatttctctccattttgagttctctgctgtagaataagggatatacttggaactgaagacttccctcaatttctaaattttctacattcatacagcttctctcctgtaggagtttgtaaaagattcctattgtctgtagtctttcccacatttgctacatgtacagggttttatcctagtgtgagtatacttatgtcaattaagggattaatactgacaaaggctttcccacatttatggtcttcatatgatttctctacagtataaagtctaataaacaaactggcctgcatctttgctaaaaggtcttcctatattcaccacattcataagactttccccagtataaatttttctaatgttaaataagggagaatctaggaaatttaccatgataaccactgcttcatacagtttctcttctgtaagatttctcacatgtatagtgattcatatagtctaaaggcttttccacacttaccacactattgggtttctctccattatgtactctttgatgggcagtaagatttgagcctttgctaaaagctttcccacactcattacatttatatggcttttctccagtgtgaattctctgatgtacggtaaggtttgaa

SEQ ID NO: 157637 - DNA, 372 bp, Homo Sapiens
tttttttttttttttttttatccaaaatgtgtttattgagatggtttcccactcatcttgactcagagtgcttttagtgctgcttcctcctgaaggaacatccttctgtaagccttgcttttcctcctgtaggctggcagaggacagtggagcagccaacacacaaaactaccgtttgtgcatggctaaagaccgtggtgattttatagcatcctgggcatttcacatccatgaagtaggaattggggctctgcaccaggcgtttcttcttgtgtttcctcttctcctcttctggagagggatgaaggagatcctttgcgagaggcatgttctcgtgtgcgtaggtcgtcaccgccggaaaggagcgaaagc

SEQ ID NO: 157638 - DNA, 1000 bp, Homo Sapiens
aaaagaatgagttacatttattgatatggtttgtcatatgctttataaatggtcaccctttgaaacatgtattattactatttgggggagagggggactgttcattttacaggggacaagcaagacaggctcaaggagggaaaggacaggctcaaagtcatcacagtgtggggctggaatgcagttgcccttccttctttctttttgcacatcttccgtctctagggtgaggaggggtgtaggcacaggcacccaagacagctgcggtccagccccggccccacctgtggtctcagtgacgccccagaggccccatcttccccacataatgaggctgctccatcctcctcaaagcccagacctatttcataagccccagaccccaccttcacccagggccccaagagaacagagctggagacacttctactcctagcactggatgccttctcccctcctgtgaagctgtaggtggggggtggaggacacccctttaaggcaggctcggggggctatgaactccaagactcctggaagccagtaagaagtgggaaggtaggcacaccatttgggatttttatttttcactgagctaagagaggagattccagctatggaatccagagagcgttctacaggaacagaacagaaattggctgggccctgggcccagaggaggcctggagccgcttactgttcagtgccagcttcatccttggcactctgcctctcacacagcatcgctccggctcccagagcccacagtggcagccgctggaggctgtggcagcagctgctgccctgcccaaggagggatgtgggcttggctctgacagttcaagccagaaagagccttagaagtcattcaggacattcccattttacagatgatgaaataaggctcagagagagcaggggctttcaagaacaataaaggtggagactggaactcaggcctcctgtctgctgagggtgtctgcccatgctctctctcagagtt

SEQ ID NO: 157639 - DNA, 1000 bp, Homo Sapiens
tttttttttttcattttgtgtaaatgtgagtttattgacgaagacacaaggtcaagcttcccccaacccccaccctcccgaaaaacaggacccaataagaacagaggaatgagaagcattcttagggcaacatttcccctgccccccctccccatttctttccagagtctcaagcttcacaacacagacacagagcaggcttgggtgaggacagacactcagggaatctctgaccagcaaaagagttctgggtgtttgcttctcctgctctttgtatgatgccagctgacattacaaagacacactcaggcagaggaggggggatgcagggcaacctccatcccacttccccaatttggccaagcttggaatgagccaagagggaagccgtggtggaggcaacaggttttgcctctcaggagaggtccttttatgggaagtagaattcctccctaactctgctcaggggtgtgatgggaggtggcttccccaaggagtgaagagttcatgggttggctcagtcaggtcagctgagaataggagctgttatccatcactggtggggaggctgagagaagccttgtttcgggggttgagggacatattctgataggaaattgtgttgtctgcttgccctgacacacttttccttctggaatgatagtttgctttgagatgagaacactatttgcagtgtgaaccttctgcactacttgtatccactgactccaggaataagtcccaagaagggaactttaccaacctgcttttccgctccacacatcaccgacctatccacctcccacatacaatcctatgctgtttcctactgccatgtgcttcaggggtggtgtgcaagggacatatttcctccctccttccccaaatatttttctcttggagattctcaaggtttaagaaagtgctttgtgggaccgctccccacaagctttgcaactggtatgaaacagggttatttcagacatgaaataggggtgtg

SEQ ID NO: 157640 - DNA, 1000 bp, Homo Sapiens
ttttaaatcattgggtattgactttttattattagtcactgttcataatttgtttcaaccaaaagacagtacacacagcagaattctaatgcatcccatgtaaatgtttacatccattttattcctcactcgcctctaagacttatcatttaactttaaatttttttttttacatctcaaaaatatgtctgcaataattagagcttcattagctgtcccacttggaaacagctttttaatatttttacagtaaagaagatgtgatggggcataatgaaaatgtaacttacaacactaagaaagaaaagggcctttataggaacacagtgggagttcataaaggaaagagttcagaagctctttcccatggggcccccaaatggaaaacaaaaacaaaacacacaaagcgcaaccgcaggttctttgagggaagaaaaaaaaaaaaaaaaaaaccaactccaaggctccatcttgaagccagaatcagcctcttggaagtctgtaaagcaactgtgcaagctgcttcggcatttccttctgttaaagtgttccaggtcctggaaccctgtcgatgggacccactcactgatattgcttgaaaaagttattcacttccagttctacaagcagccccactctcccgagccaaagctggtcaaaagtgttttaaacttcaggactttctgtgcaattctctctccaatgatcctacccactcccaaagtcatgaatacacagacatgtaaaaccactctcccaactacaaagttcatgaacacccactttttcctctctagttttctcagtttaggacactgtggttaaaatacattcactagaaaaaaatagacacattcaaactcctttcccctagttctcatggcccaaatattttccaatgcagaagataatgaagttgaaccttgaaagcagtactccctaacttccaatttctacgacataaaaaaaatgggaagcatgttatataaaccattagtgt

SEQ ID NO: 157641 - DNA, 1000 bp, Homo Sapiens
taaattaaatgtctacatgtgccagaatggaaaggaaacaaggggagacaacttttatagaaatacaaagccattactttattcaatttcagaccctcagaagcaatttactaatttattcttcgactacatactgcagcagaaccagcaatacacttgatttttaaaagcacatttagtgaaatgttttctttggttcatccttctttaacaggctgctgagtcactcagaaatccttcaaacatgattaattatgaagatgaaacactagagtcatataagaaataaaaattgggcaataaaataaaatgattcagtgtttcttttctatattgtcaatgaaaaccttgagttctaataatccatgttcagtttgtagggaaagaaaaaataatttttccttctacccactttaggttccttggctggggcccctataacaaaagacagattgacaagagaaaaacaaacataaatttattagcgggtatatgtaatatatatgtgggaaatacaggggaatgagcaaatctcaaagagctggcgtcttagaactccctggcttatatagcatcgacaaagaacagtaaatttttagagaaacaacaaaacaaagaaaaagagctttgagtctgtaggggcagcaatttgggggaagcaaatatatgggagtttgccttgtagattcctctggtgctggtctccaggctgacaaggattcaaagttgtctctgaaactcctctttgtcatactgcacatataaaacgtcttttgtttccaacaagaggattttctttttcattctagaattatctccttgataacttgatcagatataggacatgacactgaatagagtccaacagtacaaaaaaaattcagtatgttctagctacttcacacatgtgtacgcgacagttatttttacagtaaggtattttcgagaaaaatgcattacgtgttttggaaaatagagtaatttaaaaaatatatttgaa

SEQ ID NO: 157642 - DNA, 673 bp, Homo Sapiens
ttgtgggaaagctgtttactgcgttctcccgctgtgtgtaattgggttcagtgtggctgaaacacagctttgccccaggctttggcacttccagccccaggagaggcgctgaaccccagcaaaggaatgtgttccctgtgggcagccggtgcccctggtcactgcagttgcccaaggctgatatttccctgggatccagctggagatgttgggctgggaggccctgtggtcactcatacaccagtggccagcagatcatccacgacgaccaccctctgtcctggctccagggcgtctttctgaatctccagctcagccttcccgtactccagggaataggaggcccacagagtggggcctggcagcttcccccgctttcggatgagcacgcagcccagtccaagctcctgggccagggaggggccaaagaggaagcctcgggagtctaggcctgcgatgtagtcgatgcggcccccgtgggtcgccttcaggtgtcgcgccaggaggccgatggcggcgcggaaggaggcggggtccttcaggacgggcgagatgtccctgaataccacgcctggggtggggaagtcggggaagctgcggatccgctgctcaaccagctgcagctcggagtcggccatggccgcgtgcgaagagccagcggcagcccgagcgc

SEQ ID NO: 157643 - DNA, 1000 bp, Homo Sapiens
tttttttttttccagaacagatgaatttatttgggaggagcagaggattcctatctgggctatgagtgcttggaaggatcccaggcatacacagagggccacagccaaggggaagcttttaaaggacagaagtccatgtaagcagcttttaaacaaggtttgtaagtcacaagctgatcgcaggagttggcgatggttttctggtggagacggccgtggtaggtaagcatctgcagctcatctggaatactacagtcttgaggacgtgctttccatacgccctgtgtctggtctacatgcaggcgtgtcttgtgataaatcctgttacgggcatgtgtgtgtgagggcttctatgtggccccccgactccattttattagagtttggcataagtgactccattttggttccagcaactttcacataaggaaactgaggctcagagaagtcaagggacttgcccccaggtcccactaacactgtgcagtggagtgatgcaaaccccagttttcccagtggatggagctgctgtgggtgagtgcagggtgcggtgtgaaccagaggggtggtgcagagaccagtgtgggatgtgagaggatccctgggggaggcagtgctggtgcagttgggatggggcagagatggaagtgcgcgtgtgcctagaggggagagcaaaggcctggagggctccacgctctcaaccgttcagggctgatgcccctaagaaggcagggcactgtattttccagggtgacactgcccctgtgactgggcctggccaaccctgaccgagagggcaaagggctggaattggggagggtggggtgagtgaggacacctggcatgttctgcggcctcttggcctctctcgagcagcgtcccccagatagaagcaagaccttgctttgcagccctggcaggcaggatgcagtcatgtgacagctccagcaacctgaggctgggggaacctgcggtctggaggaacaatgtgagttgggag

SEQ ID NO: 157644 - DNA, 852 bp, Homo Sapiens
tttttttttttttttggcacagagtaaatgtttaatacatacttgttaaacagaactgacactgaacttttgtccttccatttggatcatattacccaagaggccttgagacaaatgatgtcatctttttgagcttcagtttcttcatcttaattaacacttcaaagtatccttctgcgttggcagggctgatgggcgtataggctctctgaatttctaagtcatctactatccctctgagtgtaccgtaggatgaggtgctggccgggccgcaggccaagctggctgttcccgggtagagcaaaccggacacggtaggtgtccttagtgagcctgtccatggcaatgatgcagaaggccacgaaggtctctgggttcagcttggaggggcagctctgtgactctggcccacgcagcaggctcctgtccttgctggcttgggctgcctcccaccttgccagatctcggtgatagaggtcaaacacacagggtgagcagccactgccgcagcactgggaaggcaagggttctgtgggccgtagctgcatccaggcttcctcagtgtcgtcgtcctcttccctctcagccatcatcagtggggcttgggcagcctagaaggaacaactgggtgctcttccagaacaggccaggctctatgagaccacgggcgcaggccctgctccttggccagcattttgtagagacagggtctcactatgttgccagtctggtctcgaactcctggcctcaagtgatcttctcatctcagtctcccaaagtgctgagattacaggcatgagccaccatgtctggccctactcgcctgcgcttcacctcacgtgaggattttcc

SEQ ID NO: 157645 - DNA, 1000 bp, Homo Sapiens
ttttttttttttttttttaatgcttgacccttttatttcgaagcaactcatgcactcttttcagcactcagaaggaactgtgagcttttatactactacagccccagtatctcagcggtaaccatggggaaaaaagtcttgttttccaaaggaaaatgagagttgggaggagccttaatataagcagtgaggccagccgggtggccccagaaagaactaggtgtcttgacacctaatccacacagcagggaaaggggctgggtgtgattcacagtgcactgattttatttacagatcaaaagccacttaaataatctgcagacacaagtgctgtccagggcagaagcctggggtccaaatcagccttatccctcctcatgcccacagtcagcccaatgctgtctccgttccatgggccagcacaggcaggcgccactctgctgacatgaggacctggggtagctcagacatttgactacccaagcccagaaaggagctgggtccagcccttacggggaattcctttaattcccccaggccaggtgagtgctgactcagtgatgacaacagctgtagaagtaggggtttggcttctggcccagatccacgcccttgtcctctgtcatcacctggaaggcagccacactgacgtaatcctctgccactttctggaagagctcgtccacactctggcctgtcttgctggatgtttcaaagagctgagctttgatattgtctgcatagtcctggacgtcgtggaagtccacacgtcgacgcctccggtcttcttccagcaggtcactcttggtgccacataagtagatttggcagccctcctctaggctgcgcagttccttcacccagaactttgctcgctcaaagctgctgctgtctgtgaggtcatagcagacgatggcagccttggcaccccgatagtagattctactcatggcctcatagcgctcagagcctgctgtgtcccaaatacctaatgtcacag

SEQ ID NO: 157646 - DNA, 1000 bp, Homo Sapiens
ttttttttttttttttttatttttataaagaaattttattgcataattcttgtatacaataaacataggaaaagggtttttaatgaaaattcatgtcatttttcaaaagtgttgaactgtctggagaaaaattattacaaagctatctaaggcaaaaataatatttaaccatctaaacaaaagataatcccctttaccatttgttttgtatttaaagcaagacattttaaacacaagtaatacggagaagttttcaaattgctacgtcatttgcattaagaatttaaatgcatctaagaagtgaagagtttaaacacatgggaatgttctctagtaacagatattgctgctttcttcagatccattctgcttgaatgtaaggctatactttttgcacaccaacagaattctgcatcttctaatggtacagtaagagctggagtgcagagagggaaagtcccatgcacttcctatgttaaatggcataactcccacagatcacatacaccttgccatattgactcagttcattgcactccatatcctgcaaaaataaatctagtgcttgacagctgacattattgctcactgacgttttagtaatatatttctttcacataagacagaaatatactgaaatttgataccacttaaacccaaaagcaatctggaattaaaccacatgcatacaccccactttttttcaatagatgttgcatttttcttaaagtcgatcctggaaaatgtggtagaagaaaaactggctttccttgaaacaaagactaaggattagaaaaagaggggcttttttttgagtgaaatgttaagccctacgatataaatgaaggaacaatgacaatccagtctctgtggagagggaagaggcctctcactgatcctccttgtctacctcaacactgtggcccgcgtcccacggaccccaggggaggctatcctacagagctggagcagccgagaggtgctgtgtgtgcctctgaag

SEQ ID NO: 157647 - DNA, 1000 bp, Homo Sapiens
ttttttttttttttttgcagaaaggaagcgagtaggctttaattcaagatacaggcccctcgcgttgatctcatagaaggaaactcagtggactgacaagctcaagtcatgtatgaggcacgtcctgggaccccccccccctcctgccataggaaggacgacagcttcaggcagagggaaggaggtttgagatcagggttgggcccatacagattgtgtgaggtggtctcaagtacaaatacttatctgaggctcctgaacaggccagaaattggtgagtctcaagtaggtgtctggggaaagagagggaaggggcctgccctcgctccaggggagctggtcgccgtttggcaggcctaacagacctctaaggcacagactggtagcaggagagagctatgtcctgtactccagatgctgggtaaggagcagctggatgtgctcagatggggctcatctgagaaggtggaggtaggaaagagggcagaagagagtaagccacttccaaacgtccctccaaaaaatctgaaaggagttactatgctaatgcgctgggcatgagtccgattcagaaccaatctggtgggcccctcatggctcagaaatactctgggtagggccggctgttactgcagtcgcggacgctgagttatgtacagagagtacgtcaggaaagtggccttcagagaaagagccccatggcctaaccccaaagtcctagcccgtccaccagcacctctgagttcactggccacggcaccgggctgcttggtctctgggaacgcagtggtggcagcaaagtgcccttggctcacccggctgcaaggtcagcccttcaagctgcttgcagaaacgctggtagtttggggcaaggccttcggctgcaagcttggtgcccagtcctgcctgagacggctgccagagcctgtgcgcgctgcctgaagccccggtctctttctgtacaaacagaagtgctggatgaagaagacgacgtcgaaga

SEQ ID NO: 157648 - DNA, 1000 bp, Homo Sapiens
tttttttttttttttttttttatctatattggtttttatttataaacagattgacataaaataagtccagatggcagcgtgagtagctgtgctgctgacttgcttacaaggaagcctgtggacaggcgagtgggtggaaccgactccagcctggaaaacctgccctcccatcccccttagcgccttcttggccttccggcctgattttcttcgacagcagttctggccagggcaaggagctgtggtgggggcagtatgagccagggactcccttcccacagatgaggcctagggctgcaaaagggccccgtgaagagaggagaaggtgacagggatccttctcctccccatatggagtgatgtggtcaaggctttatgggtctctccacctcaaagagaaagtgccctagggtagtgtcctctgaagaggggccacgcctatctgcagagggcctctctgggaccaaagcagggcagtctccctcctcctgaaacccagtgtctagtgtgggaggagtattaactacagggtttgcccaagtgccagaaacaataaattaacaataagatctttttgtaaaaaaggtagaggtttgcaccacgagtttggattcaggggaatctggtgagaaggtacgagctgtggggcgatggggtgccacagcaagaccaggacagagttggccttttcctccatcacgtggaaggcattcagcctaaactcctggtgagaggccagccagggttgagaaataaatagagggaccttagagccccggcagagctgagggaagagcagcaccagccctggacccccactctccctcctcagtccttcatggaaggacttatcatggcagctgtggctaggagtggtggctccacacagcctcttagagtcctgaggtggcccggaaccccactgaggtgcctggggtgggctgatgcccctcattcctagaagaatgcccccacctgctgccacttggttgtctaggct

SEQ ID NO: 157649 - DNA, 1000 bp, Homo Sapiens
tttttttttttttttttttttttttttttttttttttttttttttttttacagacaagttatttacttattataaccctgggccctttttgccctggaaagtgggggtgggccagggggccaggcccagcatgcacccccatttctttgggggctgatccctcccccagctctgctgggtcccggggccacagcgtcaggccggtgggggtggaggtagaggtgggagagcaggggagagagcctgaggagccacaatggggcagacagaagcgggggtgcggggacaggggccgtgacccagagcacctgggtccgcgggggcccagcaggccttggcctgcccactggatcgggcctcagagcaggcggcaggcgttgcccacgctgtcagctgaggtgtcaaggtcatggctgtaaggggagtcccagtccctcaggaaaatggcctccagctggctccgcaggccgcccctcccattctgcgtcaccagcagcgaggtgcccgccgtctccgtgaagtagttgccagaccagttggaggttccgatgtaggtggcgcgttcagtcaccatgtacttgttgtggttgacacgggcatatgggattcgagcctgggcctcatccgcggggaccacaaagagtttcacctggatgtcagagtgggtatggttgtcacgcagggcagccagagagagcaggaaggcccgcatggatggctccgagtgtccccagcagctgatgagcaggcgcaccttgacgccacgctcgtaggtggcccgccgcagcccatcgtcaatggcaggccagaacctgtgagggtgggagaactccagagtgggcaggtagttcatgacagcgacgtagatgaaactccgggcattgtccaccacgttgagtagagccttcaggtctggagtgcggccacttggacacaggggtgggggcgcactcgccaggtaggccagagcaggggttccattgaggcagatctccattgg

SEQ ID NO: 157650 - DNA, 1000 bp, Homo Sapiens
ttttttttttttttttttgcatcttaaagactttatgctaagtgaaaccagtcacaaaaggacaaatactgtatgattccacttacatgagaaatatgagtagtgaagttgatgatagagacaaaaggtatggctgttgctaggggaaggggaggtggggagttattgttcaatgggcacagaatttgggaagatggaaaacttctggagatggatgatggtgatggctggacaacaatgagaatgtacttaatccactgaattgcatatttaaaaatgggtaagctggtcagttttatgttataaatattttacctcaataaaaacaaattgaacttaaaaattcactgaagaagccaatatggaaaaaggactaaatgttaaaaaaaaaaaagccaactttttttttttaatcaagagataagtacttagctgcaagctcaaggtctcggttgaggacaatcattatgagtcctagtaaaagacaaccagttttaagaacactgtcaggcaagctaccatgtagttctccttgactccatgcttagctctttcagacttcccagtaattacgaagggtcacatttttgttcagctttgcccagtgctgtcattcataatagatgaatgaaaagtcccagaaacctgttctgtttgggaaggttttcttttgttccaggcttcggtggttaatatgcttgacaaatttcagagtctctctgtctctgtagaccaatgccaaagaattgctttctggattcactgttagcagctcttcatcttcacctttggcaatgtaagaagtaaaaccgccatattctggctcccagccttcacagccacagtacagaattaagtctagggcaaattcagccttgctatggtcatgaattaaagtgtagtgaccggtcttccaatgcctcagttccccttggcacatgggaacacttgattctttctttgtttcattttcctctggctctgggtctgtctgctcatt

SEQ ID NO: 157651 - DNA, 1000 bp, Homo Sapiens
ttttttttttttttttttttttaagttaaaaaatatttaatattatcagataaaaacattgattgtgacagctttacatgtttcattccatacacagtgaaaaaggcaaagtattactaggaaggaaatgagtagttgggtttgtaaaagatttattgatcacataaaagcaatgaataggagatgacatatatctaactcatgattacaaaacttttagagacaactaggttaaatatttcatgttttggctaagggaaaagaattcatgatctcgttaaagaagttcaaagtcaacactgatattgtacaactaccagtgcttttctaatgatctagaaatttgctataaatagctttactttttgctagttaatcacttactatgattgggttttatttaacagtgaggactaaagaggcagaatccttttttaaccactggataaaacagagacataaattaatgatgggtgctaagctttacattttatgttaaaaagatggaatatatttaagtggattgaatatatttcatgaggagttggacatattaaacccccaaatctgtttaggaagttttgtgagaaagtgtgtatatgccttgactcactctggcttacttttaaaatggaatacatttggcactaaataaaataaatagacaagcaaactgtgagactaagctgctccatctgagttgcccatcttgacttacaattcatactatttcttagttcttgactgagcacaaacagacctaaccgtatagcacttctgtgatgcatgaaaatagaatctagagctaagatactgcgcttcactgatgagccaatcttctattctgccaaaatcatagttacaaatgtgaaattcattcaagaaattcacatttttaacaaatgcttatactttttcaagttttcttgctagatatgttcttggttttgtggccagctaaaatatgatctttgaattaaggaaatccatataaaagaaa

SEQ ID NO: 157652 - DNA, 1000 bp, Homo Sapiens
ttttttttttttttttttttctgaaaatcagccttttaatctagttgaacccaacgagtggggaaagaactaaaacatttttttcccttcagattttgattataagaataacgggtcagaggtgtctcttccataggaaactgacatcccctatgtcctcagagttgttttttttttttttttcttcaaaaaaatgcataaaagaatttcaactcatgtgcatgccacacatttccatccccaccccaccctgccccaccctctacaggcacacatattcacacaccaaagggactccttcctgtaactggggaacagaatgtaaaaaaatccatccaagtggccaccgataccagaaataaccaaatgcatttacactcacaacatcagtcaactcacatgcacaaggagaagcgtctccaatcggagcttagagccaaaaattacaaatggcagagacttgagctatccataagataattttaaaaatccttccactggacactccccttcattacaaaagtatgcaaacaatcttgctataaatggaaaacaggcgtgtggctctctccctgggacatgagggcatagctaaaattccctgggtggaattaatgcctggaccattgctcctccctttcaggacaaaagggaaaggatgaagaggagcagcagggtagggacccacctcaggagcaggtggggcaccctggagctgcctcaggggctgggaacgtgttggcatgtgaccagctgatggaggagcacagtgtcaagtgggccacgatggctgtagagaaacccaagtgctctgcacccgtagggagtccagaaggtagaggtccacggacaggacaggcctggcctgctttgcttcctccacctaaggccttgggaccgatggcgtccgtctgagaggctgcatgattattttagggttgcaggaaggatgcttcccatctggacgtaagtgcacaaaccatgtctatctggatctcaa

SEQ ID NO: 157653 - DNA, 1000 bp, Homo Sapiens
ttttttttttttttttttttttttaactttccaagacctttctttatttcctgagatgaataaataagtggcaatggggtgtggggatgtggtgaacacagaacaggaactggcagcatgcagctggcaggagggagctgtgatggccccacccctgtgaggaccacctaatcctaagcaggggccaaagctctagcagccaccattaaggaaaaacttttgaaattcacacattgtgaagcctgccagtccccgccaggtgaagagctcatggtatccaccttcagggctactttttaccccaggggccttgtctgcccgggcctgggtacctgggctgctctgtaaggcaggtaggggtgcttaccccactctcaaaaataaaccaagctgtcctgagtgtccagcaggagggcagcccaagctctgggggcagcgtgggtgggaggaggtcctacaggtggtggccgcgattatctgcccttgatgaagccctccagcacacggtcactgcgctctgacaaccagtagccagtcatggccgccacagccccaatgaagatggcggtgaacaccaagtcgcccttagcagccagcgtggccagtgcacagatgatgatgccaaagaacatctgctgcagcaccaccaactcgtcttctgtcatctctgagaagaagcctgctgactgtgtatgagtctcgttccacggtcagactgtctggattgggatcccagctttgcgacttgcttgccatatagccctgggaaagtagcttcatctctctgcatcttcatttttacatatgtagagtggggatgagaacccaacttccagcgtcgggttgtttcaggggttaaatcagttaagatggggaatgcacctgggatctgctccttcacacagatgccttccatctgcttgtagccctcggcacagatgcagcgataaccgccctcggtgttttcacactgcttgttctctcccggacacacctctgt

SEQ ID NO: 157654 - DNA, 1000 bp, Homo Sapiens
tttttttttttttttttttttttttttttttttttttttttttttttttttccattcaaatgtttatactccatctacccagaacaattacagcagaaaaaataggcacctccaaagtcttcccaagaatgatgactttctgaaatgacacactgtacaaactggacaaatgagacgactgactgtgacaggggccggggagctcttcaaggggccgttttcttcaagtctcggatctgtttaatcaagtagttcttctcgtcagcgaactgctcatcatccgtcctttctttttggaagctgctcagaaactcaatgagtttgggctgattttttaacaggatctccacaataggctgtgttttgtgaggactggccacaaacaccttaaaaacatgaaaggcttcaaactggatgttgggacttttatcccgaaggaggttcatcatgagtttcaggttctccggcttgctgatatactttgtcatgatggcaaagttgtgacggtccaggatcagctcccctagcagctttaaagactgtctcttagtaacataattctcagactgaagcaatttctcatagtcttcaaaaatagtgtcgtaattttgttctaagaagtctgctaccaacactttatgtctggttagtaaatccttgaaagtagcaaaggcatctgaagcaatatcaaatgttgacaactccacgtacttaaagaaatctctgaattgattagaaaagaggatgattttggcaagtggttcatgtcgaatacattctctcagcataatcccacaacgtaaggcaatctgtggggcttcatatcctttgaggagcataaacaggatatgaggatgagcactaatatactccacagtaggactccgagtgcctatctgtcttctcaagatgttgttaaatatctgggtcacatcttttttttcctcaaagtctatcagctgcaggtcagctatcagtgtcaccagcaggccactgctgt

SEQ ID NO: 157655 - DNA, 928 bp, Homo Sapiens
tttttttttttttttggaacatcagggactttaatcacatcccgcagctctgcggacctgcccaggcgctgatgctgcgcacagcccacccccattccctccctcccgccctcctggccctggccagctcagctctgtccggggtcggagagggggtcctgaggcagcagcagcccagctccagagtgacaggcaggggctgtccagctgagtctccgcccccacgttgccctgaggcaggcccagctgctgtcagtgctgcttgagacactcagcagcatcttccaaggtcaggttggccaagtgtgggggctccagacaccttaaggctggcgataccaggctcatgctcgtgtcctgtttgtgccagttatttatgtagttcaggaggccctggacagctgacttccactgcgccgaggactcgcagttatagccaaagcaggcgacgtgcgagtctgtgcagttgttgcaggagatggtctcgtactggaagatgccacagcggtgctgacagtcgatgcggctttcgatgatggcgttctggatgaggtgcacctgctcccggaagatgtttcgcagctcgttggggaaatacccggggaagtacatcttcccctggtacagctgatccatcatctggtacactgctgtcgccacttggtccagcttctcccgggtgatcttggcggggatggccaggtgcagctccttcatcgtgtcgtcgctccagtcggtgagcagcgcccctgacacggggatgtcgcccacccaccaggacttgaagttcacatggtggcggtagaaggagaacttcttggagaagttgctgtggcagtgcagacagccgtgggccagcgccgccgtcaggcacaccaggcacagcagcagggtcatgcccgtcccggcccgccgccggccaaccaac

SEQ ID NO: 157656 - DNA, 1000 bp, Homo Sapiens
tttttttttttttttttttttttttttttttttttttttttttcaagaggtaataggtgtttattaaaaactttttcacccagaggcagttaacatttataacttaaaacccagcccactacaaaaagggatgggagcaataaaaactgtgcaacattgaccaaaggacccagacagacgaggcccgggaagggcagcccaggggactggggtctctcctctcccgaggcccagagcagctgcattgtggaagccgggatgcccccagcccctggcggggccctgtgcaccggcctctccggttggggcagggacccccgaaaggccatcagtagtagtgtgtgctcatcgcgcagcctggacgctcagccactcactctgctccgccattgctgaggctgcaccccacggcggctcgatgtgaacgccagttgccgctcccgcggtctccctccagtgtgctctggatttccttcaggactctctcatcactgagcagagcgcgctccatcaccaggccgggctgcttctcctcgccatcactctgagtccctgagttcctggctcggctcggggccttcttggggcccgcaccgttaccagggcggtggttcttggtttctgctgaatccaccagacaccggggctccaccagccacttggtggagagagagaagcgctcaaactccgagggtgagatcaggtagaagccttggccatatttggtgaagacgcaggaggcgatgccactgacgtcctcccggcggatgcagctgtagcgcacctggggcttgagcaggggcagcgagaccacctggatgtcgcccaggttggtaaggactgccaggtggtgctccccgtagtcctcggctcgacgactgccgaagtgggccacgctgacccgccgcactcttgagccctccagggccgtcagcttcaacttcagcttggcactcaccttgggcagcgtgaacaccttgaactgctcctctgatacgac

SEQ ID NO: 157657 - DNA, 1000 bp, Homo Sapiens
tttttttttttttttttttaagatatagggtgggtttttatttctaccaggcccctctaaacagaggagcattttaagcaatgaaactcagccatagcttgcatggaagttcatctgtggccatatttggatctgtcttttctataagaagttctgtcccagccaatttgggggttggttcttggaggagtggggatttctcccaatgatgggggctcagccggtcataagctcctgcctgggaaggctctgctggagagctctccctgagatctctcctaggagtctgcggttgaaagtctggcagttcctgttctccaagctgagatccagttttctccaagagcaccttttgcccctgcatacaaacggccacccactgctttggtttcttggatgctctgtgaaaatcttccacgagggtcacaatctccttgctgctcattggacatcgatgcctgacccgagcctggatctccgggggcaggatggtcaggaactgctccatcaccagaagctccaaaatctgctccttggtgtgcagctcgggttgcaaccactgacggcagagctgtcggagctgggagagcgcctcttggggtccagacacctcttgataacaaaagcgtctgaagctctggcggcagagctcaggatctgggcagtttttttgcagaggagggccccgtttctcttctagtttggctattatgtgtctctcttgcttggaggaagcttcagtgttggagcttaaagttatctccattttagctgccattttgggcgtcaggagacaactctctccttgtaaacgggttaagcctttgggatcatgaccctggagaagtctctgaatactagaaagattctagaaacgaaggttctctgaggatgttagggggaacgggatgcagagacaaagcctcacttgctagcctttactagccaaactcaagacaaagcggtccctgggagtgggaagagttttgtcttcttgtca

SEQ ID NO: 157658 - DNA, 1000 bp, Homo Sapiens
ttttttttttttttttttttttttttttttttttttttttttttttttttctctcattttattacaatgaagtttaacagtacagaaaagtcacatgaccttggtgggtcagatttcttaaaccctgcaacatgaggaactctaaatacattaaatattgttacacattcagacttccaatgtacaagtacttggaaacagttacagccctcaccaagctaggttggggacatgaagtccaacagcatctgaaatgctgtgaaggcaaactttacaaatagcaatgtaagcttacagaacttgcctttactagggtggtatgttcatgtaattccagcgccttcacaatttaacgaaccaaatttactatacttcacttctaaaaacctagatgaaacatgaaaaagaagccatacagtataaattgcaacttcaggaaaagttcctgctttattattccaaataatttttcccatgtaaaataaatgtccaatagttcctggtatgtgggaagataatgtttgttaaagtcacaatgaagccttattgacggaagcttggctatataaacagcacaagttgagaaaaggtttaatctccaaacctattagactggatgaagtaagatcagtaacggccaccttgcgacattacaggaggtctcattcccatcggaggtcgaggaggcccaccctggtaagggggcaccattggcggtccctgcccatacgggggcatagcaccaggaaggtatcctggcatgccttgatgatgaccaccatactgaccatgaggtggcattgggggtctcattccttgttgctgtgggatgcctggctgtggtggcatcatacctccaattggtccaactggtggattaccgatgggggcctgtcctggccgaggaagattacgttgatacttaggtaactgtgcccttctctcttccagggatatatcctcatctggatggatcaacttactggttgcactagttgtt

SEQ ID NO: 157659 - DNA, 1000 bp, Homo Sapiens
gagacagattctcgctctgtcgccgggctggagtgcagtggcgcgatctcagctcaccgcaacctctgcctcccgggttcaaatgattctcctgcctcaacctcctgagtagctgggactacaggtgtgcgccaccatgcccagctgatttttatatttttagtagagacagggttttacaatgttggccaggatggtcttgatctcttgacctcatgatccacctgccttggcctcccaaagtgctgggattacaggtgtgagccaccgcatccggccaggaaattacttttaaagcaaataggaggctgggtgcggtggctcacgcctgtaatcccagcactttgggaggccgaggcgggaggatcacctgaggtcgggagttggagaccagcatgaccaaggagaaacaccgtctctactaaaaatacaaaattagccaggtgtgatggcgcatgcctgtaatcccagctactcgggaggctgaggcaggagaagcgcttgaacccaggaagcggaggttgcagcaggccgagatcgccaccattgcactccagcctgggcaacaagagcaaaattccatctcagaaataaataaataaatagtaagaaaacaagtggaagggatgaaacaggctgcacattatttttctttcaattatatgggttgccttaatcatagaatgaagaggaccaagtgaaaaacagccaagtagcaataaagaggaaaacaagcccagagggcagaggagcctggacagtttgcagggcagagcctagcagacctttctggaaaagggagtggggaggctgagggagggtatttgctaccctgaatgtactcactatagcacttgcaagaactaaggtctaatcaatgttccagaactggagtcagacatgagttgtaccctattgcccagcctccccctccatgcctttcccctgcccctacacaccctggctatgctgaactacttgcgatttcccagctataata

SEQ ID NO: 157660 - DNA, 1000 bp, Homo Sapiens
ttttactggtggcaagtgagatttatttaaacaacgacatgtcaacaggaacaggaagaggaacatgtgcgaccactgtagtgaccaaggcttctcaagagtgtgggatgagacctgcggacgaggcccgcccaccgctcagggagcttgcaggtctcctccaggagggcaagtggcttcggcttctggctcggcataagccttcgacagattaataagttatctccttcagcccaagctcatttcctcctttggttgcccagcaaaggcagtaatgccgcatgagctgctccagcagctccatttcatccaggaattcaagtgattctatcctgctcacttcagctcgaggtaacctgttgtacaactccatcatgtcgacggccgatgctgtttcccacccattcgacaggagccgttctttctgtgactctaatgacttgcaggtctccactcccgccaggtcacactggcgtctccgcaggttttcaatcatgatctgcccaaaccgatcacccatgttcacctgttcgtagtttatgaacatggctctctcaaaactgttggctgcccacttcaggaggtttgcggactgctctggagtcatgtaaaccagcacacattcagctatcaggagtgttggcaatttgatactgtgcagctttctcgtgacaatcattggaaagtcaacctcaaaatatttacttgggagaagatcttcatcctttaatctccagaaggtggtatccatgcctgccccaaggttgacaatttgacaatgacattctgtcttccgtagaaatgcctttataagctgactgacaccatggactcgagcaaaatatcctctgttgatttcaggggctttcctctctttagacagtctcacaaagtgctgtatgtaagggtcatgccagtagccaatgcttactgcaaacctcttgcacagggaagcatcttcgcaggtgccgcgcacgccctcgtcgtctgcgtcgcagct

SEQ ID NO: 157661 - DNA, 1000 bp, Homo Sapiens
ttacagtctagaaaggcaggttttatttctggttcttctgtgaacctatttgggtaacccccaccccccaagacctcagttccctcatgaagatgagcctagactacctcataaaaatggcccagagtgtctccatggcccccgatagtctctgacttcgccatttggttgaatcagttttcattaactcacggggaatatttgatctgctcatctcatagggatatagcaaaggcaatttgttgagtgttgggggaatggataaaggtgagtaacactaagttcctatttgataagtgtcattactgagaacttaaggccacctaacaccaaactgggaaaagcacaaaaaaatgcactaaaataaataataggcaagttgtgacatttgaatttcacgtatcttcattttcatttttatattttatttactattttgctccacaatttgagtcaaacatgtgatgagagttctaacttgatatgtttacttcagtcccaaacatagtcatctttggtcttttctcagatttggcctaaaactcgtagtttcattgatttttttttttaactaggcattcttctatgttctaggtcttcaagaaacctccatacccaagaaaaaatagaaagcaaccatgttctactatggtgccaaaaatagttgaacatcgacatcaaaaagattctttctgtctgcttattcacatattctggtttgaattaaaagtgatgaaattatcctaaatacagttggccctctgtatccatgggttccacatccacaaattcaaccaactgtggatggaaaagacttgaaaaagatgagagaaaataacaatatgacaataaaacataatacaaataaaaacaatacagtataacaacgattacatagcatttacattatattagggattgcacaagagaaggtatgtaggttatatgcaaatactgcaccattttacataagggacttgagaagcatggattttggtag

SEQ ID NO: 157662 - DNA, 1000 bp, Homo Sapiens
tttttttttttttttttttttttttttttttttttttttttttttttttttttttttttttttttaaaaccaaaagaacaactttaataagcttttacggcactgcaattacaggaacatcgacccataacatgcaacaaaaatgattttgccttttggacatatttaacagataaacttgacattacaagtaacagcaacacattcccattctactgaagaaaacaaatgcgatttaactttcaggttagaaaacgtatcttcttactgcaatctcaagtagcatttagaaagtttagttttcccttttctaacctctaaaagatgatatgatttttaatgcaatcatacacaactgttttcacattggaaataatcacgaggaatcaataggtttaggctaactgactgattggttttatttccattgttaatttcaagagggctcctgcagtattgtggatttcagatggggaaaataatcagaccaggagtaaacggccttggtctttagagtgggggagggaacatgcagcggcacacggggcaggtgcctgacttctgaagccagatggacacacacggcttgtggaaatagtggtggcacggcagctcagttgccacctcccccttcacatattcgctacagcagatggggcagcacatctcctgaccaactgcgccatgatcttcagtgaccaggatctcgggaagagcgtcaatgctctccttgcttgctggtggattggccacctctacatccactgcgagagactccaagtgcgcaagggcagtttccattgcctgggccaggcgttcttcaagtgccatgtaggtgaggaactgagggtccacataggaaatggcttcagccactcctaacccatctgcaaatccatcaaagaggctccaatccacttctaggtcttcgctcacactggagtcatcttcaaggttgttgtttccatccagcatgaataccccaggttgcatcaactcg

SEQ ID NO: 157663 - DNA, 1000 bp, Homo Sapiens
tttttttttttaaatggtatttgctttatttttattgttattgataatacattagacattaccctcccatcaggtgcacagaagaaagtcaaggctggaatttcattctcttatctaaatctctctgttctctctcagggaatattttcagagaataggtggaatgaagtgaggctgtggagaatgttatctatgataggatagagggcatagaaggccaggagtcaggagacctgggttctgtcctggattatacaccagctcactgaggagctttgtcctctctggatcaagagtcccacctgaaaatgaaggaactggtccagataacactggagccctttcccccaagatgcactggcattcagaggatggtgcaggtccagtcctcttctgcctgtggggtggatgctgcctggagtgtgctgggtcagcagaatccaggagctcactggggacccatcccaattcttaaagcatgggtaattcagccaggcctcagcctcttgtgccagctgcctccaaccctttgggtctccaccacccaagtttcctgtagggtccgccgggtccaggatcacaggcctgggtttcgtgagctgccttctcaggtacttttcaataatggggtttttaaagtcataatactttgtccagtagatgcagagttgctggtagtttatgactaattccaagaccgtccgaaatccctgggctgtgttgaaatgtgttttcatgctccctcgctcccaagcatagaccgtcaggagctccagggcatactgaggtggcagcttcccaagcttcttcttacaattttggtaccagtgcttgactaggcggatgaggctcttgagcttggtggggcgctgcttcaggaagtctctctgtagttctgtgaagcaggtggagaactcgccctctttctgcaggtcggtgcactcctcgatgagcttgacatagatttgggggttaggtttatagccgccagtcaactgac

SEQ ID NO: 157664 - DNA, 1000 bp, Homo Sapiens
tttctcttactcatttaaagatgaaattcttattattattctgtatcatgcattaagagagagaaagaggattgtttttgcattgcgtttgtcacacagcagcacaaagacaatatatgtaagcgtagcgttcaccagatttgacacaagagatagcgaacaccacaaagattaggacagaccgcgtatagtaagctctgcggaactccaagaatctagagggggctgtgggaacgctgcttagatctcctcgtcgccggcctccttgctgaaggtggtcatgtcgatcttctcggggaagatgatgttgacggccaggtcctccccgctgttgtactgaagcagcaggttcttcttcttccgcagcatgtggttgtagcgcaggttggacacccaggtctcgcacttgttgaggaagacgatacccacagtgcccagcaccaccaggctggtgagcacgcccaggatggtgaagcagatggcctggccctcggtgaggagaggggttttcttgttgagctctttcatggacaccttcaggatgcggtgctccggctgctgcaggtcttgtcgatgaagccggctgggcaccggcagcggaagtcgcccccaatgtcagtgcagacgccgtcgttctcgcatgggttgggggtgcagctgttggccacgatctcgcagaaattgcctgagaagccaggggggcacaggcaggaggcatgggaggcccggccctcatcatccacgcaggtgcctccgtgctggcagggggagccgttgatcacacagggcccgtcctttttctggcagtcctttcccgagtacccgggggcacaggagcattcatagaggccatcgtccaggctcacgcaggtcccgttgttggcacagggggccgaggagcaggcccgaacatctctatcacagagctccccgtcccagccgtcggtgcaaatgcactgcccgggttctccacagagtccgtgaaggcagccgggagagg

SEQ ID NO: 157665 - DNA, 1000 bp, Homo Sapiens
tttttttttttttttttttttttttttttatttcgatattatttatttgaaataacatgtttagccactagatgtcaccctttttaagcaacaaagactacttcacaaagtgtgacatcaatagcagttacatttgttccactgtatttgatgttctccatatggttctcggctacatactggacactttaacagtgaaaaactctttggtctctctaaagctcttgtccttgacttgtccaaatctgttgcattccattcctaattaaagaactccgatctcgcaggtttaatcgtatgggcatgcttttcatgaatgaaggcaccagcaattcctcctgctcctgcatttaaatacttgtaggaacaccagcaggcaaaatcaactccccagtcatgtaagtagagttcaacatttccaactgcatgtgctagatcaaagccaacataacaacccttcgcttgtccagcttttgtgatggcaggaatattaaagtgctgtccagtgtaaaaatgcaccccactgaacaggatcactgcaattgagtctccttccttctcaattacttcaaggatatcctctattcttaaggtttcttccccctctcttggctttatcatccgcatactttcttcaatgttaagtccgtgaagttgtagttgtgactcaatagcataatgatcagaagggaaggctttggcttctagaagaattttatatcgttttggcgtaggcttaaaaaatgataacattagaagatgtaaatttacagtcaaagcattcattagggctatttctttctcattggctcctacaatgtccttcataaggcctacaatactctcatctcctgtaatccaaggacgcttccccacttcatgaccataggctgctattttggcccacttatctagttcttcttcaagatatgttttaaccatttttggttgaaggccaagagaatttcccaagaaatagatggcattttcatctttattc

SEQ ID NO: 157666 - DNA, 1000 bp, Homo Sapiens
ttttttttttttttttttttttttttttttttttttttttttttttgccgctgtcaacagacagtttattctatatacaaacacaattttgtacactgcaattaaatagaatggaatgagcgctcctccgcattcctccccgagtgactggtttggccgccggcccactccatccccgagtgggactggaccacggccctggctgctgccactgatgttggcgcctgcaccccacgtccctatgcccgaggcgcaagctctgctctcccggggaccccaagcctggcgcacacgcggggagggcggggccatggagaaggcactgcagggagcaccaggcagagccgggctgaggccggccggcactagggcgcgaggccccaccccaagccggcctctcctccacacctccgccttgctcagagacctgcaccatgggaccccactccatcctcaggacggttcactgcagacctaccaagacccctccagaaccttccgcggaaccccaccccctctccttgctgaccagctcaaacacctcactagcgggtacaagcctcgggcgcgacctcacaccagggggaggaaagccgccttccgggcaaaccccacgaaaccctgaaagcccccgacacaggctgggcagtcccagaggaaggaggtggctggcctcccccacccccacgggctcgggaaggtcaggcccagccagcaggggtcagaggcggctcagctgtgcggctcaggaccccacctccgagggcgcctccgttggggccatggaggccgggctaggcccgcctaccgcagcccccaggggagttgtgtcagaagctgcggagtcactcggggggacactgtcctggggggcgtgggggaggcccccagcagggcccagcgggctggctggacgccgctccaggagggaggcgctcaggccggacaggaaggaggcgtctgtgatgatggcagcggtctctgccatccaacccaggtc

SEQ ID NO: 157667 - DNA, 1000 bp, Homo Sapiens
aatcttacattatgttaggctattgtattaggctaggaatggtcaaaacaatgttatggtaagccaaaaccaaactcaggggagcaaaggaagggggaggagtggggcttgtaccctgctacaaacctctaggctaggaaatgccaagattgtgtgtaactaagtctaggtgaaaaacttaatcccttaagtcccaaatacccaacttagagaggtacaggaaacggctggtcagcaacatcactccagtgttttaaaaactcagagtacataaacttgagcttattttgcctgttttaggaaataaagaaatataatggcacatagggatttgaaagaatcacaaacacatcagagagatcttatgttaggctgatttataagtgctgctttgggcagttacacagtttgtttacaatgaggagttatttgactttgaacatactgtacatggcaattagaagttgtcatggcaaaagaaaaccacagctggcctgccacagccaacacaagaaccagaaaatggtagatgaaatgaaggaataaaggtggggtttattccttattataaaagaaaaaaaataattcttcagcagtcttaacaaagacatcaagatacaaaattacaagtgttttgactccagccctgtccccatctcctccaagagcagaggtaggagacagttgaagcaaacaagcaattctgtaaaaattacctagaaaccctacaaatttgattaaaatctaaacttctataattttgctttttaaaaaatttaatatcaaaaggcctgctttagtgacatgctattcctaccagaaaataaccccaataccccctctgtcagtaacatgctcaagttgaccagccaactcttatctctaaacctatgtggacaagtgtgtcttttaaaccaaagccacggagatcaagtgactgctagtaacgtgttgtctgttaactaatccagtgcccaccttctccagagggtgggcaggg

SEQ ID NO: 157668 - DNA, 1000 bp, Homo Sapiens
tgacacgtgaagggttatttatggttatgatgaccctgtcctgcaacgagggactggcagccactactgaggaggagggtcccatctctctcctgtcggctttcaccgaggtcacagccagacgtggggcaaaggtgttccctgtcctacccagccattcctgggcctgccgcctaggggctcacagggcccaggagtccccagctcacaggccagggcatcaggccaggcgcgctcggtgcacaccgcacctgggaggacctgggtacactcaggagaccaagagcactggcgggtcaggatggttggcgttcagctcctacggggtggggagaagtctgtagccgagagcccagccccctcctgccaggtcttcccaggttcgagagaggctggaactcaatttctgcagaaaatctcccagtttttcctgtttggttagtttttttacaaagacaggatcttgctgtgttgcccaggctggtcttgaactcctggcctcaagcaatcctcccacctcggcctccgaaagtgctgggattactggcatgaaccactgcgcccggctggagctcccggtttttaagcactgcacgatactagaagagctgaccttttttctggcctcacagcttatgctgaagctgagtgtgaggaacagagagacctttctgtgacgaccgctggggcagagtggtctatgcgccgagatcctggcatcagcaagggaggcgggtcctcggggaggggcagcttccacagtgtggctgcagcgtgcacagccaggtaggccctggatgttcacccctcactgcccttggggaagcacctgaccgctggggatgtccaccagggagaggacgctgtgtcggggacaacatgcagcatcagcacccacaagggcccggcctggccccgcctctccactcgcccgaggtcttgctgtggcccaaagcaggagtccagggctggcgagacctccggctgcagaaaggcaggc

SEQ ID NO: 157669 - DNA, 1000 bp, Homo Sapiens
agaggagactgaaaaagataatttattccatcagaggcatcacaattacagattacagacatttgcaagtaaataatatgcagggttagagcgctgcgttttaacatttaacattcatgagtaaacagagatggccggtgggtaaatatcttgccaaggtggttcctggtattaagccttttgagtcttaagatgacaaatccctagggatcaggtggttttcccgcacgaactcttgtcaatgagaaatccctcagccccttttgtcttgggtctcacagctccagaagtgagccgggccagaacgaagccatcctagagtccccaaggacagccctcccgtggaccccggctagggcccccagagtctcatcctcaggagtgcgccagctctgggcctgcgtgccggcggggtctgcagccacaggtcccgcgagtcccggacacttccaggacgtggtctcctggtgagacagctcctccgggtaccagtctcgactcctccgggcagcgacaacaaagtctgcggtctactcaggcctccttgtcatccaccaagccctctctggcttcattggtactgccgcaggctgctgggcactagtatctcctggcgtctctgttgcacctgaggttccacggctggctggtgttccttcctggtttcaccaaggcctcccacaccagagtctcatctttcttgtctttcacttgcagcctgatccctgatcccaagtggccaacgtagaactccgagaacagctggtcttctccagggcttcgatagcagagctccagttccttggggagtatttccagcatccctgaaccagacccagacacagtgtaacgacagcccatataaagtggggtcagcgggggtggcttgtggattcgcacaaactggaatttcatttctagatcatctatggccttccgaatggagcagtcacttgggatcaggtagaggtggaaggtgacttcctcaggatggacgcgg

SEQ ID NO: 157670 - DNA, 1000 bp, Homo Sapiens
tttttttttttcatgcaaatgctgtttattgattttcagattgtagaatcaacctatggacaaagcacagaagatttagttttgcttacagagcagaaggtagatgttaacaacaaggaagatggaaaagtaaagtacatcagaactttagggatacagttagcgctgggggaacccctgctgggtggagacaagctctggggcagaagagaagcccaggaagcccttggcagttgactacgtggccctgggctggatacttcgtcgcccccctgccccaccccacacacctgggtggtgctagaggatgtcgctggcgtgatagcccctcctcgtacccgtcctttagggaggacgaagaggagggagagagttggaaggggaaggtcccaacgctgccatgctcatcagacacagaaggaggtcaccagactgaggcaggcggtggagcttggacaccagactaacttgaagatgagctaaaacaggggcgagtggaagcggctttccctaaggcatgacccccagggtgccatgtcagtttaccattgccgtggcaacaccctggcatactgccctgttccgtggcaaagaccccaggacccagaagttactactccttccctagaaatctttgtatatgcagctccttaatctacatgtaattaaaagtgggtataaatctgactgcagaactgccctgagctgctgctcgctgcctatggggtagccctgctctgcagggcagtcacagagctgcaacactgcagcttcaatacagctgttttggttttggttttgtttgtttttcttttgttttttgttgttgtttttgttttgttttgttttttgagatgaagttttactcttgttgaccaggctggagtgcaatgacgtgatcttggctcactgcaacctccgcctcccaggttcaatcaattctcctgcctcagcctcccaagtagctgggattataggcgcccgccaccacgcccagcta

SEQ ID NO: 157671 - DNA, 1000 bp, Homo Sapiens
tttcacattatcctctcaaacaaattttatttgtattctgctctaacaaatatagtatgaaggcaacagttgttttttagtgtatggcacagatgaaaagaaacaaacagatttagaagcagtccagcatttaaatgccggtttaacaaaagaggcacgtattatcctatttagcagtttataccagatatcagaagccatttttttttccttgcaagcaacagactacatttatttgcattaagtaaaaacatatcttgatcaagaaaattactttttttctgattttcctttatatcacaaatgtcagggtaaggcaaatccttaatgaatcatgtaataaaaaccctattccccaagaaaatatattgaacatattctgctaactttgttatttttcaaagcaaagccgacatgcgccacatacagagaaatgtcttttcaaatcaagtgcatcaagcagaactgtattaattcacaaagaggcttttcagtgtttcatagaaagatttacaattagctgcagtgattaatatgtgacccagtatcacagacagtgattcggatgccttctttgtaatcttttatgaaagaagacttgtccatcatctgaatagttaccagctagaggaaaagcccctttgtctctcctacagcgaggaccattttaattagaactattatggtgaaggcctactttgatcctctgtatgcaaacatgactaacatagggctattttcctccctccctcctgtaactcttcatgccacatagctgtattggagtttggttggaaattgacatccagaatttatgtgcgggaaaatcaatcagcttttcaaatctatttcattgtacagcctgtgcaatggcagcaccagcaaataaaggttttctgtgttcaggtgtctttgatctggctatagttagattgttaatatttcactattgaattggaaattaactttatcatttgttttaaagcataaaactgtatag

SEQ ID NO: 157672 - DNA, 1000 bp, Homo Sapiens
ttttttttttttttttttgactgctacattttactttattttgttgtaaggaaaaccaattgactaagttgtccccaaaatgttagtgttcactgatcaagaaggaaatgaggtcagaaggcaaacttttcacttcttctcaaacataaattgcaagtatcacagaaaattgtaacaacacatgcaacacgggatggctttcaacacacagagagcctaagcaagaagagtgagtactgaaggtctacagaggtcagactgggagcactaccacaggaagtttgaatctatccacgcagctctttcctcccacagtccaggctcaacacctcttcctattccaaggtggcttatccatatgcagaaatccaggctgttccatatacattaatacttgcccagctgtgtttcacgaggcatctccataagccaagccccgactcaaattctgtacaggaagttcccgttgctgtcaaagaactctcggcccctctgcactactttgctgctgaagttatctggctcctctgccttcaactcctccagcttctgaccacttggcaacgcaccactgccagttcctctggggctctcagaatcactggagtacttctgcagctctcttggatgacctaggggtgcagcaacaggcacaaagctctcctccaggtcctggatttctttatttcttcccttccttctccttggtgtatttgtcctgtgagtgtctgactctatcactttcaaagctgtgctgtgatttgggtctttagatgaggcttcatgccctggcataagcaaagagcctgatacagagtggcctgcagggagcagctttgaggtatttccagagccccggaggtgctgcagcgagtgggcaagcccagctttcttaaggactttttgatcctgcttcagcttctgctccaatgtgggtaaaaacttgctttttaaaactcttcggatcacatcagtgctgacatcaaagccttcagccaac

SEQ ID NO: 157673 - DNA, 1000 bp, Homo Sapiens
tgaataaaaatcgtgtttaattgcagaagacacatttatgttgtagcgtttattgggtgcccaccgctggctgggcaccgagctgggcgtttgcaggacacgcagtcacacaacacctcacaacagccctgtgaggtagggatgagtcccatggaacggtccagaaaacgcaggctcccaggcgccctgcctgctcccacagctaggcaggcggtacagcggggactgaagcagttctttttgactccaggttccatccagctcttggtcccattgttttagagattacagaaggtttggtcccagagtccactgagcccattcacaacgtttacaggttttgtttcctatcccccacgctcatcgtcctttttgaagtttggaaaaatacaatttaaaaatgaatatgagtgtacagtttggagttcggaaaattagcacacgttctgtttggttcagggtccctctccacctgggtcactggcgcagcagtaagagttctaacgggcaactcagcggcctccctctgtccccgtcactcctgagcatgtctgaggccgccagtgaggctgggactcataggttcgagcagaggaagaggagctggtggcagtgaaatgggcaacgggaaagtggaggcgggtaaccctccacaatggctgctcagcaaacacagaaatcctcttcattcttctcgaccaagaatctgcagtcctcctccctcctctagggcgcacagcttagccctgacccaggcaagcacagggcttcccgtggtctgcagggaacgcacctagccagccctgccagggccacccaagggggagtgtgggccgagggtcacaggacgtccgaggcctcctctgcaactgcctcatcttacagtgcgggaagccgaggctgagcgaggaagacaattcccagcatcttctatactaccaatcccaaagaaagacaaaagagacctggcaaaggaaatttgagtctccaaatcaccacc

SEQ ID NO: 157674 - DNA, 1000 bp, Homo Sapiens
gaagtatttttgttttttatatacagaatacaggaaagtttctgtaaagtctaaaacattacaattactatgtacattggtactggttgtgggggtgggaggagaggagggaaccaggggcaggaggaagaggagagaagtggcaagagaacaaaaaaaggagacaaaacaggtttacgacaaaaacatttttgctacaatagacaatttgagaaaacgctctaccacatgtagtactgtacacggtttttaaaaacattgaaaaaatgtcatcactagatgtatttacacaaaatccaaatacacttttccttatttgaaataaaatagatggacagccagaaaaagaattcatttctcatttgtccataatacacagtagctacctgtagtgcaaccgctgcagaaagggaaaataacgtggagggtgggaaccatggaaggaaggtgggtagcgatctttatattaaataaaacaatgatattgtatagattttgctgtatgaaaactgtattttttcttttaatataaaactattgtcactgccacaaaatagaacaagtttctgattattttacaatggtgggcgagggggagggagcaggaggtgggtggggaagggttttgtgttggaggaagtgtccagaccctgggtctttccctccctgcccacgctgttcctcagctcaggtctgccgctttcccatgaaatgttgagtacaaatatatgtgcaaatgccccctagaacttgagaaaagaaaaaggatttttaaaaaacagtcaaaaggttttcttcatttcatgcaaagattgtagttgaagggtttctggtagagtatagaaaacacccgggcttggtttgtgtacatttttgcattgcaggagtcttgggtgggtgtacaggccagtggcggggtagccgccagtcctaaggaacagagttggagcgcagcacagggccctggtggggcttgagagagagcttctcggccaagacc

SEQ ID NO: 157675 - DNA, 1000 bp, Homo Sapiens
ttttttttttttttttttttttttttttttttttttttttttttataagcatatcattttattttcatttaagccaactatgctgtaagctatttagacaagatgattcacattttatacttaaatacaaatttcagaacataaagtatattttctgtttttcaaatccatattttatctgaaatacatttcctgcaacaaaacattattagaagagttaaattatttatttaaaaaaaattttttagagacagggtctcattctgttgcccaggttggagtgcagtggcatgatcatacctcactgtaacatcaaattcctaggctcaagtgatcttcttgcctcagcctctcgaacagctgggactacaggcatggactaccatgctaggctttttgttttttaaatagagacaaggtcttattatcctgcctaggctggtcttgaatgcctagcctcaatatccttctgccttggcctcccaaaatgttggtattacaggcacgagctaccgtatctggccaaaattattttttaatggttgtagtggagcaaattttcctcattatgtacctacagggaattagcacactcttaacggttcttgaatacaacaaagaatgtggtattgatgagtacacactatatataaattcagccaaacatccacatccaaacatccaagctgtaagactgacttttaacttaaaattttgaaaataaatttaaaaatgccctccaaactactggtaacacactcctttatggttttacgcagcaggttccaggaattacagttttctgtgcttccttaaatctttctcttggggtagccatcaatcatcttctttctcaatataggtctttgcattaacccgcgccatctgcctggccaagtacctgtctctagctgacattacagtttcttcattgttccgctttgcaaacttgctcactgcctcaggtggtctctcttgttctttacccttctcttgccct

SEQ ID NO: 157676 - DNA, 1000 bp, Homo Sapiens
tgctttcttattattattttattgcagcaaattccagatgtgtctccaacgggaaaatatacaaccctcttgcctttgatgattattcttatgatttcaggcattaaagaggttatatacatcataaatgacatggcagacaaaatagttaaggaacacaaaactgttatgacaagattcatgggacacgtttaagtggaaagaggtgaatgtgggtgacactgtgaaggcctcgaatggggagctccttcctgcagacacagtcccgatgtgttcatatagcaacatctaatccggatagagagacaaatgtaagacacggcaggctttgccagaaacagcttctgtatcagtgcagggacatccttcctccaggcagcaggccttcaagcttcaagcctcagggcccaaccctaaggctgggggctctccctgcaggcaggactgggcctggagggcctcctcatacttctggagctgagaccagaagcccgggttcggttctgctaccgggcgagcgctcttcaccatctggaaggccttcgccaggctgaggccgcggtgccgcatgaggtacgcggtgcagacggcggccgagcggctgcggccgttcttgcagtagactaggcaggcgccgccggcgcgcaccgcggcctccatggcggcgcacgtgggctccaggtgcgccagcaggtcctcagccgggtcgtcgaacacgggcacgcgcagctctgccacgccgggcgcgcgcgggccgggctgctggcgggagacgttgacgcacagcgtgactcccgcgcgcgccagctgctcctccgcgcccgcggctcgcgcgctcccgaggaagagtgagggcgcgacgcgcaccaacggtggaggtacgggcgaggcggccccgcggcgcccagcttctgccggtcccatggcgcccgccgaagagtctgcttttgggccctgaggatctattttgggggctcaggcgcccgcccaggagtctatt

SEQ ID NO: 157677 - DNA, 1000 bp, Homo Sapiens
cagaggttttaaaatgtgtattaaatttcatgggtatgcacagtagagaaggcatcctcacagaggcaagagttccaacctggtgacaatggcagtgagccacccgtctagttttcaaccatctaagatagcagcagctggctgttgcccctggactgagatttcttcctctttgctggtggggggcggctggaacggatgggagacacagtgggaggctgaggccccttgggggtatcattctgtttctggaaggcagctttctcaaaaggctgctctggcaactgctgcttctcaacccccttggcccttccaaggggctgatgatggtccttaggtttcagggtggcctgagtcttggatggggataacacagccggtgtttgtgtgtctgtgcccttgggaggggcattctgcctgaggaaagcaactttcttggaggactgtaatttaggtgatcgttgctttagcttcccagtcacctttggctccctgatcccttcggcttttccagctggctgactgctatcctggaagctggaggaagcttgggtctttgtgacagaaggtacagtggacaattctgagtctgcccctttggagatgccattcagcttctggaaggaggccttcttgggatgttgctgtttctgcagctgctgctttgtctttgcagcccccttggctttcttggctggctggctgctgttctcagacttggggatgacctgaggcaagtctacatttgtaggtgtggctgtttcagaatttcctgtctgggactgagggatagaattggaaaatttcttgaacttggcaatgaagaacccatccatattgtgggtatgagggtagaagcgtcgggtagaacgcagactggggtggaagcgcctttctcgaaagcgggtaaaaccttcctggccaaagtctaggcccgtgggcaccagtcgcacattcctctttttcagagcatagtctaccacccactcattctcttcta

SEQ ID NO: 157678 - DNA, 1000 bp, Homo Sapiens
tttttttttttttttttttttttttatgaactacaggtaaaatctagaagaacatagataataaaaaatttctgatttaacagacatagtaaatataaatgaattaactcacacaacctacttacaccaaacaaaactagaatgaacaacttgtaggaaccacctctagttgatttcaccacttaacaggggcaagatcttaggtggatcattttgtttaaggatgacttgaaattttacaatactaccttagctcccacatatgaaaactcttcaagaattttttctcatcaaccagacgttgaggaaaatacagtgagaaataaaatgaaacggcttctcacacatatgaaggcccagatcacccctaaatttctagtgatttaacttaagaagctccttgccctgagagattcctttatcccacaacactctactcagagggggcagagaatcccaggacactacacaagccacaggataaaaacacaacctgtcttctatctggcaccaactgactaatatctaggtatacacaggactgactttaaagttggttaacaaatattttaattcattaaaataaaacttaaaaattacatgcttagtctacacaagtttaacttactttagtcacttagtgaattgtgaattggctcccattagtggtcaggagaatgtatttggtgtagaaaccaaataaatcaagctattatcgccgccgtgagtacaaaacaatgtttatttgtttgtaaagtgccaggtttatatttaagtaaacattaaaatctgcgttgaagcagtgaggctgcatcttttaactggctgtgctggttaaaggactgtttaatcccgctgtgctaagctcactaaagggtcacccctcactttaaagccaagactgccattgtcactgctatggtaagtcacagccagccaggccttctggcaaaaggtgatactaccagcactataaacagacaggactggttgtgaggta

SEQ ID NO: 157679 - DNA, 1000 bp, Homo Sapiens
ggcaaatgtgaatttagctgaatgagaagagcctccttttgtcctgagacacaccacccgttttttttttttctttttaagtgcaaactgcttttcttaccctcccccactaaagaaaagactaaaggaaaaaaaaaaaacctcacaaaatcaatctaagaaaagaaaggtcgacataaagaaaataaagatgttttttcatgcacgtatcttctgcatagctcaacccacatatagtaaggcactatttcccttcgcaactggtgtccatggcaatctgttaagtgctacagtgctctgtgaccattagacagacagtttccttccaggatggtgaaataaagaggctgggtgagtgtggctgccacgtgtctctgtgaaggtctcgtagctcgagaagactccgggagtctcagaagaaaatctatctatgtgtgttatgacagtgtccagaatggttttctttccagaattcctttttttgtctgagtatgaatttagattattcttcagtctttagtctcaaagtaaatacaaaaggtggggggaggaaacagctcttccgaaacagagcttcgatgctcccagaaaacacacatcgctggcaattcacaaaatcagcaaaatgtttccaagagagcagagaaattgagagagggagagagaggggtagggttttggtttttagaggtgattgggtctgagtttaatttagctggtcttcatactgtttccggaagcaatcccctgctgggaaaaattcccaacacctttcttgatacatcttccagacataagattcctgtcctgtgtgttctgtttcatctttgtttataagatacatcagaaaaaacaagtaattagccaagttgtgctcctgtaaagtgtgggtttcaaagccatgtggcactgtgtcgaagtaatcattgcctatcccacagatgaagcatttggtctccatgtcttctttgacttgttcctgttggtctcttagttctcc

SEQ ID NO: 157680 - DNA, 1000 bp, Homo Sapiens
tttttttttttttttttgctgtgtaccaataaaactttatttatagacactggaattcgaatctcatatcattttcatgagtcacagaatcttcttcttttgctatttaaaagcaaaaataaaaattcttggctgggcacggtggcttgtgcctgtaatccctgcactttgggaggctgaagtgggaagatcatttgaggccaggagttcaagaacagcctgggcaacatagtgagatcctatttctacaaaaaataaaaaataaaataaaataaaattcttagttcatggtcaaaaacaggatttgctttgcggaacaccatttgcagtcccctatgctaacctatctaggtgcttaaaacagtacctaacaccctgttcttgggttggctttaaacaccaaccaaggatttaatacctgttagccatttcaggtggaaagatgtgaatgtggtatgaagtgggtcatctgtggcagttggcttgttggtgagggacaggccattggtaatggaagggtcagctctgtcttggaacagctgcccagagcatggcccaccatgctccccctccccacccaaagtgacacagacctcaccctttaaaaggcacagacacgaattggatgcaaaatcatggagtcagattgtctgggttcaaatcctagctctgccacctcctcactgtgtcaccttgggccggtaacttaatctttctgtgcctcaatttattcatccacaaaattgaataactaaatccatctcctgggcccacccatgccccaaagtgaggacactctgacatagtcccagacctccaccacggcactctgatctccaccaacactccaagggccctgggccagttctctgctgcctgagggcatggaggacacctttctccagtgtcaatgatgaagaacagtttattcacaaacggctccagcttcagggctggcactttctcctatctttggcatctggcagtagctgtccagcct

SEQ ID NO: 157681 - DNA, 1000 bp, Homo Sapiens
agtgaaagtcccagattgtgggaggagtccaaggtggtgggaaactggatttcttgtctcctgtcctgctctctgctctggtttgtcccactgagaaagtctagacctgtcttccctccaatcccccttctctagcagcgaagaaggtattctggagctgagtctggggaaggtggggaggaaaggggatgggggaaggaagagggaggggagagtggcccaccctgatggccacggccaaaccacaacacataaataatccaagagagtcacacgaggggaatgagggggtgctcagaccacccttcccccagcttcccaattctaccaggctgcagggattcttttccacccggaaataatagggaagagagggttaaagtgctgcagaggaaaggaaggggtctctgggccgggtagagagagctggctctcccacccctgcctggcccctcagtcgttctcatctggccctaaatactcaagttctgtgctgggtttcacctcctgctctaaaagagagggtgtccggtggaaggcagctgagatctggtcaaacgtccggcctcgagtttcaggtactcttaagaaggtgaagatgaagaagcccagcaggaggaccgcaaatagaaggaagacgtagggccccatagcctccgcaacatactggaaacccatgccaatgatgaagttgctcgtccagttggagaaaccagccacagccatggctgccgggcggggtccctggctgaagagctcggccacgatgaaccaaggaatggggccagggccaatctcaaaaaatgccacgaagccaaagatggccacaatggagacgtagctcatggctggaactcgctccagcaggagcagagccacagtcatcaggatggcacagccacacatgcccgccaggcccaggagatggagcgtccggcgccccgcccgctccaccaacaacaccgagaccaaggtgaagactgtgttgaccacaccagct

SEQ ID NO: 157682 - DNA, 1000 bp, Homo Sapiens
gaaatataaaatcaataataatttttattttttgttcagcacacatggcaacacagagctgtgaagacagacgtggttagcacaaaccacttgggccagtgaaaccagggcaaactcatggatcatctgcgttcccatcttcaccttggtggcagccctacctctgagattttaaggtctacggaaagtgcaggcttccaggagtgatgaggtggagcattttctcaggttaccaacagccttgacatattcttctcctaagtatttttcatatgtgtttctgtcatgaagtttggccaaacatactgtgtcatctctgaacagaaggtccttggtttccgaccggaacaaacaaaagttgcccgagcagtcagttacgttgcttccaaataggtgctgctgttgacgtaatatcttgtggacgcaagcttccttatctttccgtgtgaccacagcgtgattcggggctctggccaggtggcagttcgcatactcctccacaggtttcctggtaccatcaaggcacagcaactcatagtctttttcattcagattcttagcccatggatcagggttttttcccccagtgttctgtgggacagtctggtgtttcacaaaggccacatctcccttctcaaccagacacctgaaagcgcctgtgtagccgtagtatccctctttgttgttgggttcacacaggtttaggcctgagcccatacacagcttacagagactggagtctttcttagacccaggggcacaaccttcactgaaaaattcatcaaatctgcagtggttgatcttattgtagagcaggcccatggggatgttccagccagcggttctgccaactgccgtatggcaggacttcttgcctttcagattgtcccaggtgaggtcagaagctgatttcttcaccactgctacagcaaaataccctgcctctggtgtatcctcacaattatcgctcttattgtagttttctgccaagacaggcacc

SEQ ID NO: 157683 - DNA, 1000 bp, Homo Sapiens
ttttttttttttttttttttttttttttttttttttttttttttttttttttttttttttcatttttctcaaaacatatatttacccctcctctcagtacatctttgagcacctttcccagaatctcaggaatgtatagacccccgccccacacttcatacccgccctaggccttggtgatgaggcccctcacagcttgtgcaatggcatccctgtcgataccaaacatcttcagcagctcagccggcttcccacttcttggtacccggttaactgccaggtgggtgacagtgatgccaggctcgcccactactgcactggacacagcctcaccaatgccaccttcataataatggtcctccacggtgaggatcctgcccttggtggcacgagcgctgtcgagaatgagttttctgtccaggggcttgatggtgaaggggtccagcacgcggatgttgatcttttctttcttcagcagttcggcagcggccaaggcctcgtgcagggtcaccccagccccgataacggtcacctggtcatccttgctcttcaggaccaccttggcttgtccgacctggaagtcctcattgttgttatagatgatggcattttctgggcggctggtccggatgaagcagataccctttgtattggcggctagttccactgccttctctgtagcaacgccatcacttgggtaaaagacagttgatgtggggactgaccgaaacatagccagatcttctagggccatctgggagggcccgtcttccccgatggaaacgccgcagtgggagccgcagaggttaatgttgctctcggagatggcggccatgcgaatctggtcaaaggcccgcgtgaagaaggctgcaaaagtgctgcagaagggcaccgtcctgttgcgggtggcacagcccaccgcgatgctcaccatgttctgctcagcaatgtagcactcgatgaagcggtccgggtgctcctttttgaagatctccgagaa

SEQ ID NO: 157684 - DNA, 1000 bp, Homo Sapiens
tttttttttttttttttttttttttttttttttccaagagcagagctttaacttcagaattttagtgtatgtacaaaagtccacagctccagctgaaggccccattgttccgtgctcgcccctgccttaggacagttcagcttgctatgtgcttgtccaggcagagggcacaggagtgccaagtttctattagtgtaacatgattgatttaaaaacaaaacaaaacaaaacaaaaacaaaaaaaactgcttatgcactgtgaaaaaggctcagggacgaaccaggggcccccgagcagccttgctggtgaggacacccaaaacgggcatgaggcatagcgtccctcatcctcgcaaaccacccactcaggctcttgagcccacggcgcacctctctccgcgcgcacagcgctgactgtcggcggcgcgcaggcagctgagaaaagctatgtacatcgaggggttagcaccaagtaggcggctgctagctcctgcttgcccctgcaggacccctcctttccagaaaaaagtggggttggaaggcgatctcgcaggacggtccttagagctgcccgcaggggcgcagcctcatctgagaagactgggcgcgggcgggagggcggcggggccgcaaagcgcctcctcgatgtcctccaggcagcccagcaggtccatgtcgcggagcacgcgtcccagcagctccagcgtggcctcgcgccgcggcgtgcgccgcctccaggtcgccagcatgctgtattgcgcctcgcgcaggcagcgcccgttctgcagctccagccgatcgatctcgtggtcgctcagccctaggcgccgcacgaattccttccagcgcaacgggggcacgttctccaccacggcgtacagcgtcgcggggtcatcagtgtctaggctctgtggcttgtgggcgctgtcctcccacttctgaagggggttggggatggggtcggaggcgagggctgtcgcaaggatggggtcagccccct

SEQ ID NO: 157685 - DNA, 1000 bp, Homo Sapiens
tttttttttttttttttttttttttttttttttttttatatccagtgctttattaaagataaatagtctcataagaggagaagtaaatgtgtttgcaggccaacagagagtccatgtatatgagaaagagatgcgtgaggtccctgatctgtgctctgagggggtggtcagtcaggcagggcttgggccaaccagtaaggcagatgagggtccctgtcctgggggactcactgctcctgggtgccccaggagatgtagtctggccgtgtggccgcatggtactcatcgatgagctgctgcacaatctccctggatgtgtccatctcatcaaagttgtccttgaacatgtcctccttgcggaactgctccaggaaggcctcccgcttacgcagcttgtcatactggcgacaggttctctcgaagagcgaggagatgctggtgtggttggccatcatgagcccgctgacccggtgggccgagggcaggtagggagacttcctcgacagggccacctggatgctggcggggccccacgggatgaagttggccaacttgcgttcccggatcctctgcaagctcttgtggacctgggtggggtccacctctccctggatgatgttgaggatggcgatgtagcagtggttggtctggcggtctcggcctgtggacaccatcacgttcttgggctgcagcagccgcctcatgacatccaggaccgtggtcttcctcacgctggccactgactggtccgtagtgagaggggtgtagccggtcatgaggaagtggagccgtggggtgggaatgagcgaggcgatgaggccgatgaggtcattgttcatgtagccagggtagcgcagggtggtggtgctggctgacatgatggtagacaccagctggttgatctgggagaaggatgggttctggatgtgcaggcggtctgtggcaatccggttcagggctgtgttgtccagcaccaccacacagtctgcattctgcgtca

SEQ ID NO: 157686 - DNA, 1000 bp, Homo Sapiens
tttttttttttttttttttcaagacttacaaactgtcctttattcagagtgagactgcggaacattaataatttatcacgcggggagtccccagaagccctgtgcccacgaacccctgtgggcggaggagagaggcggggactccgggagcttcctgagagggccgtgtcttgggagcaaggtgacatattcagttcaggcacgcggaacatgaactcaggaagtggggagacagagagacccatcccccaactcccaggacgggggccaggccccctaaaaaggcacaatggcagggcaggtttggcagagtggttgagtgtcaggggtcgacaaaggacaccatgatgtagcgtgtgccccaggtcgttggcagcccctcgtggtagtgggtgaggcggccggggtgcaggagtgcccagcccttcctcggggaggagatcacacagtcgtagcgcaggaagcggcagccacctccctcatagtccaggcccttgtggttgagggcaacgttgagggtgaaggtggatgagtcgtggtgtggccgcagagacggctgctcgtctggccggtagcgaaccacaaagttcatcaccgcccgcgccttggtgtggtaaccgggaaacaggctctcggtcatggggcccacatacgtccgcagcagctgcagccactggtcctcgtaccccacctgcttcatgtggatgtccacggtgggcacattctcgtagcctccagccagccttgaatcctcatgccggccgcctgaccactggccgtagtgctccatctctgccaccagctcatcacacatttgttctgacagcagtgggaaccagtacacgtccgggcatggctgctccacgattccttccccttccagggcccggctgtagttctcgtggatgtactgctccttccagtcgacggggttgtcgaagatctgccagaggtcggggtgcaggtgctccgtgtcgtatctggaagtggccaggagccg

SEQ ID NO: 157687 - DNA, 1000 bp, Homo Sapiens
ttttttttttttttttttttttttttttttttttttttttccaacgaaattatttattgctgtcaggaggcccaggaccctccagactgaagagtccatgggcccctgtgcatgtgagagctacacagggaatcgctgtcaccttccaaggataagcagacagggccacacatgccatggccactcggtgcacaggggccaggctgtgcccagagacccaggcatccagcttgcattccaagttccttactgagagccccactgcttgatggcaagctctaggcttgcttgggattggtgactttgctcatgaagaagatgttctgggtgtctgtagggacaatgatcatcaggaagggcctgttgaaacgcacaatggtccttgtctccactaatgcagaaaggagggtgattttgactgctgtggcagcagatgcttctgtgccctcctcaaatacatcaagcacagccttatggaccacctgggagactgctaggttcctggcccctgtgatccctgacaggtcagccttgctggtgaaggcttcctcaatgcccagctggagaagtatgtcgttcaggttatagtccctcgagatggaaaactttggcaggtagagctcacctatctctctgaactccagagagtctctccaccgcttcagggtctctgggagcagcatggcttccacttcctccatcttgtcttgatcagggaggatgaagagtgcgctggcattgcctgtgtacttcagctccaccacggtgcaggacagctcctcgtcccggaagtaaggtatagtcaggtgatgcaaactcatcatgggcaccattacccactttttcttgctcaagtagaaccttgactgatgagtatcttgggggtcaaagggcatctcccatttggctttaaagaagatgtaattcaccaggaccatcattgtctgcgagtcaaggtccttgatcagatctgtgattttccccctagttccattcttca

SEQ ID NO: 157688 - DNA, 1000 bp, Homo Sapiens
tttttttttttttttggggttttttttttttttttttttttttttttttttttttttttttttttgttctaaaaaaaattaaacctttttattagtatatttattttatatataaaagaaatacaaaaaaaaaaaaaaacagaaagaaaatgcttttatggcaaatcagatttgtcggtgccttcagcctgggctccaggctctgtgccgctgggtgacaacaaagtccgccggttgtaatgacccttgatgattcctgtgttgttgttctcattgagtagctgcttctgcctttgcctattgagggactggacaagtcccaggacaaccgcggccagggagtactgcccaggcagtcttcttgggggcaagatgaatgggttgggttggactcttcccagaagaaagtacgttttgatttttccttcctgttcactgatacccttcacatagatctcccctcggtaatcaaaggcaaagccctggtccttcaggatgagataggtctcctctgggacttggatccggccactaacccccgtgctgtccattcggcttgccaggttcacagttttgccccaaatgtcatactgtggtttcttagcgccgataacgccagctaccactgagccgtggctgatgccaatccggagttcaaaattgttgaatgaatgcttgttgatctcctgtatgctttctgtcagggcgagtgagaagtcagccagagcacacaaatgtccccacttgtcttcacattgctgtttttcaggtgacaggcctgacacggccatgtaggtgctgccaatggtcttaatcttttcaatgtcttgaaatcggtcttcaccaagcaactcatcgaagtcagcaatgatctcattgagcaagcgcaggcattccactccctggttattcatttcagtctgagagtaaaagtccgcaaatcctgggatggaggcaaacatcaccccaacagcatcataggattgagaatacagctcct

SEQ ID NO: 157689 - DNA, 1000 bp, Homo Sapiens
ttttttttatttaaattttagaatattttaatgtccatttcttcagtgaatgcattttgaaattattagaattaacaatttaaaaagagcagataaaaggatatatggaaaatgcaaacagtcggttcttgctaattcaatttcagattctaggcatgatgtgattttccaaacaaccaattaaaaaaaactccttacctcgaaaatctagaaattcaaatgcagacgtgtctttggaaactacaaatgattacagcccatgtgacaggaagcacgcggccttcggctctccggatcgtgtgcaaatgtgcagggggagcccccgcgggtgacgtcagtgtggatgaagtcacgggtgtggcagagcctgtggggctctcaagctattcgagggttttgtaactgatgctctacatttgtttgcattggataaaattgtgtgtgcttgtttaccatatatatatatatatatatatatatatatatatatatatatatatggatatataattcgatctgagctgggactgagaagaaaatagcaattgcaactcaaagcaactatttacacacattcaatgctgaagtattgcttcctgccctaagttcctaagaggtattgccaccctgaagcacgacccatgccgtcagcagccctcgtgccagctgcttagaaactcgtgtctccagcacgatgtgctcgctgccaacagacaagagatgcacggcgtttccgctgcagagattctgtggttctgcactgaggtatgcatcggagcaggggacggggaggacccgaggggcttcgtggcccagagagaacgtctgcactggctgtttaggaaggctcagggtgtttgaaagacaacgttaagctctgggtgagtctgcacggggctgaaccagactccactttgcagctccttggtttcccggggtgaggaatcacaaacacctttgtggttggggaaggaaatgggcttgatggggaagaagtgtg

SEQ ID NO: 157690 - DNA, 1000 bp, Homo Sapiens
aaaacaaacaggtgctttatttcatcatcagaaacctggtgcatagtttaaaaaacaaacagaagccctgacagccttggagtgctgcagctcggagtcactgaaggagtaagtaagtctggaggagctgcctgagcttcctgcttaggggccggcccccacccacagggtctccctggactggcggggggtgggggtcaggcagtgggcaggggcctgacctaggctcccactctgcctggtgcccacagcctgggcacagtggctcagctactcagccttgagcgtctgtgccgggtaactcagcttctgcaggaggaagaaggggagcaaaaagagcccggaccacgtggtgaagcaggcctgggccccggccagccagtacactgaagcggccaccaggggccccgcggccctggccagagcacctaggctgcgcagtgtacccatgaccgtgcccttctgccctggtgagccatagccagcgaccacggaggacaggcagggcaccacaacggcggcggcaaaggagtagagcagcagccccaggcccagcacgggcagagaacgtccccagccgatgaggaggaaggcgggcaccagcagcaggagggcccgcttcacggcagcaacttccccgccagggtggatccgccgggcataggcaccctggatggtggccatggtgaggccgatgaggaaaaacatcttcccctgctgtaggctactgaactggaagcgctggtgtgtgaggaagctcagcgtgtactccaggcccgagaacaggaagaggtagaggaagtagactaggcccaggcggcgcaggctgctgagcctgtctccagagggtgggtcctggccacgagcgacagccgagaagcgcagcagggccagggggctgagcagatcagccgcatcacggaaccccagggcgatagagggcgcccgtttctccaggggcagcgtctctggcaggaagcagaagatgaacagcaggtcg

SEQ ID NO: 157691 - DNA, 1000 bp, Homo Sapiens
tttttttttttttttttttttttttttttttaactggtctatcctgcagtgaattttattgaattcaaaggtagtattcctatttgagaaatgaaaaactaaaatcaagttttacaagcaagcatcatgagataaagcagtgaagacgccttttcagatcacaccagagcagacaccagtttctaccccagcccacatgaagatgtttttattcaatacaaacagtaacagaggcaacacaatggccatagaatgagaacataagtgcatttgaattttttctgagttctggctataggctctgacaagcctatcattcttttcttaccaggtgaacagaaatcatctgctaatgccagaaactttaaagctcttaattcagctggaaacaactacaattgagggcctttatactagctacttgcttcccaatttagggttgcctagcaagttaatttcaacataacaaaaggtgtcatctgtctggccacagcatgcactagtgataggggcaggtttaatgagttttatgctcagatcgctgggtctcctggctgctcttgtccatctctgcaccttggtcctgagcattctgagactcagtcagctgaggataaaagggacctaccagccagttgaggggcgtgttgttaacaagataatccatcacgtcatctaaagattccttcattttctgcagctgccccttgctagaagtgaggaggctgtcagacacttctttaaaggaggcagcattgcggaacactgagtagatgtcgcctgccatcacccccatgtgcttggcttgatcttggatgttctgtggtacaccttggatgttggacaggagggtgtggcacgtggtctggagctgctgagtcaggttgcgggcaattgcaagagtacgtgactcaatgtgctcagcacagtgggactcatcagtatcatcatatccaatgctccttttccactctacccatgagaggtagagcttatcctg

SEQ ID NO: 157692 - DNA, 1000 bp, Homo Sapiens
tttttttttttttttttttactagaaatatttggttcttttaatcagctattcatggtgtaataaaataaatttaagtggcacctaatttaacatttaaaatagttcattaaaagataatctacaaaacaatgttatgcctaattgtcaaaataacaccttttttttttcaagaaaggagaaataaaggcataatcaaaattatggctaacaacgtgggttcattttgacacttacagatgattctgtaggcatatcggcaggcacgatgttgaaaaccaatccactagatttaaaattaatggtaagataaaaaagaaaagatacacatttcagaggtaatgtttgaaattaaagaaaaatatccaccatatattacaacagatcttttaatgactatttttaacataaagattgttgttttgggaaacatctattctctttgaacatttcactaaattttcaatgtattaaataactgacagaaataagttctgtgttctgtacaaattaaaggtcccatgaatacataaccccctcccagccccaccaaagctcaattttgcatggtttcagcagaaaatagacagcccaaaatttaaacagaattcatagcattacaaaagtttacagaacccctatgttttcatcatttgtttctaacaacaaagattacaatgacagaactgaatgatcagaatgtaaaaatatttgtgcaaaactgcattaattgttcttaccatctaataggggtaaaacttaagaacacgcaatgacaataatgaagaaaaactacattaaaagtaattctacttttgatatcaaacaacatggattatactattactaaacattgaaaaaaaaaacgtggcaccatgagagcagcaggagcaacaaatgatttggcaattccagctaaagaaagctgacactggaatatgccaaagttaatctccacagtaggcatccatctgaaaagactggaaacaactgtagggctt

SEQ ID NO: 157693 - DNA, 1000 bp, Homo Sapiens
ttttttttttttttttttttttttttttagccacattttttgttaacctttattaaggtataatttataaaccataaaatccacccattttacacacacacatcaacgatttttaataaactgatcacgtagtgcaactattgccataatctagttttaggacatttccatcatctctgtaaggtaccctgtgcaatttatagttaactcccatttccacttctggcaaccactcacctcatgtctgtccctacagatttgctattctatacatttttattattattctgcacatttcacataaatgggaacatatactatgtggccttttgtgcctggcttcttgcatttagatcagtattttctaggttcacccatgttgtggcatgcatcgatactttattcctttttatagctgaatgtgactacagtatataccactttggccattcacctgctgatggacactacagatgcttccatcggagcaaaacagactcatccctgctgaaggacaatcagagtcatccccgagttatctctgctgaatcatccctgctgagtcatccttgctgaggggcggtgctgagtcatccctgctgagtcatgtctgttgaggggcagtgctgagtcatccctgctgagtctgctgagtcatccctgttgaggggcaatgctgagtcatccctgctgagccatccctgctgaggggcagtgctgagtcatctctgcagagtcatgcctgttgaggggcggtgctgagtcatccctgctgagtcatccctgctgaggggcagtgctgagtcatccctgctgaggggcagtgctgagtcatccctgcagtcatccctgttgaggggcagtgctgagtcatccctgctgagtcatccctgttgaggggtggtgctgagtcatccctgctgagtcatccctgctgaggggcagtactaagccatccctgagtcatgtctgttgagcggcagtgctgagtcatccttgg

SEQ ID NO: 157694 - DNA, 1000 bp, Homo Sapiens
tagagtttgctttttattattattattgttttacaataaaaacaaatagctatgctctcagcaaaacaaattaaaaaaaaaaatcacagaaatttactaacagcatttcaaggtaaggcttttgaaagatttattgaaataaattatctttgcctaaaaatttacctatcacctttttcaattacttttcaacattctaaaaactttccgttatgtaaaatacatttaaactttgccaataattgtagataatactggattcttcccaaaaggactaccacaaaacaaagctttcaaagagtaaaaaaaaaaaaaaaaaaaaaaaaaaaaaagtaatccaatggggcataaaactgaggtctgtaacctatgacttcatggttcaaatccttaaagttaaacatgtgaagaatttgaagagatttgggacctgggccctctccaaggcaggtaggttcacaccttaccttctctgctgaattaaaccaggaataacacagctaggaaaacgcagtgctcccaggataaaagatacaaaagttcttttttatttctttaataaagcccttcaaggtttactctcccatcttgcaaggcccacatcttgttcaaggaccaaacccacaggctttagcactgcctaatttacttcaccaatgaatgaaaaccataaaccaaagcttgctgcctaaccactccccaggtccagacgggacaaggaaatgctgagaggggaggggacccatggggcacactcatgagatgcaggagcaccagagttcacggaaatcaagccggctttggactggaggctcggaaagtcagtcccagatgtagtgggacagaaaggggtgacttcatcacaccctatagccctggactttcccctcctctgctccaggtatcgaaccaagagttccttttccaagatgccctgctggctcaggggtgcatgagcccgtgggtctggcctctggcacagtctacatgcttccacaac

SEQ ID NO: 157695 - DNA, 1000 bp, Homo Sapiens
ttgcacaaatattactttcaattttatttaaatcaaataatgttgtgatgatatgaagaactttgcatagaaaccacatgaattttaaagacaaaattcgaatacctaattatcctattctgaaacaattaaaagaatacacatgttaaattgccataaacatgtacgtattacataatacacataacaatcataaaacattttatactgatttattataaataattggaaacaatatttcatttctcaaacccagacaacaaaacagtaaatatcatgctttctttttttattattttattttgtttttgtaatatgagtttggaaatagtattctttatccaaaaactggtttaagaaagtgtctgtaggaacacaaaaggacaaaatactcattttctttcccttaaatgaaaacagttgagaagtttttagaaggagaggcttacctgctatgaagaagccaccaagaatagaaaaatggtataatacctgcaaatatcacttgtaaggcaaaaaggggtagaatacagacacataaatataaaaaagacttgatggtaaactttaaaaagtatttttcttaacaatgtgaatagctttattttctcaaatggaggaaaccattaaggcatagtggatcaagtcaccaagtttgaaactggtattgctaccttgccaacaactgtctcttttatgagaggaggcccagtagctttatttcaattttctcatcccatagtgactcatgttttaataaaaactgtttactgtcataaccttggacacttacaggcagagaagacttcttgataaaataatgcagtaacttcaagcaccccaaaaattcacttaaaatacattatcccataggaatatttccattgagttatttatggcaactagcagtcagaatttcttagtcaggtgactatgattaattttctttttgtatatatttcccttacatataatagttttgccaatttttctcccctga

SEQ ID NO: 157696 - DNA, 1000 bp, Homo Sapiens
aggacatatgggtatttacacagtgtataaacagtgctcagaagaatgcagttccaagatgatctgtattgtataacataagtgttctgttttccagttatttactgataaacttgcacataacattcttggttgtgacagcagcgtctgtaaactgtcagtctgattctcagcctcgggttcatctttgcataggtgttctgtctaatcacaattatggatgtttagggtcttgctttggtccgttaagtgatgcaagtttaagtgataaagtttacaggctctaatctggagcatgtgggtcccgtcagcaccgagcacacgccctctgtggtggaagaggacacagtgcgcagccgtgactttcagtgcactgggcttaagtctttgaaaatagttcgagacagttcctcaggtggactgggatgtttagaaatctgctggtcggatcatcatggttgtggccttgagcgaatagcctgagcctttccagtagtaccatttaatgccgttgaacttatttgtgttctgcctctgtggatagtacattccgttcaagttggaaggaccacatgcatcaaaccaccagcctcctgttagcatttgtgaacatttgcaaatacatttgtcgttgtctccatcctttgtgctaaaatcatttcctggttggctgatgctgcttattttgccggctgtccctgtaagtcctttaaggtgaatcctataattgagttcttcacttgagagatagaaatgttcatacaatgagtaagcctcattcccttcccagtctttaaggtgtattttaagcacatagcgttgctgattagtcagttgcgaaacaaactcatttcccagccaatattctcctgaagggttaccaaatcccactttatattctttccaagtcctctgaaaatcaacgctgccatcctcacgtcgctgaataattgtccacccgcctcctccagcttccatgtcacagtaggccttgatctct

SEQ ID NO: 157697 - DNA, 1000 bp, Homo Sapiens
taggtgaagagtttaacacaatttattttatgcttaaataatcgactaggtcatccagtgtatggtttttcatacatatgtcattagagctatgtgtcaatgaatgctgattttatgtgaatataatcaacaaattaaagaatttcaccaaaacccaaataaaaatgccctttaaaacacagcagccttattaacctaatatgacactgctagaatggttacaaatgattggcttactgaaaggtgtctacatcttatagccagtacacaatacagtaataattttacagcgtgctgccattctactagctaaggatttctgttcagtcctttttaaatacccccgactggggccttttatgagcaccatccacctctaaagcggcaagcatttacccccttttaagcactaacagatagcatccccccaccccctaaagcaactaccgtataggttatttttttttgttgtttttaggtcatttcattgaaaaattggcaatagcaacaaatattagatgaagggctttgtgtttacagataaaatcttttgtgttgcagtatactgtagtgtttgcaaaattggaaaagatttaatcaaaataaggtgatacacatgcatcaaaatattagtattctgaagaaaaaaatttttcacagaactacagaattcctcattttgggaattatttaaatttgcagcagattttaaagatttgtttttttttaaaatcaagctagcagttttgcatatacaaacattataattgctaatatacaagaatcagtgaagagtcacccccacccagaatccctccctcctcttctagggtgaagtcacttgagacccctatttgttaaatgcatttgcaatattctgtttgtgttctaagaggcagtgccttatcaacattttattctatttttctgttagaatttatacagtgttattatttacagcaaaactatcgatgttttaaaaaagaaacaaatagtgttt

SEQ ID NO: 157698 - DNA, 1000 bp, Homo Sapiens
tttttttttttttttttcatctagaaatcctttatttacattttctcttagaaaaaaatatacagatctgctgccctgttgattcctcagatttagggtctttagggaaaggtgaaagagggtacagggcggcccccagcaaggccgttcattgtccatcgagagcttctgctcatctggccctggagctgggcttccctgagatcagccccagggcactgggcgacaggtgccatgccaggcctagggcggggttggcatgaggggcaggggctgggaggtgctcaggcagcctgggtcatcaggaactagactggctcacaggcagagagaacgtgggctggagactttgtccttgaggggaggacactggtgcctcgggctccaggaatggaggccctgcaccagccgctgggatggacacatgtgggcaccttgcatcggggccgggtgacttcaagggctggggactatttgctgttttctgtgaaccactggagcaccacctccttgttctccttcacccacttgatgttggctttcgtcttctccagggcttgctccagggcccgggtgcctgagccgaagcctgtttcctcgttgtccttcttgaactgctccagctgctgcagctcatactcggtggagaatcgtcgtgtcactgcctggatgaggttggagaaggagaacgagccaccaccataatcgttaaaaagcttcttccagttgctctggacaaagtcccagaccagaccttgcccaatgacgttgttggtaatgctgatgatggtagaggtggcgtcctgcttccggattaagtccgggttcagggtgtagctcaggtacctgttcaggatccacaactctttgctgcaggccagggctgcccggagcttgtcagcctcattgaccagtgtggcatttcggaactgctcccaggcgaagtcccactcctcctccccgccctgggcgatagcgttgcagtagacggtggaccgca

SEQ ID NO: 157699 - DNA, 1000 bp, Homo Sapiens
ataattcagggggacagaaatgtttatttttcattaatcttttgaatacaatcatcataattttacaggtttagtttagttgcgaacttcactaataacatttccaagagttcacaatttcaaggctaagcttctaattaaagtatcatggttacaaatgtaatataaatggagtttttaaaaaaggctaaaagcactctagcctcttaaaaaatatatataaatggaaaatggccaggcattaaacttagtaacattaagtacactttagtactacagcagtcaaagagatctccactagagatcagaaagaagcaccactattttcttctatgacgtgtatgtgttggtcatgagcatgctagtatgaataaggcaatgtgttaagcactggcatacaaatgcagctaaaggtgctgaaggaaggcagtggggtggtgcaggcacacagcagggagctcttccccgtgacacgttagtcatcttctccacagagcagcagaagagctttcttatagtccccagatgtatctcccttaatcatggaataaagagaggtggcaaaattcttcctaaactccttcctgatgttaaacagatcaatctcactcctggaaaccatgactctgatgagggtatgatcatctgtcccagctcccttcatagcataatagagggtctctgcaaggtaggcaggtatacttcgaatagatttcacaacagcaaggagtagttgctctaaattgccagaagtctcgcggtcaatggtttcctcaatttgaaatcctgatatagtcatgtacttgtcaaacacctttctcaaatgagacacacttcgtgttccaaagatggtgataaacttttcttcatctgtcccccatttaagttctccagcctgaaataaagcctgagcatcttgttcaacttgagcttcatcaattccagcatcagggtctctgttagcctgaaggagaaccaccaacatccgctggtagtaccc

SEQ ID NO: 157700 - DNA, 1000 bp, Homo Sapiens
atatgcaattttttatttgtcataactcaatttaaaaaaaggaaacaacgcgaaaaaaagggaggctatgtatcttaagcatataaacatttgaccctttcttaaaaggtgccacaggtaatactaatctattttctatgtggaaagtgtttatgaatacagaaccaatttaggcaaaatgagatgcaaattattctagatgtaaaggttgaatttttttttaaagtacacagttttaacatactatccactctatcaagcagacttagagggattccggaaggcagagctttcagtaaccttctaaaaaattattcaatattattacacagaatcagagattgctgtgatttttattcaatttgacatcttgattagaatgaaactagtaagaatgaaggtttacaaacattgcaatattactgtatcattgtgatatggctttacattgattgtatgtagagaacaaaataaaattagaattaaggcaataacaacatgtgcaaaccaagcacattaccctgatacggtccttgacagaaagctctttcggttagctgatgtttgatattgctgcatgcaggtcattgctctgaaggataagctatgaatagaaatttttttttcattaaaaaaaaaaaaatccctcctactggcccacaatagccagaagaagtcttcggtaatctccactcgtgtcacctgcaatcattgtgcccagagtcttctgatacatctgagcgaacatctgttttatttgtacaaggtcaatctcacttcgagtgaccacaatccggaccagggtggagtcatctgtgccagcacctttcatagcatagtagagcctctcagcaaagaaggcagggcggttcagggcacactgcaagatggtcttcaaaccactttctacatatccggaaaactcacggctcacactgcttaacaagtctcgattagccatcctagaataagcctccatggtagctctcagctgaggaaa

SEQ ID NO: 157701 - DNA, 1000 bp, Homo Sapiens
tttttttttttgcagtgcagacagactttattagtgatatcaatacagcagaggtgcccatggagcagggggaagggacccatgcctggaccagtcccttcctccttctgcccctgctgggtccaggaggatgaggcctggcctggaccagttcctcctgttccacctgaaacacatggggatggagaaccagggctggccttgcttcctgctcctcttgttaccactccagtgttatcacttccttgaagggattagatctctccctccccagctcctaggcagggaaccgtagctactggggaggggcatatttgggaggcctgaggcctaggaatagcctctagacccctccctgacccacaccctttagttccctggggcccaacacaagcaggtggagggaaggtgggggcttcttcatggggtatgggcccccagccgtttgggcttcagggagccccacagcgactgaacacccctgcggacagtccaccctacacgccgtgccacagactcagcagggggtgctgggaggcaggaggtggaggcctgggaacgggcatccagacacttctggtagcgaagcatgcacgcagcctgcacagcctctgagaggctggcagcattgggctcgcaccagaacatgtggcagcagaaggaggctgggccggcagccatgatgaatgcaaacgtgtggacatctctgcccacggccaggaaggagaggaaacgcacccgacactctcccagcactgcctctgtctgctggtgcaagatggtgagggtagcaggggccacactgacatgacttggggtccattgttcacggctgctggaggacaggactgactcgagggccccattaatcacatctaccccaacaggtttagcaacaggtacattccccaggtaatagacttggaacttctggaccaactcattcttaggcgctgggaattccacttggaaagggacatccacaagtttagagtggtcc

SEQ ID NO: 157702 - DNA, 1000 bp, Homo Sapiens
tttttttttttctttttaaagcactttattgagatgtttctcacaaactagggggagaaataagagaaaaatccttattttaaaacacaagtgaaaagcaccaaagacaattcggcaccataactctgatgaactccagagttcctggtttccagttcttttctacactataatttagtattcaaagctttctgaaagaacaacaaatccagtaactcctgaaatgatgcataacaagcagtgacactactcccttaggtacacatacatactaatatagttcaccaaacataaatcttcccttgtaaataaacagattaagattaaatatatgataccatcttttcagaaacaagattattagtaccaaagcagactagaacatgaatgttactaattgaaaaactcataattccctttttactttagatggcttcaagtgttcaacaatattttaaagacctttttatgcaggttaaaatatagactatttttctttaagagagaaatgtacgaacagtacccttgattatacccctgcaaatagggcattttcttagagaaggggcacattcctggcatactaccagatgaccacaaggaataaatacaacagaaacttctttgtccatacacactttacaagttcgttcttcttgcaacctcctcaattgttcttccagtgacagacctgaaacatcttctgttggaatatacttcatattcttatccacaaataagttcttatacaatgtagagtcaatttcttttagacagtttttgaagatgttggccgcagcatttcctttaaccaaaatggtatcaatcagttctctcgcttgtaaaggtatctgtgttttttgtttaataatatcatgttcctgtttattaattacattggcctttaaaagattatccaggataggaagcacacatgtcaattgttgaaagagagccattctgttcttccgaattaatgacaaatcatctgatgccattt

SEQ ID NO: 157703 - DNA, 1000 bp, Homo Sapiens
tttcagaatccatttttatgctttggtttttattgtctcagtttaacatttctgtgaggtagacagtgttatccctaagtgacagctaaagaaccttatgagtacttcctgctaagtggctgtgtgatcaaacatacagcctcagagtatccagccgtggtcccaggtctaaccccaaaatgtttagaaggaaggttatccaaacttctgactactccccactttgcttctctttgtagagtgacaaccaacaagctgctgctttccattatcatcttactggagctcgccatcctgggaggcctggtttactacaaattctttcgcagccattgaacttctatagggaagggtttgtggaccagaactttgaccttgtgaatgcatgatgttagggatgtggatagaataagcatattgctgctgtgggctgacagttcaaggatgcactgtatagccaggctgtgggaggagggaggaaagatgaaaaaccacttaaatgtgaaggaacaacagcaacaagaccagtatgatataccaaggtaataaatgctgtttatgacttctttaaatttacatagtactgtagcatattaataccctgtgaactgcaaaaaaccaaatacatttacagtagtattggtcaccaaaatagaggggaaactttacaattgtgagaatgtgtaaatgttctcattaaggcagtattgacccagacaaccatttagtattcatctatcccctcaatgcctcataattctggaatgcctgttgtgaaacatgtcagtgcacagtgtctcctaaattctcacacgtgcttgattttctgattcatctggtgaactgggagtaggaagttggtcatagacaatatgccctccttctcttgtctgaccaaagcttgaagcaatcacatctactgccaggttagctgtagtcttcgcctcttcctctgaggtggccaactgaggattgacttcaacaagatccagtgctgata

SEQ ID NO: 157704 - DNA, 1000 bp, Homo Sapiens
ctcagccagaacacacacagttattgttttattcttgttctcttgtgtcgtttacagtgtctctcacaaaagaagaactccctctggcaggggatgtgactagggactcattgggccagcaacaaccacaaaagaatctaggcattagaatgaactactggaacctgagtcaaagacctgttagtgataatttgcccattttctggcctctagttgcttgaataggggtaagacagggaaatattaaatgattgtgtactgagatggagacgtggaagatctggccctgatggaggatcagagggagcaggttgggtgaaagcccggttttaagcctcttgttctagggaccacgttgagtgacagggtgggaaaagatgcatcaataaggaaatgtggcagtgttgaagagggacccagctgtggacagggaggagggacagggtgctgaacacgcctgagagaattcttccaggtggcaagggtggggaaaggggtggatgcattcattctgtccactccttcttaatcgacaggttccactcccagctgaggtggtcttgcttgtcatcgtcggtgaagaaggacttgttgtggtacgtgcctcgcgccagcatgcccttgggagcctcctcaactggagtgaggaactcatactcctcaggccgaggtccatagctgccaaccataaatgttgctttatccactttcaccccagtcctgtaggtgtgctgaacgtatttcaggcctgacacaatatccctgttcactttgaagtgaattttgactctatattcagaaccttcctttaacacaatggtttcctttttgagggcttccagatctccagtaaggtccatggtgattggtcccggggcactctcacaaaccagggtgagccgggtgacaacgacattgggggctttcggatctgtcaccacaggaccatctcccagcagcgttttcttgtacttaattagactctcatcatctttgtcca

SEQ ID NO: 157705 - DNA, 1000 bp, Homo Sapiens
tttgtttttaatcaatacatatttattgagtgcctactgtgtgccaggtgcaccacactagatgcaacggatactaacagtaaataagatacggtccctgccctcagagcttacatttcaacagtttaaagtgcatctcaggtatttcagataacagaagtaattctaccactctcaaatttttttttttaatgcaagacacaacacaatcataggccagagttataaaatacaatgttagaaagaaacgtttggtatcattcgtccagatcccattttacagaaaagaaactacaggagtggccatttgcacctatgttctgatttcaagtttggtgttttacccattgccaggcctctcataaaacaatattcagatttgccatgtatatatcaatatccaaacgctggtagtatacctgtgcagttgtctcctgctagacaaggaccatataatttatagcttatttaagtgtccactttctttatcccatcctattctttgtgataaaccagagggatcaggcttaaccaagtgctgaactttggggcaacttcatgccctaggattcaagatggccagcggctacatgccgggtctgcctgccaggaccttacttcccattttttgcagttttcctggactgccgggaggcagctgtacaagctttataagcctcaggctgtaagtgaacttgctttctgcattttccagccatgtgccattgaccaggagtgaactcaagtataaattgcaaagggctacttgtcaagatgacaaatatctatcctactgtttcaactatgaacatattctgaaatgccatatgccaggcgccataccagatactagggacataaatatgaaaaagtctttgcccctcaggagtaatattggttgtactggaacatttgtagctgaaggaaaatctccaaaaaagatttcaaagagactaaagtaggaatgggtgctggagaatgagcaagaagggtgagagtc

SEQ ID NO: 157706 - DNA, 1000 bp, Homo Sapiens
catggcgacccgcgtttattttattaggaaggaaacaaccaagcaccccatgctcctgcccggcactcccggtgggaacatgccaaacagccggcgatcgcacccagcccacctgtcgtggaggtcccttccttctcaggccacagaaataaacccgtgtactgcttattgttagcacaacatcaccagaaaacgataacgacagccaagcaggacagacagttaagtagtacttccacactcccaaactcagggagccctataaccttaaggagggagcatttgctacacaaaagcactatccacagccagggatgatgtagccacaagaataaataaggagaaaggagaccctagaattcatgtcccttacgcctcacagcgacgaaccctgggaagctggttggtctagcatctacgcagaatatgtacaccttgttgggagagatgggggcagcccaagaaagctcctcagcgggctgaagagggagcaagatgggctgaggggagcttgcagttcatgctgcagtaggaagagggaagctcttcagtccagtgcgctgcagggtgggaaagcaacaacacggacaccgtcccaccctcaacccccccactggcacagggtcacacaatctgggtcaaagaaatagtggggcccttgtggtcatcaaagcgatccatggtcttgaggctgaggatcatgtgcaggccataggtgaagatgaagagcatgaacagggaggtgagcagccccatccagatgccgggggagaagaagctggcacagtcgctggcgtaggagaactgctcccccattacgttgaaagcctggatctggaagtcctgaagcatcatctgccagggagagggctgcgtgcgggccacgaggagactacccttcttgctcaggctgctgacatactcgcagtggaaggagtagatgctgggccctgtgacctgggaagcattgaagtaggcgacggagccattgctgtggact

SEQ ID NO: 157707 - DNA, 1000 bp, Homo Sapiens
ttttttttttttttttttttttttttttttttatgctaggcaaggagggatgattatttattagcttctacagattagacaatggggtgggggtgggctcaaggtgagatgattttttgggtccaagtctactcaagacaggcatcccagtcttcggtctccaaatccacctcctgtctgtccccccacactgctcctcaggccttgtggatccattgactgtgatttctgtggttcagctcccacatcaggcaggaagggcagctactgggtctgagatcccacattgcctccaacccttgcttcctagctggcctcccagggcaccacgaggggctgggccaggctgctgtgctgcacgtggcaggagtagggggctgtgtcctgcgggggcactgccaccaccacccaggactggtaagtgccatttccattgtgaagaacatctccccgtaactcaggctcctgcacctcgccggcccgagtccagtgcacatcaattttccctgggtagaagtcgtaggccaggcacttcagtttcttcttttctcctggggcctggtggctggtgaccaccacagagggaggatcttgccggtccaggatatttttgctgtatttcaggtatttccgcagagtcgcagggcactcctcctccaggtaagccttggcccgctgcacgtagactggttctgcctcccacttctgcttggttatctgggctgctgggtcgaaggggacccaggctgggatttctttgttgaattcaatgtagtcctttccatcatagtaatatttccagaatgctccgctgcttctgttattctcgatctcacaaccaaaccttccctgcaatacgtgagacccgttactgtcgttgtaatactccacgatgtctttcagggtctccataaagatgtcctccctggccttctgaagttggctgtcctgcttccaatcctccattccttccacctgtctccagagtcccatgggctga

SEQ ID NO: 157708 - DNA, 1000 bp, Homo Sapiens
gcaggacgcaggggtccctcttttacttcacaacaggaaatgtcacagacaccatcaaaatgggagggggtagggcacggggaagggtccccggtccgcggacgggcacagtggggagaagagagcaccagttctgtccggccagagggaggtgggccggaatggcagagtggaggtggggggttggtgggcaccgaagcccccatcccattccgtccaaggtgaggttcctgagtaacaaggggtccgggaggcctggcaggcctcactggggggtccggtttcttttctgcactcggaatttgagctggtgggggcgtccccgagggggctgcagagctggcctcttttctgagaagaagtgggccttgaagccctttttggacacggtgttgtcggacttgaactccacgcgcatgttgttgtactgggaggtgatgacctcgggcttctcagaaccacagaacttgccatgcagcttggagtcagctgtgagtccactgcgcacctccacgaagtcgtacttgcacacatcattgccctctgtctcaaagaagtcaaactgcagggagatgcggtactgggtgggggccaccagctgccagatgcagttcttgttgggggggtactccttgggccagcccgggctggtgatggagccgttgagcttggtgaggaatccgccacaagcagcctcacagcggcgcttgtctggggccagctcgtacccggggtcacagctgcacttgtagctgcccagggtgttgaggcaccgctgctcacagcccccgcggttgggccgagagcactcgtccacctctttgaaaaagttgacggcaaagcccgctttgttaatggacccgtcagagacgaacttgagccagaggcggctggacgtgctcttgatgtcatcaggcttctcatagccacagtagcgcccgatgagggtgctgctctcactgtgcccgtcgcgcacctccagatagtcgtaggcacagct

SEQ ID NO: 157709 - DNA, 1000 bp, Homo Sapiens
tatatatatatttatgtatttaattttgctgtactagcgacacccacaaccctccacaaccatgtcctgatagttctttaatacaaccttttcattctcgtcaaggtacagcatcgagatagcactgagttctgtcgggacacagcatgccttaggaatcttagagttaacagagttgaccaacgtctgaacaatggcatgattagtggagttcagatgatcagccagaggaaaagggcattctccgtggcagtaaaaggcgtgataccccgggggagccacaatccagtcattccaccccacgtcactgaagtccacgtacaaagggtgtctcttacagctggacttaaggcgtttccgctgtttgtgtttggcttgacgtttttctcttttgtggagaggatgcccttttccatcatggccaaaagttactagcaatggccttatctgtgaccagctgtgttcatcttggtgcaaagacctgcttatcctaacatgtctcttggagacaccttgtttctcctccaagtgggccacttccaccacgaatccatggttggcgtgtccctgtgcagtccaccgcatcacagcgggggtgacatcaaaactttcccacctgcttgcattctgattcaccaacctggtgtccaaaagtctggtcacggggaatttcgagttggctgttgcaggttttatgatttcataaatattaattcggtgatggaaactgctattgtttcctaaagcatcttgcatctgttctcggaaaacctgaagctctgctgaggtgataaactcctccgtggggatagaacttaaattaaagaagaatctccgggttgttttcccactcgtttctggtagttcttccaaagattcttcatggtggaagctgcgcacagtgttggctcggctggctgccctctccaaccggtggtctggggcgggtgagcccggctgacctgagtgcctgcgatacaggtctagcatgtaggggggc

SEQ ID NO: 157710 - DNA, 1000 bp, Homo Sapiens
tattgtcattaatatgatctttaataaacggaataacgcaccattttacagcaagcctttttaaacctaaagaactgccttaaaatctccttctccaatgtctctgtatcaatacaatctttttatttaggtttatatatatcaaagcatttacttacacttattcatagaaaactctttagtggcttaatgtcagctttcatagtggcatccatagataatacaaaagaaaagtgatttgctttattttatactcacactgatccatcaaacacaacttatacagcatagcaaggcttcagacagcttatacaaaagcaaaataactgaaattattcataaagtcatatatgatagtctatctgtaatgtaagagcaaaacacaccaacaaaagatacccgttaacaagaaagagggttctgaggaagtgcgagtattttctagcctttctttttccggaaaagcatcctcagaagtgaatactccgtagcttatgtttctcctgtccattcagaaaaagcatgacagctacgcatctccatgtttcagctactacaacaccctaagagttagtgtattttacaattatccatgtatctttatttgaaaaattatcagcaaaaaactgaggatgattccagcttacataaacactgatacaatataatctctatggaaatgaaataacaaggcatacaaaaattgcttaaataaataaatgtggccagaaaaagaaaagccacagaagtcaagcaattcagtgttaaactgggacctatctttgaattgcatcttttagtaattttttcttactgttaagcttctttaaaaatatgtttcctttacatacttacgaggattggtaacaaggtgaagagcctgagacaagagactggttacagataacttcctaggattttaagtatatagcacatcaatttagagcttgaacttgtctgattcaaagaaaaattctgtttgacaatgtgataaatacag

SEQ ID NO: 157711 - DNA, 1000 bp, Homo Sapiens
ttttttttttttttttttgatgtgaaaaacatttataatttcttgtagttacagtgtgtatcttcattataatcattcttacaataaatacagaagtgctaaacagaccattatcacagtggcctgtgggctgaggcacaggaactgaggggtgctgcagacaccagtgcttctccagggctggccaggacaccttcagagaggctagtgaagaggagaggaatgtagggtgaatttgaaatgtgattaatagagtcaatgcagcacatgctagaaacagatacagagttttttgttgttttttaactattttaccagatgatactaactaaacaaacagaacaaagaaagagattcaagatctcacatgagtgagaatccagggccttcccctctggccctggccccagcctgggccttgtttttgctatttccacctaggcatctgccatgcagcagagttaggagcgtgtgggcggctgctgagactcacacaccacagtactggcatccttcaggggcagctggcatcagtggaatgagtgcggatccgaagaaaggtttcccagttccaaagctggacccacaggaatcctgtgaggatttgcaaagacattgatagtgttggttcttggagcatctttctgcctcccgggctttgtctggtctcagcctcggggctgcaatccagggctgtgctgagcagcaagaggagaggagaaatgccactgtcttgcacctcccagtaagtctcccttttcatgaacagcccttgtgccaggtacaatggtctctctgttctctcacaaaactcatccacaaaagatatacagagtcttttgacagacagtcccactgctctggagtcctttatgttcatttctgattgacaattttggaccaaggccaagaggccccctaattcatgttgcttcgtcatgagggttgtccttgtcatctgatgatgcatgaggcatgctaatggcaaggccgggatgcc

SEQ ID NO: 157712 - DNA, 1000 bp, Homo Sapiens
cttcatgcactcagaaacatgcatgaagaggaggagaggacggcccagggtcaccatccaggtgccttgagaacagagaatgcagaagtggcactgttgaaatttagaagacccatatgtgaatggttttcaggccttagatgttttgccacaaagaggtgcctcctgagaagttttctttcccatttggaatacagggtggcttgatgggtactgttggtgaccccgagcgatgaaaatgaacattctgccactttccatcccggcggtgccacacacgagtctcttctgactgcattgtctttggcattccactgccatccatgtactgtgtgagcctaatatatgctatgcaggcggcatcatcccctaccagatgtacatgagggtttagaataatagtgtggattggtttattgcttttggacaaagcattttcaaagtagaatcggtgaaaatccatcccttccactaaattacccaaagcttcaggttcaaaagcagtaaggcctgggtcacagatttttgtgtaggcttcaaagtccccattgttgatagcttcgatcagttgttcagtgactttgataatctcttgctttcgtgctttcacatcttcatcctcaattgttgtatttgaactctcagttgactcctttactccatctggtttcttcaacaaactcttggctgctgagaaattccttgtagccagcatagttgtcaagatggcaccctttagttttcttctagcattaaatttcttcaagcagtctacagtctcctgtctgtgcatcatggaagcaacagtagaacgttgacagatccatgggtgcttcagtgcctctgaggctgtgatgcgtttggcagggttgatagtaagcattttattgatgaggtctttggcttcaggagtcaccgtgtcccattctggtgatggaaaatcataagctccagccttgatctgctgatagagtctgtgttggtcttcatcccagaaggg

SEQ ID NO: 157713 - DNA, 1000 bp, Homo Sapiens
ttttttttttttttgactgtttaaaggttattttattaaatattttcagttcaaggtttcattgtaacaaagctatgaagggtctaccaacattcagaacaaacactatttttaaattatttctatgttgtcatgcaaaaattctgcatcaaatgccttccgtttcttgtttaaaaggtgattttttaatagtctattgtctatagatgctgacattagccccagaagaggagtaagaatgctaagaagtggggctggagcagccatatgaagctatgggtctcaatgaattctaagaccatttgtcttcaagccagcaaaacgaaaccctgtggtgaagggatttgcgtgctggcactgcagactgcagggcaggaaagggctagggcccaggggctgggacatgcatgaggtgctcggaggagcctggctaaatccaagcaccagcacctgtgagtctgctctcttctcagctggctcccaagtaaacctgtagctttgcctcttctcccagctctcgtgcctcctgaaggtagtccagggaactggaatctacccacctttcccccaaaagtggagatgtttgtgcagataaatctgcagcgttgttttgagggaaaccaaggccatgaccaattgctcctccattatcttctttgctatctgcttagggtatagatctcttcctcctggaatggaactccttgagcacagagagggacaatgaaggtagaagccttggctctggacacctcttttgggttacatgcggggaggggtgatgcccatgcagattgtccagcagtaagtctatacttcagttggtcagtaaagaggcctctgtaaggacacctcttcttcttgccagagcagtcaggtcaatctcaaagacaggaaaagagatggacgtgcagcaaggaagaataagaagggaggcagccccaaaggcagcctgaatgcatagaaacgaccaccacctcttctcccactgcctcactcc

SEQ ID NO: 157714 - DNA, 1000 bp, Homo Sapiens
tttttttaagttttccaaatcaatttattatcctgacagctggcatcattaatactttaacaaaaccacttaaaattagccaaatatctaagacagatacatatacaaaagatatacaaattaaaaccatttaaaaagtaatagataccataatttgtacttggccacaacttctgtattcagaaatgattgtaaaattaaaacctaagttaaaaactgtacaccatatactttgagtgatttacatcttagaaaacaaaggcagtctttcattgttacagatttagtgtctctggtgggttgaggagagaaacaccatgatactttgaatttttgtacttttctcttattgactgttgtgcatgctgtggtgctttgaggtaggtctggtgaaggtccatgagacaaggcttaagactttccagggtatatccagtctttcgtattaatgattcaggccagctttgtcccgtgactgtgtagagtgctaaatgaaaggcagctccagcaataactgatggcaaatacttgaggtatgggtcagcatctatcaaacttaattctcccaaaaacattgctaaactttcaactttgcagtttgcaggctgctgatgcagaaagtattgggtaagaaactgatttactgttggagcagctaagtcaaaagtaaggactttcaaaactagatgctccattctcagaacttgtttcttggtgtaggtatcatctgtaatgtacacaaactctgctacttctggggggtatatttcttcaaactttgaggctaacagcatagcagcagtgcccacaagctgaagttttcctctcagcactgacatggaagacaggaacctatcaatgtagttcacagccaaatgcagggtctcattctgtagtttatattcttctcctacttcaactaaccagtccacgaggatagctctcatactgttagtgatgtctggctgtttcttcatgtaacccactttaggtttacatt

SEQ ID NO: 157715 - DNA, 1000 bp, Homo Sapiens
ttttttttttttttttttttttttttttttttttgaaggagaagcccctgtcaaccttttattgggagtggaacacatgaggttcagctcgtgccgggcactgtacattcactgaagcagctcaaggggctcagccccgacactgacgccacactgagcaggatgcacggcccggggctcacactgtccatggaggaggtggggtcagcccgaggtgggcggatggtggcccgagacaccgagagcttggttctgggactgtggctcagctgacccgtggcacagctgcacctaagacatggccctggctaggcgggaacagctcacagtagcgatacattcacaggacacagttggtgtccagaaaagggggctcagaacacagtttctacacaagcacttggcacccacacgacagagacgtcactcaagcagcacagccacaaatagtttacagcagctcatgcccggcatccgcccatgctgggagactccctgaaaggtgggcacctgccgtctatgaagaggtgtctccctccatcattaaccccaaaccacacaatgtgtgaggagagcaggcctctgggtgaactcacacattcatacccaaggaagagcaaacacactcaagtccagagttcccagtggtgccgcccagacctactgtcccgggggtgttatggctgtccctcggcttccccagagcagccaggacagcctgcaccgcctcccagactcttgcaggaaggggagctctgccctggggaggaaactgacaggctgggagacaagactcccatcgcagggacatgcacagcagcagccacagccccgcggacggggcatggggatgggacaggcagggagccacactgccccctcagtgtgtgcctgtggttctgtcctggtcctgcccacttggagcccaggcagacaggtggcattgagcagggcccaggtccagacagccctctggccagatgtgactggaagaggctga

SEQ ID NO: 157716 - DNA, 1000 bp, Homo Sapiens
tttttttttttttttttttttttttttttttttgagcaagaaactcatggacttttaatcctggcaggagcaaggaaaaccccgtcaaagatttacataaattttgctgctctcctgctgggggggggggggggggcagttcgtcacatttaataaaattctctccctcccttctcccgactgcattatctcatatttatttatttgagacagtctggctctgtcgcccaggctggagtgcagtgggagcgatcttggctcagtggagcgatgacaggctcactgcaacctccacttccagggttcaagcagctctgcctcagcctcccaagtagctgggattacaggttagcatgggattacgccgccacacctggctaattgtatttttagtagagacagtgtttacaccatgttggctagggctggcctcaaagacctgacctccagtgatccacctgcctcagcctcccaaagtgctgggattacaggcatgagccgtcatgcccggctttctttttgttcttcaagaaagggaaggaaaataacattgtctttgagccagcggcgtgtcgaggaaataagggtacccccccaccacaccccaaaccccctcagtgccctggggtttgaagcaaatgctcagagggcctggtaggcggatgggcgtctccggatgatgcagaaagcaataagcaccagggcgaggaggccaagaaggatcaggccgatgatgagaggcagcaagatggaccggtcactggggcaggagaaactttgcccaaagacccctgtgtggggcagctgagcagcctggagcctcagggagagcaggtcgaggtggacagctggtgaaagaatgatgctcgagttgctgcaactgaagctctgccccaggggtgcttggagatctcgaagggatgcattctgagccgagaatgtccactttgctgcgtgggggaaggacacattgtactccaccgccatgtagctcaggtag

SEQ ID NO: 157717 - DNA, 1000 bp, Homo Sapiens
tttttttttttttcaattttttatattttgtttttattcaagagttactcaaaggcagcactttaaaattaggctttttaaattaaaggccaaaactaaaaaagtttgcaaatatgacattactaaaagaatgatagccttaataatttaaactctaaaatgtccgtcctgtggagttaaggtctttatacacagaatgtgtaagatcgatatcatttaaaataaacaactgaaaaaccacagatggtgggtaaatttgtcaatgaagataaacatcagtttcagccttctagagtatgaaaaccggcaattaattaatcctgtgacagaatataaactgtacttcagaattttgactttaaagtctctttctccagcagcaaatcagcatatctatgttgaagttccttttctctttcttgttgtcgctgaacgtcttcttttagacactctagcctccggggaatagcagaatcttcatgtttcttgagttcttcaaaagtgcgtaactccaagtgagcctgttcaatttggtcccataagtcattcaactgtttcatgagccccatagcacgagactggtaacccccaagcaaaattttcatcttcttttccatctttgcagccctcttggcttctgtcgtcatgtgacccctgtttatctcgagcctcttttcaagtgattcaattctgtcctttttactagccagattggcccgtgtgtagcggctctgcccaggaagatataaaacttgactgtagcattcttcccacacctggttataagcttcacttgagagctctccatggctcattccttgtttaaccacttccatctcctgcaccaaaacatcctgggcctttttcagctcttctttggagaacttttcataaggattatgttccagataggtaatgtgctctgaattattggtaccaaaccctacagttttgccttttttatttccagatggttcataagggtgatgtagaaggtcat

SEQ ID NO: 157718 - DNA, 1000 bp, Homo Sapiens
ttttaaaaaaaaaaacatgaagggagacatgactttattagaaaaataaaaaacaactgaggtgatgggttggtcttcagcggatgccttggtggatgaggctgcttttggctgcactggccttctcccgctcccgccgccgcgcagggtccaactcaaaacagcgccatagcctcagggtctcatctgctgctgcggatgccactgtggccccatctgggctcatggtcagactcaggacccgggatgtgtgacctttgagttcagccaccttggccatggttgggtacttccaaataactagctggttctgtgcaaagccatggcctgagatgagctccttgtaatggggagaccagaggatggagcacacctgggaatgggcatccacggcactcagacaggccccagagcacacattccagatgcgaatgtgtcgatcactggtgccccctcctgttgccaggacattggactgccagggacaccatgctacggccttgacagccccttgatgctgggtgaatgtctgcagaggaacccagccaccctctccaggagcactaggccacacattgaccaagttatcattaccaccactggccaaatgtcgtccatctggggcccagcgcagcccacacacttcctggctgtggccactcagtgtggccacatggtgttctgctacccgaacatcatggtggtggatgtggccagaacgtgaaccactggacaggatatagctgttccagcttagggagcccactcgggcagagtgactggtcatatttcgaagccgtttctgctgctgcacatcccatagctgcacctcagcactgctggtgcccacagccaagtagttgccctctttgatccaggccacagaggatatatattccccaggctgctccatttgcaaaagctgcaggatgtcaccagagcttgcactccacaggtacacactgttgtccagtgccacggccagtacattcccagaact

SEQ ID NO: 157719 - DNA, 1000 bp, Homo Sapiens
agcaagatgaataaattaaaattcttggttatacattaaagcattcttgccaagaataagagtacactgtatggagggatatttgattcctacatacgagtcccaatatgcccattacatttgtttatgggagatcatcgaagtttaaggtaatttacattccttggcaatcaagtcactgttataggcaacgtcttttattgttccatctggcacttgcaaacaccattcttgaagaacctagaaatgaaggtcagttactctgtttatctggaacagaaccaaataaaaacaaatttttgaaaaagcaaccaagaaactctggttcatcactattttccatatctaatggttccttcaagataaagcataactcttccttcatgatactttccaacaaagggagattaaagaaaaacagaaaagaaagttccccaccctaccccccataaattgtcattcatactggtaaaagagccagtcttgttagcagctaaatattgcactgcctttcattctgtatacagtcagggtccaatgaaagtggcacactcatggtataagtgacggacgatgacaccgccagctcaagagtaaagactcagtatacagagggacaagaaacacgtcagcactagtcacacatccagttgtaaaagtctgatttccagaagttaaaattcatcactttcagctgcatgaagttgtgtgtcatccgcatctgtcatgctgctctcctgggattcatctgttcccatgatctgttcttcttgggttattggctcctcatcatctggaagataacgcttatcaattgcctctttaatctggttattggctcctttaggatctaaatccatagcccaagagaaattcatcagggcgaggtgcgtttgacctaacttcttgtaaacctttcctattaagaagtaaacgagggattctttgggaacaatttgtttcaattcttcaagttcttgtaaagcagacttatattttt

SEQ ID NO: 157720 - DNA, 1000 bp, Homo Sapiens
ccaaataaaactcttttctctataaattacccagcctcaggtattcctgcaaaacagactaacgcaattgggtagagtgcaatgaggctctttaccttgggggtgggcaatcattagcccttgactgagcactgctctggttctacctaacgaatcttaacagcaagacctgaaaaaggaaactgcttccaaataacctgcaactcataacaaagctccagaatacttacaggaatacagaaatatccagcacccaacaaggtaaatgttacatctggcatctgacaaaaattactaggcacagaaagcaccaggggagcaagacccacagtgaggaggtatcaactgaaactgacccaagtgataagattcgcagacaaggacatcaaaaccattgttatatctgtgttccaggttttaaaaggttagacacagaacatatataaaaagacccaaaaacaactttccgaacttttagaactacaatgtataaaatgcaaagtacactggatgggcctcacagcagtcttgacattgaaaaggaaagtattagtgaacttgaagaggtagcaatagaaactatccacagtgaaacagaaagcataattttttaaaagtcaacagaatacaagtgagctgtgagacaacttcaagcaagctaatataggtgtaatgagaatctccaaagaagaagagagagtgggggatcagaaaaaatatttgaagaagattgtaaaaatttccaaattttatggaaacaataaacccacagatccaagaagttcaaaaatttccaagcacaagaaaccaaggaaaaatacaccaaggcacatcataatcagtgattttttttaaaaggaacattatgtaaagaggaacaaagataaggatgacagatttttcatcacaaaacaatgcaagtaaatagcagaggtacatctttaaagcactgaaagaaactgtaaagccaaaaatgtatacactcagcaaaaactacttt

SEQ ID NO: 157721 - DNA, 1000 bp, Homo Sapiens
tttttttttttttttaaaatacaaggaaacttttattttcaattttcatcaagaaatttgctgtggttttttatgcttttggttttttcctttttttttttttccactttatttcatttagccgctcagtggctagagccgctgggttcctggtattaaaaagatgccaacagaggtagctgtgtctcgcccaggggcccagcccactctgaataccccccaaaaaggagaaaagaaaacacaaaataaaccaacaaaataaaaccaaaaggaggaaaaaattcagatcattttcttcaagcctggcaggaacccacaacagtttgtgtgtaacaggcgttacagtggggagaagccagggtccagaaggccagcccgccagctcctgcagatggcgccagcgctactgctgcatgtctcttctgcaggaagggcaccactgcccctcactccctcccctcccccagtgcactggggctgttcctttacaacatggaagatgggcagaaggaaggtgagggtctctcaggcccccaggggagaagctgggacaagagaaagtgaggaaggtcactgctcagcggtggaggtggtatcagtctgcatcttcactgctgctgggctacctgctgtggggtaggttcgggtgcccggtttgccaggcggctgagaatgttacgctctgacatctgtaacctcacagcaactgggggaattcgggcaatggtagctgggagtcgagtcacatcagctttcatgtcactcagcagttcttccagctgtttcagaactttgtgcaggactgcattggctggcttgtttcctgccattgactccttggacaggtgctgatgactttccgccaaacactccacctcagcaaagcgggtgttgagggccatggaagggtgagaagggtcttctgacatgttcaagtaagcagcccggcgcagctgttcctcaatcaccagagcttgttctaagagcttaaaccttcgag

SEQ ID NO: 157722 - DNA, 1000 bp, Homo Sapiens; identical to SEQ ID NO: 157639

SEQ ID NO: 157723 - DNA, 1000 bp, Homo Sapiens
ttttttttttttttttttgagaggatttctttatttcgcgttcagacccaacacactcggacaccttggggccctgtgagggctaagcagggtggtggcgtcagctcccggggaggccccactccctggggaggaaatacacggcagggggccgcacccagccccccacggagggacccgtgttgctctaacagggacactgaagttgcctctgccgccccgtgaggggcctgtggcggccccagacccagcccagccaggccagaggagcctcccaggggccctcaggtggtgaggtgggggcttcccggccccggtgcccaccggcccttctagctgcctgtgctgggccaggtgtcctctgaggccggcaggagtctggcccccgctgcacctgcgcttggtggctggcaggggcaaggtagggaggtcaccctcgaggccggggtccccatgtgctaggggaagacctgccttcccagccagtgtccacagggcagcaattccacgctctgaggctcagggaccaaggcagggctgggtgtggggcccagactccaagctctgggggttgggggaccaaggcagggctgggcatggggctcagggccttggaggtttttctcagctctcaacatcacagcacagggcccgtgagtcaccccagtcctctgggcccgtgtacccaagccggatgcaggccggggagtgcacgtggggctcctctgtggcgccagtgtgaagctgctctccggggcggtcgcagcctccaaaccctggtgctacgagtccgtgcctcaggcccagggaccacaggccgtctgctcatggctgaaaatgaggccaagcagctcccaagtctcgaagactccactggtgtggaggcagaggggcccttccagggcagggcagccctcggggcagcagcaggggcaagggctctgtctcacgcacacgggcacaggcacgcaggtgccggccctgccgctggctcccaaga

SEQ ID NO: 157724 - DNA, 1000 bp, Homo Sapiens
tttatagaaaacctaggtttatttgttaagctattacaaaaacaaaacaattaccatttgaagtactttgaggacttcatcccagactcacttgttctgttacagaaactaacctaaaaggctggaaattaaaggatacaacctaagaggttataacagcagactggtaaaacatggcgaaaggagctctctctttcccccgcagtctaccaagctcctgtgcattttcaccacatagatctgctagcttacaaatgatgcacacagtcaaggtaggaattataggcctactcagagggtacccagacacagaaagttttagggtaaatagtaaactacaaataccctcttggttaagttaattcatcaagttaataaaggtcatattatctatcttctgctggtgacaacttgttgtctcagtatagtctgtctcaagaaagaactggttcaggttgggttttggaaaaggaaaaagactttcattaacttcactccagagtggaagaggcaccaagttctctcctacacttaggagcagaatcttaaacttgcataaatcattttcagtgatcaacatctgcatcctcaaactgtccagcaactgttggtgtggtatccacctccatcccatcttcataatctcttattgaatcttctgtcctgaccccagccatattatactggctgctcacagactgagaaagcattccttctaatctctccagtgtggcttggccttctgctgttagatgggataatccttcttcataggtgtaaaatgtagggatgtccccctgtccttgttcatgtgcttccacatcatattcttctccatcgtagtcatctgaatcctcatcctcaggatctggatgcaaggcctggcattcgcacattgcagtgaacattgcctccaacgctgatttatcactaggcacaaatctaaattcagtaataggttcaacatcatcatcactgtcttcctcttcttcatcagcaa

SEQ ID NO: 157725 - DNA, 1000 bp, Homo Sapiens
ttttttttttttttttttgagtttaagttaaacacccatatgaatttattaaatccagactgtgttaaagggcggcggtctaggagggggagtgtggtagggggacgagggacaagatgatgaacggccgtgggcatcccgtaggggggcccggccccacccccgcccaacccaccccctcggcaacgctgcatcagcttcaccatgattcccagtggtgctgggctggcagggcgagatggctggaaacacagagggacagagggacagacagcgcctccacaaacaaaccctggcctgccccggcccctacgtcacacgctgggccctgacctgaggcgggcctcccaccgccccggcctgatctgtccagggaaagggcgacagggaggggaggcgagggggccgggacgcaggggtagtggtcgccaggagccggagcaggtgaggaccagtctcgactaatcctttttcttgtcctctgctggctttggaggggcttcctggggctcgctggcagagctggccccctgggtgggcttggtgggcagggacgtggaggcctcctccctggtggcggtggtcgtggtgggtgcaggtgtgggcgtgagggcccctgctgctgtgggaacctcggccacgggggcggcagctgtggggtcttctccactcatgccaaactcgttgactcgggtggggtcgacgcggtagatccaccgttggtagaggtagatgaagaaaaccacatcgtcccgcaggcagccgatccggtacataacgggcatcttgatgacaaaggcgaacaggtcgtcgatgaatgtgttgagggccttgtaggtgagcatgcgccagggaaggtgggccacagacttgagcttgtagttgatgaagagctggggcgtcatggtgatgaagccgaaggtcagcaggaagccgtagagcatgctgagcacccaggagtaccagcccttgtgctccaggtacagaagactgtagacgg

SEQ ID NO: 157726 - DNA, 1000 bp, Homo Sapiens
tttttttttttttgagattttacagccatttattgtgctccagtgaaatagaaaaaaaagaaagtgctctcattacaaacgccactgtcacatccacatagtatgccagtcgctgcaaaccaaaccgcgtgtgtccgctgggtctctgggcatgcagtttgctcccactgcgggaatggggtgggggcaggccgagcctgggctctgggggctttgctgggggagcttctggtcctgggggtacccacttgtgagggagtggggggacagctggaatagcgttgctcagtgcgtcctttgggcgctgttggggacacccggctctatgttggaccctgtagcactacagagcggagggtccccttccccccaatgggccccccgccagtctgctctctccaaactctaaccctgtagaggttgagttctacaggggctggaggatgccatgcagggagagggggtcggctgggcctggctgggtccagccaagagcagcagcagcctcccttggggggaaaacagggaaggccttgtggccctaggcggaattgtagtagttgtgtgcgtggtggttgtgggcgggctcacccagctctgggtactcgggagtcagacagtacttggggtcgtagacctggcgtggcagcccatacaccgtcatgccccgctgcgaggcgcccttgttgctgcccatctgcaggctgacattgagcgtgtcgcagtgctccatgcccagccccggctcgaagatctgccgcttggtccctggcgcagtcatgccagcctggctggctcctttgttggtgcccatctgcaggctgatggtcgcctggtccagaggctggtctgtgcccagcttggggtcgtagaggtggcgccgggtgccataggccgtcatgccctgctggctggcaaacttgttggtgcccatctgcagcccaatgatgttccgcccttctcttagcttccccggctcgaatttccgctcctgcttctc

SEQ ID NO: 157727 - DNA, 948 bp, Homo Sapiens
tttttttttttttttgtgtagcctttagctattttattttaaatcaaagacagagcttcccagcaccataatgaacatcagaagaaaagcccagtgcccgcactcagcacagtccagtcgaaccacaaaaaaatctttatcaaagatcttcactttgggttccaaattactcaagacacgtcagtattgggcattattggaatttaaataacaaacacttttcaaatgacttgggaaggaggagaggaaagatcactgctgcttaatacattttattcaggtctgtcattacacttgcgtgagcattcatgggtgaggttttatttgcaggaggagaaggtcttccagaagaagttcctgcagggcattctgtcccggcgcgcggattgctgggggggtgcgccttcctgccgcctggccacctcccgggcttcctctcctatgaggggcccggcactggcctgggaggtccactcaaaccaccaagcgaggaaagtcaggaggctgcttttccttattcctgccgcttcctgcatatgctcgctgtctcggccggtggggccaccctccaggggcagggcagcggtggccgtggccccggagagcagcagcagcaggaggccgggggacaatggcatcttgtgggctgactggagcttctctcccaccctgctgctgctcttccttcctggcagccctgaaatcaatgttttggggacttgggtctcttctttggagcttggtgggtattttaagcccaatctccagctgtttttgtgtctatacatgtctaacgcctggatcctcttccctcttccctcgcgcagtgacgcagaagctggagcaatcagtgcccacaaaagcgctctggggttggatgtaaccccttaattaaagcttcaggtcttttcctgtgtttagagcgaatttgctcttattttggaacgc

SEQ ID NO: 157728 - DNA, 1000 bp, Homo Sapiens
tttttttttttttttttttttttttttttttttcttgtataccattttattgtggaaggaaaagagaatcaatgaattgtacaaatgtgaaggctgtaacaagttgtagaggctttttccagacattcctatgcaatgttctccacagtaaatacctgggggcagccaagagggaagatttcagataagtgcaaacagtgattggatgttatctacctacaatccctttagacatttttgagagaactctgtttaaatgttgtttaactctcccaccccgaccaatgaatccctacggaccagcagtgccctgggagactgagtaatgaaaacatcctgtcaagcttcaagacctttgggcagatgggactctgcagacccgtgggagcacaaaggactaaaaagctgcaggtaaccgtatttggtaaccgagaccacacctggccacaggataacttgcaaaattcccagaaccctgcttctggctcttaaagccattgcacatgtggaggctaatttctgaattcaggagatatcaggatggacatgtatttttcacccaagggacaggaatgtgagctctgtgggctggttagcccagcacacccttcttcctaacttcccttctcaatacagccttgaaaaagccgtgctgtgtagcagaggagtggcgacccacagtagtgactccagaggtacagtaatggggtgggggccagaggtatccggctggtattaagtccagggctacccttttagaaggaactgcttccaacagtgtctatatgttaacgtgaactataaagatgcctgtgactccttggagttctgaaatgctcatacgcaatgggggtgaagggaggacaggggctggcagtccagcttgagactcccaaggcaaacatgtggaatccccagtcccagtgcacagcagccgggtcctagctattggtattgttagaaggactatggttgagaatgtgtggggtggggaaaacca

SEQ ID NO: 157729 - DNA, 1000 bp, Homo Sapiens
ttttttttttttttttttttttttcctgtgcacaggtcccatttattgtagaaaataataataattacagtgatgaatagctcttcttaaattacaaaacagaaaccacaaagaaggaagaggaaaaaccccaggacttccaagggtgaagctgtcccctcctccctgccaccctcccaggctcattagtgtccttggaaggggcagaggactcagaggggatcagtctccaggggccctgggctgaagcgggtgaggcagagagtcctgaggccacagagctgggcaacctgagccgcctctctggccccctcccccaccactgcccaaacctgtttacagcaccttcgcccctcccctctaaacccgtccatccactctgcacttcccaggcaggtgggtgggcaaggcctcagccatactcctgggcgcgggtttcggtgagcaaggcacagtcccagaggtgatatcaaggcctacccggaacagaggagatgcaggcagacagagtggggaaaatgtaaatggggacagtggccaacgccgatgcaggcagatcccaaagtcagggttaagctatcctggccagcagaagccagctccccactccaccaccacaccctgtcacttccgtccctccccaatatccagaggagggtggactctgttcttgctagcaggaggcggccttgggaagttgtccgagtgggccagagaggctgaaggctgctgccttcctgcctggctcagtctctgcccagtccccagtccccagcagccagtggcccgtggcagggccctcctggggtcacagcctgcgctgagctcagtccagggaagaacaaagcagagaggaacagagtggagccgtggcaccttacacgtagttgctggcagcagcagagcgggcagcagaatacttggcggagtaaggcttgtctgtgcggggtggacagttgcagcaaagcagccccccgccaaggagcagcaggccggaggc

SEQ ID NO: 157730 - DNA, 1000 bp, Homo Sapiens
tttttttttttttttttttttttttttttttttttttttttttttgcaaaacgaaaggcttttattgaaaaatatcaagtgccccttccagggctgccggtccctgcccagcgcgagcatgggggcagcggcccgatggggctcgacggggtggtcaagtattggcggtcacccaggccccgtgctccagaagggtgaggtttcacagtccatgcaggttggtccctgggccccgaagtcgactgcccggcccgcaaagccgtggctgctggggaagctgccccagtccagcgcgggggcttcctggcttctgggggtgggctggcctccgaggcaaggctgcacgctggatggcctggtgcgcgctccagctcgcggtggtggtggtggtgttggtggtggtggtggtggtggggtctccctgcgtctgtcccttagacgtagtccttgcggtcgtagcctgtgcccaggctggctcccgggccggtggagcgcggcgcggagtagacgaccttggtggccgtgtacttcttctcgcgtgggggacacgagcagcagagcagcgcgccccccagcagctgcagcgccgcggccgcccagcccacgtacaggcccgcgcccatctcgcgcttctgcgcctcgggcaccacggggttgtagaagtcccggataatggtgttggccgaccaggacaccggcacgagggtgagcagggcggcgagaaggaacagcacgcctgccacgatggtgatcttggccttggccgtgtcgtcctgcacgcagttggtgcactgggcgcccaccagcgccactagcagcccgaaggcggccagcaggatggccaccacgatgagggcgcgggccgcctgaaggtcctgtggcagtgccagcagcgagtcgtacaccttgcactgcatctggccggtgctctgcaccacgcagttcatccacaggccctcccagatgttctgcgacgtgatgatgttgctgccgatgaagg

SEQ ID NO: 157731 - DNA, 1000 bp, Homo Sapiens
tttttttttttttttttttttttttttttttttttttcccaatacttattttttattactgtacaaaaagcacactctccctctttttgtctctcccaccaacggcacccccccacccccaacccaagaggactatacatggagtgcagggacagagtgaccaggaggcctttgtccggcaccctgcccacaggctgagctcagccccaggccctttcaggcatctagacactcccatagcctgtcaggctggggcaaggagatcccaggtcacacatactccttggaagagttggacttagggtaagagcggggtgcacggtacccagccttgctctcattcccaggacaggaacaggagagcagtgcacctcccaggatgactagggcagaccctgcccagccaataaagatggcagggccaaactcatacttaatgttggtagggatcaaagggttataaaagtctgtgacaatctgatggccataccaggagcaagctaccaaggtggcaagacctgccacgatgaaaattatgcctccacccatggctatacgggccttcttcactttgtcgtctcccccacagcgcgtgcacttcatgcccatcgtggccacaaacatggccaggaagcccagcaccagggagaccaccattagggctcgagtggcctgcaaggccgcggacagggcgagcaccgagtcgtacattttgcagctcatcatccccgtgctctgcgtgacgcagtccatccacagccccttgtacatggcctgggccgtgatgatgttgtcacccgcataggagctcatctgccactgcgggatggcggtgcaggccaccagacccacccagcccagcagggccatggagaagcccagcaactgcaggcccgaattggccatttccgccctcagaaaacactgggggcgccgggcgggagaccctacagtaaaacaaacgacacttggggggcagccccacaaaagaaaacttgag

SEQ ID NO: 157732 - DNA, 1000 bp, Homo Sapiens
ctgaatatgtttgtatttaaatatgtcccagataataaaatagaaagaatgcttgatctgatctgagagcaggagcaaagcctttctgaagggttgcctggcactgtgggtttcaggcagggcctctctgcagctgcctcatctccatttctttctttctggcttggggctgcactttggctctgactccgtgccttctgctgggagctctcctcacagggcttacttgagggatgcttcttttgaggtggaagttaaccaacgttggttccgcaggacccacggtcacagttactgtctctgggtcatacccaggtgctgtggcactaacagtgtagatacctggaagcagcagccggaagtaatcaccatggtcacctgaagtgacatcatggttaatcccactgacagaaatgacagcattggcgagattattgtaattctcatcaagcaccattcccttgatgccctggtgaacctgttccaggaactggattagggcttcccgattacccagccactcccgctgtaactcctcttcggggggaaacttgtcgcaactcagttccagcgtgatctcaaagcagttggtatggagataattaaagtcttgcattcccttgctgagagaataccaggaagccccattggtgatgccatctgggaagtaatctccgcagttccaaccttggaacatccatccatgtgcataggagtagaccttggccagcttctggaagagcttgtcgtcaggcgtgggggtgctggcggtgcggcggacccctcggacccggtgctcaaaggacttgtcatacgggtaattggccaccaccgcccctccgtggagattggctgaaagaacaaagttgaaggagtgcatccaccggatcaccgcccgggtctcgggttccacctgacttttccagttgtctggaaggggcaggtggtggttggggcctccgtacttctcgttatagtagatataggtattgagatcagg

SEQ ID NO: 157733 - DNA, 1000 bp, Homo Sapiens
aatgtgaatatttaaatttaatgtagttcttccctatttaacagttttctgtaactcctatttagcctaccaattaccctgtgaaagttatcctccccccttttttacagatgagaaagcaggctgagagatcaaataactcaaggtgactcagaaaataattcaaggtgactcctccttttaaaactaaatatgtaatggataatatgcaactgatttcttgtgaaatataacatttatgtttttagattttctttgcctttaactcaaggtaagtccagtttaaacctgtactttttgtaattagccaaatcaaatgatcataattcaaagatgctaaaacagaatgctacatagtgatgctgagaaatactgtcaattagccagcaaacagtaatctgaatttgcgcaggatgatcattctaatttagatataatagaaagattttagataaaatagaaaactttttaaagaaattcaactatatcctaaaacttgacctggtcaaacttattccatattatattcagttgctctaatatacagcaggttgatactaaaataatgacagaatttggctggtctaaacatacaaatatattttcccccttttctttctttgggaaaataagaaaaaaaacattactctgtttactcagaaagcaaggagagcagcaccttctcctggactccgtgactgtcagccatcttgtcatcacaaaaaggtgaggggtgccaggatttcactatgctgctccttcactggaaagggaaggaaatgctccagctgttttaatcagtgacatttattaacatgcttcaaaagtgaccaaagtgtccagccagcacaatagccgaggcaatcaacgttctcttagtgtgtgatctcctccaaaacaccaaataaataggtttaggaataacctcaaataaattgtaatttaacttcgcccaaaattatacatcctctactgctcttccctgctcctgtaaagatac

SEQ ID NO: 157734 - DNA, 1000 bp, Homo Sapiens
ttttttttttttttttttttttttttttttctgcaatcctcaaaccgtttattgacagcacaaggctcaacagcaggtgagccacgtgagggtggcgagcgcttgcgaggcagtgtgggcaccaggcaggggatcccggagggaagccctctgccagggacatggtgagggcgtggccatcacccacgaagggagcataaataacactggcaggtgggtgggcagcaggagagggagagcggacagcgccacggggacacgcagggtcggcgggaaaatgctgggacagggtcacacggggattcggacacgcagacacagaagggatcatgggacgcccagaggatgccagagggggcagacacaccagagactcggggatgggcatggtgctctgcccgtggctgcccctcctccaatactcgccctgggcttgcaggcaggactgggcggctgagcactctcccagcagagccaagcaggggggcccctgcagggtctggggcgcaggtgagcccacatcatgagagccgctgtagcctagggctggaccttgccttcggggtcccggtcatagatgtagctgcccaccgcaccggtgttcactcccttgggtccgaagaggattccatagcagggcttgtggcagtagggctggccgtcgtgctccgcgtgcccgccgggggtcagtgtcttcccgcagcgctcgcagcgcaggcagggccggtgccaatccttgcccagagacgtcaccttctcagcgaagtacaccttcttgctgcagcgcgggcacgtgttgggctccccggtgaaagtggtgacactggaggctctgctgggccccttcggggggccgctcgccttccgctcctctgctcgggccgcggggacctcgatggggccggtgacctgcggcccctccgccaggggcttctcgtagatgtaggagcccgcgcccccgatgttcacgcctttgggtccgaacagggtggcgtagcac

SEQ ID NO: 157735 - DNA, 1000 bp, Homo Sapiens
aaatttgaaaaataggctttattttaaccagtggtattgtctgacatcctatacggcataactgattacagccaagttcatgaatacaaataaaatagcaatttccctcattctctcttttgttttctgttcagagaaatcaggagatgggagcattatgctcagaaaccgaagagctcttccaagagctccagcttagagtccaggcttccagagcatgcagcctcctaacacgtatgtggtcacatgtgcaaagacctttattacaaaatattcagagcagtatttctgtaggaaatcacacgagcatttacaaccaaacatggctgataaaattcatcttgctgtggatggtgaggatttgaactgcaataaaggagatgaggcctttactttaaaggttcactttccttgaaagggggagagtcccgggtgagagggaatcgccatcagtctgcctccttccttcttgctccagttgactcagggggtccaccctgtccctctggagtacatgtatcactgcactgattgagaaatggaaacaccttggcccaaatacaagattctgtcacacagccaacactggaagtgactttatactttcttattacacaaaaggcttaaatatatgagtcctcatgtagaacaaaatgcctgaaattcagcaagttatgaaaacgacacttctccacccctgaggatattttatctttataaagttgaaaatacaaaatattaaaataatttgccctttctccccatcaaaaggaatcacattctcaaagggattcctacaatatacaaaattctgaaacaaaatttatttctccccaaaccaagaagtcaatgttaagctgccaagaagacccttttccataggagtggaaaagacaccttgttacttttttattttaaagtaatcatatttagagaaagacagcaaaaggagtttctggccttatgggctttaattttttactttgattttcagcatttc

SEQ ID NO: 157736 - DNA, 901 bp, Homo Sapiens
caagctgaagttttatttaaaatgtaaaagaaatgttcccccaaaatgctggtgaataaagcaaaaggataccatacagtgctctcttcctacgagttagccagcctatccaagtacagggcgatatacagtacttaatgctggtagaatttcacagtagtttagtgttaaagattatctgtgcctagattatgaagagattctcagtgtgtgatgtttagttcagggtttacatcttactgggcatgaacaagagcccctgctccttggccatagccaaatcccttgggcccaaagttctttgcatagcatcctttacaatagatttcaccttctttttcagtcagagttgttgattcaagactcttcccacactttgcacatcggaaacagtttttgtgccagggctttccagctccaattatcttctcggcagcatatacagaatccccacatctggaacacttctcagcacctccatatttctgagcaaatttagaagtgtttggatttgttgtaggcctgtgaggctgaacactctctggtttgatgcccagcctctcgccacggtccatgttaagcgtgccagcgccctggccataaccgtagccttttggcccatacttctttccgtagcaggatttgcagtagatctcttcatcgtgaattgccactgttgtgctatctaaatttttcctgcaaaccatgcagagaaagcagcagcggtggaagctcctgccatcacactgcacctcttctgcgtggtacacggtcctcccacaggccccacacttgtttccacctccccagacaggcattttgagtcggaggcgggagcacgtaccgcaggcggagctagcgaggctgggctggagggagggtccagggagtccgagatccc

SEQ ID NO: 157737 - DNA, 1000 bp, Homo Sapiens
ttttttttttttttttttttttttgtttctgaatccttttattttttaaaggacttttaaaatttgaaactacaaaacggatttcatacattctgccataaataaaaacaaacaataaggcaggactctacataagcaaaccaagaacaattgttttcagaaaatgtgataaaatgctttacaatcataagccatccagtttttaaaataaaactgttgaaaaactcacaaatcttcaagcggcacatacaagacacccttgaagagggaacaaaatgtggttctgccactttgtactgttctcacatttttgaaaacctaattttgcttagagcataggtctgttccgtattctaaaattcacacaggttggtttgttttttctcaagaaccatgtgatagaggcaccaatgacaatacaactttgtttccaagaaccttgtaacaaagcgttgtctcttttaaacataccacttgaggcaaaaggaatcctggacaggagttttctgcagaggcgtttaaaaccctaccgaatccgcttctgctgccgtgctctgtaaatgtcatgaacaggggggacaacggctcccttttcttcatcttcatctgaatcctcgttgggccttttgacggccttggtgagtactgcattactttccacggggccgttgccttctacagctagctctggggccccaccagtaatgatcctcacagcttcctcaacagtatttggtatcttgcatcttcggaaaatttccatcagttcatccacttgtacaaaaggaccctggaaacagataggaggagggagaagtttcattaaaacaacagctgcaggagggactgggaacactccaccaggtacagggtgtaaacctggaggtgctaaatgtcgtggctgaaatggaatcatctgctgagtgtctggtttagggtattctggttttctatccacttcatctttcagaacaggcactatagaaggagctacaactgg

SEQ ID NO: 157738 - DNA, 1000 bp, Homo Sapiens
aggagcaggtatataattttaatctaaagattggggcatacagaaagcatttcacataaattctcttgagtctttaattatatgacaggacataaggacctcagaaaaataagtatcttcccatagatcttaacccttgatctctgcagcaaagatagtccctggtaatccaggtaatatggtctgtaaaatattaataaataggcctattgacttctgactaaaggactgcatatagcctgagaagcaacattatggcccagtggtcagtacttatatacatgggccttttgatcctacattttcctattacgtagttgggattggtagtttctaatcttctagtcctaagtgttatatttaagagagctacgtattacagtgggccttattcaaggttagttttgtcaaatgttgcagaagaattccagtaattaaagtaagtcattaattctttatgcttcagtttcctatctctaaattagcaataagctcccatgttcaacttcagccacattcaatttttaagaatcttcagaagaaaaaatgtttcacatatagttaacaagaatgttgcttgataaagagttggggctgagctcaaaataaatcctggtataacctccttctggttgctctggaaaggacactgatacataaggaagtaacaaagatgcaaagcagggaagaaataacagcttgaagtgaagaaatgacacagaccccccacatacacactttaaaaactttatttatataaaaaactcatttgtttttaaaagcattaacaagacagaaagaaaagagaaaaggtatggagcagaacacaagccccttagtagtgttcggtgggaaggtgggattttgggttctctggaattgaatgtttagtgttttttataaacaaaagagagaaaaaaaagttaaaggtccccaaaagcccacggctgttctattacccacaccccaccgagaaaaaagagcaccaggaaaagagcag

SEQ ID NO: 157739 - DNA, 1000 bp, Homo Sapiens
tttatatacgaattaaaatttatttcaaactgttttgtacatctttttaaaaaatgaaaattcaaaagtcttagaattaagcaatgagtctttgatatcataaagctgtgtataacaataattaaagtagtggtaacattttacccttgtaaaaatgtcacagaattaaaatctcaacttggatcctcaatgattcaactggtttatcttacacaataagcgtttggtcagtttcaagataaaatttccccagacatgctgtccttaagtccttcctcctcaccatccatcagctcacacattggggtagctggctgctgtggcgattccacagtggttgttcttgtctttggctatttttacatagccattcgagccccattctggaccccagctgtttttgacgagccaatacttgctgttattcgaatttgctccttcaaagccgtagccaaccaccagaacaccatgatccaggtttttgctgctgcagtctggttcaaaataaatgcctgatttgtagaactggaaggacgaatggcctgcatccatagcaacggagatgggccccacagttgcgactgctttcatcagggccttctcctttccaggtgcgaccactgtgaagccagtgtcattagcaacagaattctcaggtctgtacttacagatttcatccactgctacatatggataggattcctcagagtccaggcctccgttctccttgacatactggaaggccctagccatgaagccaccattgcagccctgattgccttgaggacgcgaacagtccaccagattctgctcgctcagtgagacaagtttcccagttttccggaacatctgtccttcaagagcaccagtcgcactaaaagcccaacaagaaccacactgtttctgattcttcactggcgtcacgtagcctttctttctccaatccacagatttgggaagatcaagaaacagaggctcacggaacactttccccttcctg

SEQ ID NO: 157740 - DNA, 1000 bp, Homo Sapiens
ttttttttttttttttttttttaagaataaatcaccttcacaaaactaagacaaactttttcaaagctcagcttgatttgctggaactacacagagacatgtttgatcacacaacagcaactgtacatcctcccaagtctggaatacagaattgatggaggacacttaacttgcttaaaatgtatttgattattctgcatttatgataaaaaatatcatccagggattatattcaagagggtaaatttaggattacatgtttctagaacatataatatgtaacaccatccaaaaacaacaacaacataaagcactggaaccaaagaaccacttaaaatttagaataaattaggaaatttcaatctataagtgtcaaacaacaaatgagttataatatttttctaataagaaaaatatcacctgggaactatgagatactacatccttgatctggctggccaccattttgaagaccaccacagatctcaaggcatgagactactcaccaacaaaatctatccctgctattgcacctagtgtcatctcaatatgtggctgacagcaaatgttctaacttaatctgatagatgctcctttagcatataaaagagcttgctaagtccctattacctgtagcagtctatcaactaaatatttaagaagtcatttcatagacaaggtttatgaatgacttagaagtaaaattagtaatttctaaaccactgtagtgttttctatgtttttagagatattccaaacacagagttttcaaaggagctgtaaaaccaagtacaaacatacgtaagtaattttgtcatggatatttctgtactaatttgggggagactggtgggccataaataaatgaaatacacatcctaaaaataatggtaaaaatgatcaagtaccactttcagatggttattcaagtatcaacttggtatgcaagtaagttcacccatgtcttcacctatgatttcatattcaaagcgctacatct

SEQ ID NO: 157741 - DNA, 699 bp, Homo Sapiens
ttttttttttttttgaggagtggcatggagttctttaatttggaaagcaaaaggttacatttaatgaaaggcagaggctggattaataaatgtttgttagaaagttgttctgacacacagtgaactctgggcttttctcctgtcataaaaagcagagctagcagtaagtgtcaaatctgaagaaaatccatgtgtccaataagctgccatctccagaactcttatccaggaaattcaaagagtgaacattcttttagtctcctactcctcaattaagtaaatgagaatgattcagccaacaaagttcatgacaacaaggtgcaggatggtgctggcaaagagaaaatcagcaaaggctcgctctggggagatgccttggaaatccgctttgttctgtgggttgatctgtattctcaggcaaaccgctaggatgaaactccccacacaagagatgaagcccgagagaaaagagttgaaggggaaggtccccacgaggagacagtaaccgaactgcagcgccccggtcagcagtatatacagcaggtacgcgtccagcaacttcagacgctgcggagtggagctcaagtactcttctaagaaccgcgaaatgacagacactaccgacgccgacataactgcacgcaaggtactccggtccgcgccccaaactcttggaggacccgtcgaccacaccggatg

SEQ ID NO: 157742 - DNA, 1000 bp, Homo Sapiens
ttttttttttattttaataaaatcagaatatgcacagcacatgcagtgctagcatctaaactaatacaataagcaattactaaagctacagtgacttgaggttcaatctttacattcagcaagtttaaatccttacatgatttttgaaaccttattaactgaaaatattgcttgctgataaaacttgctcaaatgctattgctgaatgtacaagtcactgattatgccaatacaacaaagataaccacatgtttgaggattgcaatgtgccagacattcactgaaaaaaaaaaaaacacacaactaaacaaaatccacacaacaaacatctgagaatctggacacttcacatcagtgttttgaagtgtttcattaatatcttaagacaagtgtatcaaaaccttggcataatttaatttcaagtcgccaattttgtttttactaacatcagaaagttatggctacactgccaacgccgggtctgcttaatttgacttaagagtttaatatgacttaaacattaaaagctcacactaccccgaaatatataatttcacgcatacggtgacattcaacattcaagtgccagtgtttttgtactgtcttttggtcaagtttctttaaactttcaaagaatcacttttaggcttacaaaaataaatatttgtcaaaatgttcaataaatattacataaagctagcagcaaaaagtatctagaaatctgtcgtgtgcaaatagttttcttcccaactatcattcccatggtcccaaataaattttagaatctagtcccatccccttcctagacaagctgcgttcaacaatctccaagagacaaagtaagattggaagtttaaggacacgcacacaagacatatatataaaattctctgaatgtgcaataaaagaagtactttgtaaaaagttatgggcaaaatgtacaagggcctaaacctagactaattgaaatagcaccataacaaatgacctcaatactgtc

SEQ ID NO: 157743 - DNA, 1000 bp, Homo Sapiens
cggtgtaatactttattttctattgtattaaacgaaagccaggaaaataccaagttatttaaaggcaaatctttactccttaaagaaaaatacaaactgtggtatttttaaaagaagatcgttatattttacataaaataaacaaaatcactaatgcatctatatgcttggtttccttaaactacaatgaaccacagaatgggtgaaaatgcatttactttttggtggcaaataaacatactggaaaaaacacgtaacacatagcatgcctttttttccttactgtctacacacagaactgacataaccaagttttatagccgccacctcctcttcaatgtccaagtagccagttccataggcccccctaccacctcctcgctggaatcccccagatcctctgtagcctccactaggccctctgtagtctcctccagagttgcctctaaagccacctcgggaaactcctctatagcctccaccaacacctgcacatatcctgcccgaaggagttgcgctgccaccatagcctccgctaccatagcctccactgctatatccaccgccatagcctccaccactgtaactagaacctccccttctatatccgcttccattgtcgtatcgggccatcttgggaggacgtggaccatctccataccgtgtactgccaatcataaggttgataccagcagctgagggctcagagatctgacggatcatgttcagcatacgttcatttacggggtccaactggctgatgatagcaggttgtttggttacttcaacaaccaaagcctccatggctgcccggagaccagtgatacaggcagcagcttcatgagatatttgcagtttaatccagtcatctacaagcacaatctgcccatcagattggactttcttggaggcaaagagaagcaactgcagggggggtactaaagtcatgcctttagcagagatggctcgagttcgaatcttttcaccaaatacaaagaag

SEQ ID NO: 157744 - DNA, 1000 bp, Homo Sapiens
ttttttttttttttttttttcaagtatctgtctcttcctttcactctctcaaaagaaaaaaataaataaattgcagaaggcggcagcatttccagtcttccctggctcccggacacccgacccccgacccctgccccaccctccctcccgcatttcccactccctagacccatccctcccttttccccaaaaaaattcccaggaaaaaaaaaaaaaaagccacatttagaccttccactcatgcaaaccggcaaagaaaaatggtgggggcatgtggaaggcaggggcccgctgcggagtcccctgcttctccccccaaaaaaccacctttgagaagaaaaaaagtggaaaaaataaatgagaaatcaaggtaacatggggaattacgatgaggcaggggtgaccccagaccctgccttaggagagagcggaggcctgtggccctgcatccctgcagcgggtgctcctcgagggggccctgacttctggaatgtgtgtgggagaggatgggggagggcaggtggcccccggtgggtctgtgtgtgcattgggggcaggtgggggcggggatcctaaggagcaagggctcggaacaaggagcccagctcccccccagaccccaggttcctggcgttcaggagcccagttctggggtgcggggatacatgcagaggagtgtcccccctccaacaggctggatccagttagaaaggaaataaataagaaggggtgggagggaggccggggggagccaagggcttgggcaattcagtccagaccaagggcccaggtgatggaggcagggcgagtccaggccaagccagggcaggaatcagagtctctctcgggctggaacccagatgtaggggcctgagaggtcctcgatgacacgcttcaccttgtggtagatctcctcaaagctgtcaccctccacgatggctgagaagcactctgtgaactcctgctccagcttggtggctctgtcgaaggctttgcgggc

SEQ ID NO: 157745 - DNA, 1000 bp, Homo Sapiens
gaagagtaaatcattttattaagaaacctgggcccacattccttcagctcagcctcaccttaggcacacctctccaagttccctagaggaattctacagaattgtgagtgctcatggtttcttaccgttctaagtgtctgtggtgacccttcacccacctgtccctctaggcagcctccaagcccagcttttttattttctcggtggctctgcaggatgctaaatctggagaagcaaggctactccagccagaacccacttggatgggttttccttagtcttcaggttgaaagtccacacgtaggtgggtccccgctgactagtcttgtacacaggacaggaatagacactgcggcagtcctgcttatctgcaggaatggccttgatgaacatcacaggcatagggggtgtcagatccttcagctttgcctctgtaatgatcccagcctgtgtgtcccagcaggcaccttccatgaagaggccatggatgtaggccccttcccgaggaggactcctaaactcttctctgttcttcttcgtcatgtcacattgcagggccatctggtccagtggccactcattcttgcgagccgtggactgcatgatggcagtcaggaacgactgggggttgaagaagcctgtcagccacacagtggagggcattgtaaagtcacccgtccaagcctctagctccttgattctgttgaggaggtctggaaaccaggctgccaggcctgctgtggaagggtaggctcgtctagcccaggactctggcaccatatcgaagtacagggcattctgtaagttctccatgtggctggtcatagtcagctccccctttaagccgagctccagctccctcagtgagcgctgaatctctctggtgaggatattcatccggccacactcctggaaggcaactacaatgtaaggggtgcgctcctccactttggccatcagttctgggatgttaaactcgtctgtcacccgctccaatatt

SEQ ID NO: 157746 - DNA, 1000 bp, Homo Sapiens
tttttttttttttttttttttttttttcctgaaacaaccacattttgctttattaggcgttccatggtaatataacacagagttcttaaggaataataaacacgagacttgttttttaccataattattttgccatcaagacagtggttacaaaaaaaaaagtactcttctggctacacactttatcagctttagaactgaaagttcctccactcatgggtcacaatcacaatttccaggattaaaaaccatctattcttaaatcctacactgttttagagcatcaagtcactgcagttattcagttctgagacactgtcgatttattttagcatttacatatgacattcatttaacagacacacaaagcaagccaacaggtaaacatgcttacacagcctgcagaaatcgtcaggttttaacttgttttttaagaaaacaaccaaaacaaccaaaaattaccatgacccggtacaggaaaaacaggaagactcaagtgaatactagagctgcaagtgtttcttagaattgaaacaaaaattgtttttttccaacttgttcaaatttcctctaagtgcaggtgagaaaaaaagcaaatatattaagtcaaccaattatttttttaaaagtgcaatttacctttaaaataacaaataaacaacaacaacaaaaaacccaaaaccccaaccagatccccaaaggcaaaatgtgtagagagacaagggtggtgatggaatgacctactttgtgatgtttttacgctttacaaaaagcagatttggtattcagaaaagcctgcaaatacaacattgcttaagagaacctgtaaacacgtttggaatacaatgcaacacaagtcagcaaggacaggggtaggtccaaaggagccagctagggggaaaggtgacagaaaaggagagggaaggatggagacagacatcacctgtggtctctaagggggccatgtgtttaatttataaggtttcctccccacaggagt

SEQ ID NO: 157747 - DNA, 1000 bp, Homo Sapiens
ttttttttttttttttttggtaatttcatagttattttaataaccaggtttacattaacagtcacgtgatgaacttttttctttaatgtcagctaaactcaaaacacagttttgttcacggttcaaaccaaacagctcttcacgttccagagctgcctcacagctagcacagatcacaggagattactgtctgtccatacccaccagacacagaactgaacacccacacaccagttttcaaagagggaacttacaatgaatgctggctgcccagggcagcccatgagtgtatctgggactcaagctggagttttccaggggagaaagcctgggaagcttgtggcaaggaagttgggaattgcccaccctactggaaagggcttctcagggatgagtgaaaatccaggctcaggtgtcagccctttgtggaaacatgacactctcagtatagacagtcgtgaagaacaaggctgagggattttgaagtaaacccattttcaggatgactacaatccttccacttctagaaaacttagaagtacaagaaatagctctactacgggtaactgatttaacaatttcccaaacaccctttccactacccaagcccgtggccctcagagagaaccgggatggattgccatctgggttcagaggcaatatgaggaggttggggggatggcaggggcatcctcagggttggggggcaggccaagggatgagatggcaaaggacagctttggaatcagatagacgatccagcgtgccttcctacacttgcatgaggtgccagtgaattcgaagagggccgggactcaccattgttttcttttcctaaaccttttgtataggcctgtttgatgtgtcttatgaaacgaaacaaatctgaatataaattttaaaatagtgggagttattctcgcaattcccagggatttctatgcttggagagttagtaatggtaagtgaagaaagagaggcttcctgagctcatgttgtt

SEQ ID NO: 157748 - DNA, 1000 bp, Homo Sapiens
gaacaggaaccgttttcaatcctttatttcagaaaggagagccaggagaactggggacttagaaaatacagatcctaaactcaaaagtccctgccccaggcgtgcagagccagggtcctggggttttgtgctgggcaggggctgccctgggagggggaatacagggggaggcactttaggacaccccttaggctgtggagggtgtcagctgggcctttgaagccactaaccactggttcccatcatggagagccctgtgtggggcacccaagggggtttcctcctggaagggcccccaacccaagtgtcagagaagctggcaagagctgagggagtgaggtgccatgacagcagccacagcctccagggacccaaacaggcccagctaccagcctggcactgagcatgccatctgctttaggccctggctggcgggcatgtgggcaacttgctccctcagtgcagggggctgggaggcacagatgcaggctcagcactacaaactcaaaacccccatgagagggctcagtcttatgggaaatgcctccaaccgagcccctttgccccaacacactcttcgtctgcctactgaagaaacttctgtaaatagcagagacttgagggaccccttcctggggtacgtgtatttgtatttttctgtttgggtgtttgtgtgtcccagtgggaccacctccccagggagacgaggcaggtgggcgggaggcccggcaggcgccgttacttcttcacgatctggatgacgtcctcatgctccatggtgtgggtcaggcccacccgctgcggactgtacttggtgctggtgccccacaccagggcgtacttgaactggctggcgagtgaccggtggatgcggtggcacacgtgctccactgaggcccctttccggagaatgatggcgtctgtgaagtctggcctctgtcctctcttcttggtgtagatgcaggtcagggccaagtactcccaaagcatctccagcaga

SEQ ID NO: 157749 - DNA, 1000 bp, Homo Sapiens
ggtggccaagcgggctgagcaatgccctggaggctggatgggggtctcgtcctcagccccttcccctcctccgtcttggctctctccgcttcgtccttaccagacttcgcacttgtgaggcgggttcatgggtgagccaggtgggcagcggaagtgttctgagaactccttggaattggagagggagccgatgacccggaagcgagaggggctgtggggatcggtgatgaggccttcgtgggagctctcaggtgtgcggacggagcaccagacctgtgcaaagcccaggaagaagagctggttattggtgaggcccagggtggggagcgagtgctcagccccgttcttcttcacccagttctggtaagcccgataggccgccttgagacccccgttgtcggcgatgttctcccccagggtgtgccgcccgttcaccggctccccgttcacgctgtagttgctgtactgctctaccatgcactcggtctgacgcttgaaggcctccacggatgagttcttccaccatggccggaggttcccgtccttgtcatactcccgtccttgatcatcaaaagcatgagtcagctcatggcccacgacgacacctatgccaccaaagtttaaggccttgggtgaggagcgtgtgtagaatggtgcctgcaggatcccggccggaaacacaatctcattcttggtgggcgagtagtaggcgttcaccatgggcggggtcatgctccactgatctctgttgggggctttcctgagctgatcggcagtgaccctccatgagaagttgaaaaaccgcatggcattttcaaagtagaggtctggaactgcagtgtagtcattaaacactttgtccagctccttgggatccatgatgaagttggggtatcctatcatgttgtagatggcatcggccttttccttggctgattttcgggtttcctcatccatccacttcagggtgctcaggctttcctcaaatgccttcttaatc

SEQ ID NO: 157750 - DNA, 1000 bp, Homo Sapiens
ttttttttttttttttttttttttttttttttttttttttttttttttttttttttttttttttttttttttttttttttttttttttttttttctcatttaacttttttaatgggtctcaaaattctgtgacaaatttttggtcaagttgtttccattaaaaagtactgattttaaaaactaataacttaaaactgccacacgcaaaaaagaaaaccaaagtggtccacaaaacattctcctttccttctgaaggttttacgatgcattgttatcattaaccagtcttttactactaaacttaaatggccaattgaaacaaacagttctgagaccgttcttccaccactgattaagagtggggtggcaggtattagggataatattcatttagccttctgagctttctgggcagacttggtgaccttgccagctccagcagccttcttgtccactgctttgatgacacccaccgcaactgtctgtctcatatcacgaacagcaaagcgacccaaaggtggatagtctgagaagctctcaacacacatgggcttgccaggaaccatatcaacaatggcagcatcaccagacttcaagaatttagggccatcttccagctttttaccagaacggcgatcaatcttttccttcagctcagcaaacttgcatgcaatgtgagccgtgtggcaatccaatacaggggcatagccggcgcttatttggcctggatggttcaggataatcacctgagcagtgaagccagctgcttccattggtgggtcatttttgctgtcaccagcaacgttgccacgacgaacatccttgacagacacattcttgacattgaagcccacattgtccccaggaagagcttcactcaaagcttcatggtgcatttcgacagattttacttccgttgtaacgttgactggagcaaaggtgaccaccataccgggtttgagaacaccagtctccactcggccaacaggaacagtaccaa

SEQ ID NO: 157751 - DNA, 1000 bp, Homo Sapiens
ttttgttttctatagaagtttattcccaaaacagagcgcggcttcacggaacaatttacacagacaggaaagagggccgctgggctggaggaggggaaccccagagaggggcatctacgaaacctaggacatagtaaagacaccctcccacccccagcaggccactcagcccttcaagagctggggtccttctcggtaaggagagtttgggtcctggctggtgggatttagctccagtcagggaagtagaatttctaatctcccaggaagctgcttcccaagagtatgcatggggtggtgggtgaggaggtgtctgcacagaccaccccccagccctgcacagccactctcccccgtggttagaggacgcctactctcaaggtcttctggatctgctgttaaacgggactcaaggctgaccttcggcctgggagacctgggggttagaaaacccctcaagatggccaggtcagggtcctcacaggtgggtcctccaagtccctctcccactttccctacctttcacttggaaacaaaggaaaaaaaattatctactgtaaacaaagtgtaaaactcaaagttttgagttgtaaacaaagtaaaaacattttttgaatctggacttgtaaacagtaacaaaattttaaagtcttcagttctggacagcagacaaaatagcaaaagtaagagttttgtgaacagggtcgtaacagtcatttttccctttttaagggaataaaggaggagtggaacggagtcacttcctgcagcccaggtgcctagggccacggaggatcctgtaaacataggaggcagtggcacctacattctgggtcttgaattcccttgtttctgctccctttgctcaccttcccaccctacccttcggaatcaattcaagcagggggcagtgtcagggaatcaaatggcaccacagacaacttttgcttgctgcaggggcaggtgaatgacccctccaccgaccctctgcaggaatgtc

SEQ ID NO: 157752 - DNA, 1000 bp, Homo Sapiens
gaggtggagtctcgctctgtcacccaggttggagtgcagtgacgcaatctgagctcactgcaacctccgcctcctgggttcaagcgattcttctgcctcagcctcccgagtagctcggactacaagtgtgtgccaccatgcccagctaatttttgtatttttagtagacatggggtttcaccatattggccaggctggtcacgaactcttgaccttgtgatcagcccaccttggcctctcaaagtgctaggattataggcatgagccaccgcacccgaccctcttaaattcttaaataggtacatcggatcctgtcactccccttacatcaaaccatccaacagcttcccattgccctgagaataaaacccaaaaccctatgtggggcccacaaggccctgggtgatccagcccctgactatccccagcctcatctcctcacacttgatctgggtcacacttaccagttttctggtccttccaataaaacaagcctgctcccaccccagggcctctgcctttgcttcccaaagctcttcccgtagctggttcttctcaggcgttctcagtctagcttctttgaatgcccagctgacttcaccccatcgtccctcactgccacatcctctggaggcctcacagtgcttctccctctctgaagccatcttacttgtgtgtgcacatgtgcatgtgttcatgtgtgtatgcgtgtggggtgtgtgcatgtgcactgattgtctcccttcaccagaacctaagtcccatgagatcagggaacctcgtctcttggttcctgctttgccccacgcctatgacagtgcctgacagagtaggtactcgataaatagctgctgaatgcagaacaaaggaggccccatctgggcaaccctgggggaagggggccagtggtctccaagtagacagtgtccaggggcccccaggtggagggaccccaagtccagggcggccctatcaggtgacccagctgctgtggatgaga

SEQ ID NO: 157753 - DNA, 1000 bp, Homo Sapiens
gtgtggttcatagagtttatttgaaaagatgctgaatttattcccaagtataattttaaaaagctgtttaggacccaaacatatttaaacatctcttacacatacagaatttcagtttacaaatattccagaaggcattttcttaagcagtgaaccatgcagaatactgttgctaaacatcgtttctgccttcctcgtgttctcttggtagtttttactgtttggcttgatcctgctgaggaatgtgcttaccactggaagccagatgcagattcggcaagtgtttcttgcctcttacaaggcaccgcgtgtaacgtcctgaccagctgttggtcatttgtggcagaggggtgtggctgcttttcgcctgcatctcgcgtgccccaggcagatcagtctggagtgcaggggaggatgaagacaggtggacttgggctcatctttcatcagttaagtagccaattatctaacttgtatttctggaaactgaaaaggaaagtttctagaaaccgtaagaacaatttaagttgggatttagaatagctgacacatttttagatgggactgaaatgagtaagaaaggttctccaagatgtatgattttaagtccttactccataaatcttcattaaacacatctcagttttggcctgactcactggggtgtcaagcagctactcaccctgcctcaactacgtaagctgcaccttggcaggaaagggctcacaggttacagatagagcttgatgagctcatcgctgactgctgagggtgtcagcacgcccaggtctgtaaacagcagagtgattaaggaaggggcagtgtagtcgacccacggatgctcctctttgaggtcttgtccagtctgcgcgaccttgagagtgtctgccttatacttaaacttatctgggacgtcttgctggtttagtggaaagagccggacaaacttgaaactttctgcaaccacatagaaaggtttgttctgtgctttggcacacac

SEQ ID NO: 157754 - DNA, 1000 bp, Homo Sapiens
ttttttttttttttttttttttttttttgctttctaacatcttttacttcttgaccttttgaaacatccaaaaattagtagtagtataatctatgtcacaatcataatataacagttaagaaaaaacataaaatgaaggcctaaaaagatctttgttactcatctagaattatttggtataacagtattttcccatggaggaagacttggatttcaggcattaaacaacgcagaaaaaaatctcaaggcatcacagggagagggagataacttttgactctggtttcccgtgtttcaggccaggaagagcaaggggagaaaaatatttgtccatgggaacaagtaatcatgctctaaaggacaatttcattcgaatccattcatttccttttcatgcaaaatttcaaagataaagcaacataaaatatggggccacataaaagggagaaggtcttcaaggagaatttgtgcctttaagtttttactggtacaacagtctttcagcctggaggtactcaaagacgaatcatgaaaaagaaaaaaaactttatttcaaacaggttcagtgatatatgtgtgtgctacagcaaaggctggttgtggcaaagtttcatttcaaactgtatgatgtgggctgggcaaggtggctcacgcctgtaatcccagcactttgtgaggccgaggtgggctgatcaccctgaggtcaggagagaccggcctagccaacatgctgaaaccccgtctctactaataatacaaaaattagccaagtgtggtggcgcgcacctgtaatctcagctactcgggaggctgaggcaggagaatcgcttgaacccggggggcagaggttgcagatcacgccactgcactccagcctgggtgacagagccagactcaaaaacaaaacaaaattaaacaaacaaaaaaacagaactgcatgatgtataattttgacattatgtgggaatgtttaacttctgccaaaatgtagattcaatcc

SEQ ID NO: 157755 - DNA, 1000 bp, Homo Sapiens
ccttcttttgcctcaaaaagtgacatttattcaaagaaaaaaaatgacaagatgtccatcccttggctcccttccctcccccctcctgctgctcctcagcccccagagattgagccctggctggggctgggtggcaggacagcccctcagatgaggtcagcaacattgaggggcatttcctcaatggaggtgttgtagaaggtctcaatgtctcgaagagtcctcttgtcttcttctgtcaccatgttaatagccacacctttacggccaaaccgtccacctcgaccgattctgtggatatagttttccctgttggtgggaaggtcatagttgatgactaaagaaacctgctgcacatcaatgcctctggccagcaggtcagtggtaatcaaaactctgctagagccagaacgaaactccctcataatcacgtctcgttccttttggtccatatctccatgcatggcggatacagtgaaatctcgagcatgcatcttctcggtgagccagtccaccttcctccgggtgttgatgaagatgactgcctgggtgatggtcagggtttcatacaagtcacatagtgtgtccagcttccactcctctcgttccacgttgatgtagaactggcggataccctccagggtcaactcttccttcttgacaagaatccgaatggggtccctcatgaacttcttggtcacctcaagcacatcagaaggcattgtggctgacagcaaaactacctgggtgttgctgttgagcttttggaatatgtcatagatctggtccttgaatccacggcttaacatttcgtcagcttcatccagtacaaacatcttgatgtatttgggggacaggtatctccggttaagcatatcaaacacacggccaggggtacccacgatgatgtggggagcttccatctgcagtttctgcacctcagcacgcacgttggtgcccccgatacaggcgtgacaggaggcgcccatgtagtctccta

SEQ ID NO: 157756 - DNA, 1000 bp, Homo Sapiens
ttttttttttttttttttcgcaatgatcccacttcatttattaccaaaatatcacagaattccagtcatagttaacatacagcgtttaacacgaacctgatacctgtagaaagaactgagtatcgggacaattgagtcgttggaactgtaagccacgccccaaaccgcatcactccgtacttcaaaaatacgattttttgagagctttggaaactgaattaaaatgtctacacagctatgaacaattgtttaataaaactttttcatgtttccattacatgtaaatatatcaatttggcatctctataaaaactctgaaaatggtgcaaaagtttcattctctttgagaaagccattgacaaaaaatattcacacttcactaaaattttgaaaaatggtcttctttcaaagcttctttattaatctgaagtcttctgggttatcaaaatctaggtttgctttttcctcctaaaacactaaagaacatttattcacaaggattaaaaaaaaaaaataaaaaggcaatgggctgatggaaaactgataagggcttttctttttttttttctgaaaataatttaaaaagcttaaaagttacataggcatcttcaaaagaacacaatgggattcattttattgttgacttttggacaccagtgtcagactttattgaaaacaaacccatgtaaaaacaaagttaaaatgaaaaatggcacctgaaaaataaattattttatataaaacaaatcaataacttaaaacacactaatatacaaaaggtctaaccatctactgtacaacatgggaatcggttaagagagcctcccctcccccaaagcaagtcactgtaaacggaacatcacatggtcatggtcaaagaggtggccccaaaccaacggaaaaggcttctcttctggtggaagaaaaatccagtcctgtcaaagtctccgttagcctaacttaggtactggcggtgacttacaagtgagaaaaaaaaaat

SEQ ID NO: 157757 - DNA, 1000 bp, Homo Sapiens
gaattccttttttttttttttttggtcataataaactgattttattagaaaaaggcactttaatgccaactgctggaaacacgcatagtaaatacatttgcacaaccaaacacagtgccctccagggggcagggagaaagaagagtaggagagggtgatagttgttggcttaacaaagaagagaagagcgagagcgcggccaggggaggtagttaggtcaagtggatggttctgtaccaaggacacagcaaaggtcctcaggcactgattcacattacccaaagtcaccagatattagagttgtttccgtggctgacatttcttagccttgccctcaaacttggcaggagggaggcaagctcgtttaaagaagggagaggggaggagatccaggcaattggcctaggggttggttttgagagagaataggttgacccttcctcggaaagagggaagggggaagcagggagccacgaagagagagaggtgccacgggaactcctggctgccgactcccgtcttcttggtgaaggagtcagggttaggtgtgaaagtgggagatgaggggcattggtacacccaaggaggtcttctgcagtcatcacagaggcaggctggtccgccttcgaggtgagttgcagtcaggctgagcagcagaaaccatgtggtaggtgcccatgcttgagcaggaatgggggtggaccccatctaggtcgctgccggactagccccagtgatgcctgacagtggaaaatgtcacctactaatcaagagggagcccaggatcggggaagtagactggggtgtcatcacagcctattgtctgtcggggggccggtatcacacaaacagcccaagccctaggcacaaatactcaatgaattcagctctgggggctttgtggctagctctgaggctggagggcacttcatccccgtctaaatcctacagcaaagcactgtggggtggcccaagattccagcctgactgcaaggtgact

SEQ ID NO: 157758 - DNA, 1000 bp, Homo Sapiens
ttttttttttttgaagggaatcagaatctgtttttatatccctagagttataaacatttgtatcaaaatatttacaattatagtatatgaaataatctattaacgaagaagcccaatacagtactagaacaatccaccagagtaatgcaaattacatgagacataaatgtcacagaaaaaaagtaaaagataagggaatacatggtttactccagtcatagttcaacttcttaacaaaatgtgagtattccctttggatatgtctgaaatgtaagtatgttttttgcactaagacagccttctataatcatgtgataatgaaatcataatgacaaagttcatcttcccacagtttttgctggccaatctctctaacctcagcctaggtaatttggtggcttgccctcaacatttccttaactagaataaacatagagaaatagaattagtaataatccttttacataaataccaaaaatcatggcataacaactccccaaaaaggaaaggtataaaagaaatggatgaggagaaagctaataaagaaaagtaggcaagatgtctcagattctccctggggtagatcttctcagggcgataaagaaaacgtcttcccaaaaaacccctttagacagaatctgagatggcttaaaatagctgctccagggcaaagcaatgcctgcttaaccaggaataacatactacttctaagtcctgtatagaggtgctcctgcggcagcagacagctcgtctaccatctgactaggtaccacaagagtttttgcttttttattttaaagaaaagatctgcccatcacctatatttttatttatctcatgggattttcgtattttcctgggaatgcaggcactctgttcttatcatggctgaaatacggtaggcttaatacttcacaattatatagcacctttcacccaagggcctgttgtttggttttggtttatgtgtgttttaatcagcttccagaattgccatgcc

SEQ ID NO: 157759 - DNA, 1000 bp, Homo Sapiens
tgaagcgttgcccagggagcgcattagaaatgcagattccctggccccatcccttgaagactctgattctgtaggtctggggtgaggggggggcgctgtaggttttgcctaaagacgagtctaaatctggcacgcaggttaaggatgaccattcctaaggcaagcaggtgacactgtcggcaaattgaggtgagactttttctgacccaccccaataccggagggatggctgggctctggtttggatacagacagaatgccagggactacacctgcttctcacttggaacttgggtgaaacctctcaggaagctgtcattcttctcctataccccacctcaccctcttccacccaccactagcagagagattcgggaggggcttgggccagctgaaacccataggaagcacgtccccagagacccggctttcccagcctctcctctcctcccatcacagccccatggttaagaaatgtcctgccgagtgcttttggatttgagcattgctggatttttgcttgtgtcttgttgagacttttgagtgggcagcagttctgaataccagccttcatagtctattctctgatctcaagaatgcaaaaactcttctctcttttggattttttttttttttttttttttttttttttttttttttttttttttggcttttaaaggaaacaatacgtttgctagaaaaacctcaaaaaataatgattatatacaaaatggttatctgaatgtggattctgtactgcagcagaagcaacccagctccggaactctatttgcgcttcctcagtatcaggtacatcatgccgctgatgaaggtgcaggcgaaggccacccacgccaggatgtaggagtagccgtagctgccttctctggtcacgggatagaatttcgcgtttttgtcgtgaatgtcttcacgcctgtctgtataaatggaggccgcaatcatgacacacagacatgacattagctggatgatggaggtt

SEQ ID NO: 157760 - DNA, 1000 bp, Homo Sapiens
ctcatgggtcactgaggctttttattttgagcacaaaaccaccggggatctagcctgtggccaccccggagatgacacgaggctcacatgactctagacacttggtggaaagtgaggcgagaaaaacaatgacttgggccaattacacgactgcaaagctagagctgccaacagggctccagggagcttggcttctgtagaagttctaaggaagcggtacgaactccacggcggtggggcgctaactagcagggacccctgcaagtgttggtcgggggcctcgagctgcctgagctgacacgaggggaggggtctgtgtagccaacaggtgaccgaagggcttgcctgcccacagcttacttggccaaggggtttctgaagttcctgccggcaaacttagccttgctgcccagctcctcttcaattctgaggagctggttgtacttggccaagcgctcagatcggcaaggggcaccagtcttgatctgcccagtgcacagccccacaaccaggtcagcgatgaaggtatcttcagtctcccccgaacgatgagacaccatgacgccccaaccattggcctgggccagcttgcacgcctgaagagactcggtcacggagccaatctggttgactttgagcaggaggcagttgcaggacttctcgttcacggccttggcgatcctctttgggttggtcactgtgagatcatcccccactacctggattcctgcactggctgtgaacttctgccaagctccccagtcatcctggtcaaagggatcttcgatagacaccactgggtagtccttgatgaaggacttgtacaggtcagccagctggtcaggcgagatgtacctgctggggtcatcgggagacttgaagtccaggtcatacttcccagacctgaagaactcggaggccgctacgtccatgccgatgaccaccttatcagtgtagccagctttcccaatagcagtcttcagcagctccaggccttctt

SEQ ID NO: 157761 - DNA, 1000 bp, Homo Sapiens
ttttttttttttttttttttagagaataaacaaactttattttataatagtattacaggaagcaaaatatcatttaatacaacttgaggctgctataaatctaatctggcatcgtaactatacatagggtcaaaggcaaaggaaaaaatgttcaatatagttaataagtccctatcgggtctctggtgccagctttaaatggtataactttcttgtaaccaacagaacaccaccacagccccctccccctctccccagcatcctcaaacctgtgtgaatcataaaactatctgaaagagataggcctgctcaataacaaaaggtaagttttacatgtgtagacaaagaggtttaatacaaagcaagagttctacccaagtgttcaaataatggaaagaattgaaatttgggtatgttaagaaagaaagcactaaggttttaagctgcctgaatcttttagtagagggaagaaagttttctctttctcttccctcctgttctggaatgctgccgaagggcatgtgtctgacaagcattggcactgtggtgcggcagggtctctaagcacagtgcacagtcagtgaacttcttcattattctccagtccagagattctgactctctactaaaagtagaaagtcacaggactggaaagtcaaaagggtcccaatataaaaaacatccctgtgaaattctcaaatattagaaaattttcaagatgtaagaaaggcttttaatctgtattaatattttctcatacagtatatttgctgcaatttgaaaactccgtaaatatttactgtgagaattcaatgaaaagaatccagaagaaggaaagccactatctaaattagtcacagagtttcctttctgcgcaacagcacctgttcaagtgaacagcaccttaccagcttgggctggctttgttcactgtcatttgatcaaagtgagtcattaaaagcaggtagttgcacacaaagtaaacagaaaacaaaaccaa

SEQ ID NO: 157762 - DNA, 619 bp, Homo Sapiens
ctaaatctaaaaaaagttatttaaccaacgtaaccatattgaataaaatcagcttgggagaaaattacttgcttgctaaatcagggaaaacaacaatatctttttgaacaatatatcccacagaatgttgtagagttcaatgcgaacttcagtccaggtcaacgtcccttggcttatgctctctcataaactctcgtggaagtgacgcctttcatgacgcattccaccaccagtttatcatcctctcgttttctctttatggtggttgattttccatcccatttctgcacatgtaccaggacacccccatctaaggttatggtgctcttgactttcctgtcatctgcagtgacttcgtcaaattcctggcccagtatgaaggaaatctcagtatttttaaaggtactttcagatttaatggtgatcacatccccattcacactgatgatcatgttaggtttggccatgccagccactttcctggtggcaaagcccactcctacttctttcatataatcatcaaagttttcactggagacaagtttccaggtacctacaaaagcatcacacattttgtgagttttctaggattattcttcaaggtgagaaggaagctgca

SEQ ID NO: 157763 - DNA, 584 bp, Homo Sapiens
tttttttttttttgtccttatatcagttttattggtgggtttgtagctccctgggccgggcctggctgcttaggccagtctcttgctcacgcgctcataggtcacgcctccgatggtggagacctccaccagcttgtcacccacgatctctgaggtctggtgatagttggggaaattcaccaccagcttcccgccctccatctgcacagtggccttgaacgtcttgccccccattgtctgtatgttgctttccttgccaacagtgaacttgttggtcatggtgtggcccccggagtagtgctgggaccaagtgaagtcctgcccatcctgctgcacctccgtgacgatcttgaagttgcgggccttttcgattacatcgctggagatcccaaggagcttcatgaactcatcataattcttctcactctccatctcgaacttgccggtgaaagccatgctgctgggaggctggaggccagagagcagagggatgaggagaatgggtggtgctgaggggtctgctatcccagcttataaactctcccagttgctgaggctcagcccctaagtcaccccacttcttc

SEQ ID NO: 157764 - DNA, 1000 bp, Homo Sapiens
tttttttttttttttttttttttcatatgctgctttatttctgtaaggatacactgaaacgttagatgataatagctaatgacagaatgtagaaatgaggcatcagcttctctaaccactcctacaagaatgttagtatgtattgtcattacatgtttacttttgatattgtctcattatactatgtcatataataatgtagaatacagtaagtaggtgatcctgcatttcaggtaagcggtaggtggaaatccagatttcctcttgaggaaaagtcctaggaatcacaacagaagggactttgcagtcctcattaacacatggacaaagagcagacaactactacgttacaagggattcaactagtcactgttgtgaaatgtcatatccatgttgatgacagccctggcgcctgctcaactccccctctagagttttgcggttacttccgtaggatgaatttcagcactgcaggaacatctgagggggctaaaatattttcatgcaagtttccaaacccataaactattttgctatcaattaaaacaaaaatattaattaaaaacaataaaaaggacagcagggttagttttgttaagcttccagaagtattcgttgtgacgatgttcctctgaaacaggctcgttttctcaggtctttctacacttcccaaatcacctgcatgttccatgctttaaagtaggaacgctcagaaaacatgccacacggggaaaccaaacgttagtacggggaaaggtcagtttagaattacagctaagttcaaatgttaattttctggaagttcgtgttagttatttgaaagcacaaaagaacagaaggaagggcagagttctgatgaggaagttaaaccatgcatgtcagtagggttcttttcctgctcacagaagagggtgagcagtgagttggagcagccgctgcaactcttgcatgtcgtgtgtctacacggtgggtcccagctgaggcatgagaggcatctcag

SEQ ID NO: 157765 - DNA, 1000 bp, Homo Sapiens
tctagttgatacaattttaaaggccatgtacaaatgttatacatttttatttttgttctttttttaggaaaaaatacacaaaaggcaaaacatcctcaaatggtccttttatacagtgcagaaggaaatttcaaatttcaaatacgtgtcacaaatgctgcactctagcagccaaaatacaaaaaaaaaaaaaggagggtagtccttcatattatatatatatttatataaaacatatggaaatttgtttttacacagatcggtctttgtttcaaatttacaatggatatctaaaaaaaattctacacggcaaatattgccaacaaagttacaccattaatactgataaacggaggagcctacgcggtgttttgattattagggaaagaaagtagaataaataaacaggagccttgctatagtttttaaaagtgccttaacctttctgcgtccccgcaatcctgaatccgcgcggtcaccgggccgtcctagtccctgcgtcgcgctgtgttcggctcgttctcggaccagaaagtttacagtagaggttgggagacagaaaaatacccactgaaaaagtctaaataaaattcaagacaaaacataacagaagaggctgaagcgaaggaagaggaggaacatggaaggggacggaggcggacgcccggacggccgcttgcttcgtggctcctttgactttctgtttaaagacggacagtggcttccgaaatgcaagttgttcgcacaaagatccacctgtggtccacggaggagacttcggaggtggggagggagatcgggagggagatctgagctcttgtcacttcccgctccctgcaaaagacggctctaaagggagacttgcgcattccaagacattctttcaaaaaaaaattaaaaattaaaaggttaatactcacccaaaaataaaagtatttgataatgattggtctcacatgttgcttttcttctaaaaattttcccccacttctgccattgg

SEQ ID NO: 157766 - DNA, 1000 bp, Homo Sapiens
ccccatccctcacccctcccagaaccaaagaagacaagcagcgccaccaaatggctccctctgcccaagtgaaagccgagaggtcagcggctggctggggaggcaggtgagcgcagcacggcacagggcaggggcagctgcagtgacaggcgggcggccagggcggcctgggccggggttgaggggaagagggcggggctgcttgggtagcggggcaggcttgggggctgccggctggcacgggccccagactcagggcaccacaacgcggtaggggctgcctgggatgtgctcgtgcccccatttgaccaccagtgtgtactcccccttgtccttgagcaggtaggacacgctgtagagccggctgcccacgtgcttcaccaggatctcctcgcagggggtccttgggccatgaacccccaccagcagcatgttgttgcctgctttgctgcagtctactgtgaagctgctcttctggcctacgtaggccttgctcagccccaggcccttggccaccaccttgctggcgtcagcaggcccaggacccggggccccatgctggggggcacaggtggccttggtcagagagtctacaaacactgatgatgtctcgtggaggctgtggttgctgacgagacgggggcctgtgactttggccttgaaggggctgcccccaatgtggtaggggccgccgtacttgatggagatgaggtagctgccaggtgccatgggggtataggtgacgcggtagccctcagggcactcctggcaatccatcttcaccttggaggggccgtcaatggtcaccgacagggcaccagctcccgcattgctcgtgttcacgacgaactcagctgggttccctgtgacaccgccttccagacctgctccgtaagcagacaccaagcctgggtcccctccatgcccaggctccccaactcggatcttgaaggggcttccagggatgtgggtaccgttgaacttgacgtcaatcaggtaa

SEQ ID NO: 157767 - DNA, 1000 bp, Homo Sapiens
tttttttttttacggagcaatgttttatttaataagttataagatacaatttacagtcgcgtttgattccagtttggttccggtcccagcttacaacacccgtggtcctttcacatcaggtccgggctgttccactttctgtagggtgggcttttacccccaacactcgccccagatactacacctgccacaagagtggccacttcctcaggactaagcagcaaaacctaaaggtctgcctgcccagaccacactacacatttgggctcaggcaacgtccctgacactttaacctcattccaaagccagctcaggtctgcaggaaggcaggcaaaattccctacacctcatttctggatttctgcaccacacagctctcactgtttctgccaatggtgaaaagaccaccaataagctgctgcccttctctcccccaaccattcccaactttcaggccaaagagccgcaggagtttcattctgtcctgtctgtacagatcattattttccagaaaaagtgacccatgaagttggctggggcgggtgtggagtgttatgtcatgggacggaccttgggatgagggcgttaatccatgggcccctctgagatcactttaaacattttggtaagactgcccaggctgatgaagggctggagcgtgtgttaaaaacaagggctagtgttggttaaaagggatctttggcaagtgggaaactgctcgccactgcagaatttcttcagaccaaggaagggactgaaacggacttggaaaactaaagcaaaaccatgactgccgggatggtctcgtgtggtgattctgcaagaaataatcaccagagcgaggggacaggtacttgagagacatgtgggcctggctgccactctgccctctgagtttctgtagggtgcccggctgccactctgccctctgagaagtgtaagaaggccacagagcatgggggtgttggcgatgaggagcggtaaagcagtgctagtgatc

SEQ ID NO: 157768 - DNA, 1000 bp, Homo Sapiens
ctgggttaagcattttcaatctttattatttgaaattattgtttcaaattttattacataccatggccctagtattttgtttaaaatatctttatttttctgtaaagaacaagtgtgccatatttagcttttgatagaaaaaattaagaaactatcataaagggaatagctaaaagaaaggttagtaaagggagccatcacaaggagagattttggaaaagggtggtgtcttagtccattttgtgtttctgtaacagaatatctgagactgggttatttataataaacagaaatttatttggcttagttgtagaggctaggaaattcaagaccaaggggccagcatctgatgagggccttcttgctgtgtccacccacggcaaaggtgaaggcagaagggaaaaagagtgtgtgaggaaaagagggagccaaacttgcttttataaccaacacactcctgagataatgggattaatcttttcatgagggcagagacttcacctaatcacctcattaggccccatctcccaatactattgcaagtttcaaacacataactttgggggacatattgaaactattgaaggtgataaccattgacattctttacaggagaagaacaaaaattgtaaactgcagttggaggaccaaggctgaacagaaggaatttgtccttgaagaatgggaaatttcatgggctactctctgaaagcaatttttatttttatttttgagagatctcaaactaatggtttctagatttaatgtacacaggaatcatctggggagcttatgaaaactgtggatttcagcagagatttccattcagtaggttgaattattactatgtttatattcaggaatcttcacttctataagctccctgagttattgtgatgtaggtggtctgtggctaatattttgaaacaaactactctagatggttttcctgggatagtttgatgttcaggatatatggaggcagaaggatagactgatg

SEQ ID NO: 157769 - DNA, 1000 bp, Homo Sapiens
ttttttttttttttttttttttttttttttttttcagtatcaaatctagttttaatcttctataacaagtcaccttttcttcccacctatatccaactgcgcctagtggtacagtgagaatgatggcctcctctctttccctggagtctgaggtattggcaacagcagtcacccactgctgagaggacttaggacccagcagaagtcaagggtcattagtgccctgcagctgcagggatagcctcacttcaggtggggatggggtaggatgcgggcaggacagggcctaggaaaagaagaagggtacaggagccttcctgactgcagaagtttcctgtttgtctgaaggcaggaaataggagctaacggagtctaaggccaaaggttatcttttaaatagagcataggatcagggagctgggacctcactagccactgataacttccagcgccacccgggtgacagaaaaggcgcagaaatggaaagtgaaaggttcagggctagccaggcaggcccctccttttctccccgcagagcgtgcagggggaaggccaccgtgggatggtgctccggaacctggactctcttcactcagccttcttggacactcggcccatcttggtgcggatgtttcgtaggaggaagaaggcagccgtgctggccgcacaaatcacttcagccacccagaaggctgtgctccaactgtagtgcttggcaatggtgctgaagggcagcccagccagaaagccgcccacattggccatgagtcccacaatggcgtgggaggtgccacacaagttgggaggggcactctcgttggctatgactccaaacagggcaatggggccatacgaggagaaaccaaatacagctcccaataccaggatccagagcttgggggagtcactggtcactgttacccggaagaggtacatggacactgtcatgccagccatcatgaacagcaacaggccatggcgagggttcccgtagttggac

SEQ ID NO: 157770 - DNA, 1000 bp, Homo Sapiens
aaaacaatacaaatagtataatccactttataagtttttaaacaaatatacttatgcatagagaaaatctggaaaaatatatgccagctataaagtggttcttgctcatgggataaattgtgggagactttttccctttttgcttctctgtgttgtgatttcctaaagacagggcagtggtgtccctagactgctctggaactgcaggacctaacagcctcactgtgtctgctcacccaagtctgacaggtggcagggcagtgtctgaggcccactgggatgcagacccaggaaagctggggtggggggcttctggtccccatctctgcagcctcattctctccccagctacacagacccagatggtcactgtcctggaccagatgaaggcaggcacctacaagctcaccttcgacactgagggctactagaggaagagggggcaggaaagcttctacccacatgtggaggtgagagccccagtgggctggagggggctgaggctcatgactcactgggatctgcaggccaggtcctgctggccgggcatcatttaggcagtgggcagactggtcctgggcggtggcaggtaggtgagctcacttgctttgagctcccaaaagaaaggtgtccaggcagcaatagactctacgaggacacacccgtcactcacctgcccagggtcaggctttgtggggaggctgggccaagggtgattcatcccctctttgttgacagaggttttcatctgagccaactccagctctctgggcctaacctcactgcctcaccccacactggagccgccgcagaagcgcctgacttactgggctgtggcttctgtggagtgtccctctggtgcggaaggttcaccccatcccagaccctcagtctgggctgctgaattctctcaggtgtgttggggccagataggtggtttgctgctatccccttatactctctcctggcctctccatctcaggttgttttaaccatcacc

SEQ ID NO: 157771 - DNA, 567 bp, Homo Sapiens
ggaggcttgtgttttattcaaggcttgtcagcctccctccttccccctgcgggtgaggtaggagggatagggtttggggagggaacaggggctaggaaggggcagactgcagctgccctttgtagacatattccagtgcagtggcaatggtgcgcatgtccagctcgatgctccgagcccagttctccacatccccaatttccttgagtgcctggttgaagttctccaccattccgatccactggcctgtctgcttggcaaattgggcagcctggacctgtagggtcttcacctcatggtccagctttctctggttcatgtaggcctgggccacacccacattgaggtgatccaccaaagcttctgtcaggcaggtcgctgcagtgatagcctctcgcctcctcttttcctgcagctccttgcgttcattctgcttggcctggtgttcttttaggaggcgggacagcatggtcacgtcgggctgggggctgggtacgccgggccccctccggctccggaagctggacgctcacctcggctccccggggccatgtcacgtgcccgctg

SEQ ID NO: 157772 - DNA, 1000 bp, Homo Sapiens
tttttttcaggtttcaaccgttttattgggaggttttgttttctgtgaaatacactagagggtggggaaggggacacattcactttgcaagataagggtttcccaccactaaaggaaaggcatggggcagggcacactggggtttgggtccgttttccacctccttctgcttggctcacttttcttttctctcagcaagtaccacagaacacaaagacaagaaacaaaacagcaaatcaacctccaacggggccatgcccaagccttccccactcccccaggctgggcaagggctgggagggggctggggcagctcactcgacagccctcaggccacacgggaaggctgcaggctcagaaagggtgggtcaaagttaataaattagaataaattagggggggaggaatgcaactttgtgctgggagggccccttctctccaacacgcgagagttggtgggggggaggtgggggcatctccaaaggccactacagtgggggtaagagcggtgggggcagaagtcaccttttcctccacgtcttcccaaacagagcagaagaattaggggtggggggaagagacacacacaaggagaggaaccctcttttcctaggataaggaagggccaagaaagaggatgctatccaaccccccatctcccaagccatcgctagggttaaggatttggtcagtggatcaatgaggtgggtgatgggaacgtggtgggggaagcagaggatgctggagccctcgaggagaacagacacaggctggggcagcaggggctgggggcggccacaatcactgctcagcttctccaaagacgtcgttctgtttgcgcttcatgttctcaaagtcaaaggccgtgccagccatgcgtttgtagatgtctttgatgtcgttgcaggttgtctcaaagtgtgtggtggcatcgtaggagcaggaacagaacacctggctctcacaaccatcatcaatgggctcatacaagtcactgata

SEQ ID NO: 157773 - DNA, 1000 bp, Homo Sapiens
tagtttccagaatttggctttattttgcagtacagaaatcatttggagccattttgagacagaagtagaggctctgtcaagtcaatactgcattgcagcttggtccactgaagaagccacgcctgagatacaaaagatgcactacacttgacccgctttatgttcgcttcctctccccttctctctcatcaactttattaggttaaaacaccacatacaggctttctccaaatgactccctatgtctggggtttggttagaattttatgcccacataaaccaaacttgtggctatgctatttgggccctgccataacatttgacataatacaaaatataaagtcatagggaaaacttccggatgctgtcccaaaccgtggaatattcaatttagaatctcctgaacctcaagaggacagatgacacacaacctgtatggatccagctcttgagcagcagcagcacatagctacactgattaaaagattaaaaaaactgtctcaagttgtctgtgtcggtatcccaatgtttgtttaacttcactagaaaaaaaaaaaagccagtttggttaaattgaacagaatgtggtaactgccaatgctgaatagccactccatgaaaacaagttaataattagaaaggtgaaggggagtatttactggcacagcgctcttcattctctccattttcattacaaaagcaggccttacaatattgatttcattatatgcattatttgccaaattttaaatgtgtcctaattacataataacatgtactgctgttagtcttccccatagatgtcattcttcttgcgcttcatttcctcaaagtcaaactctgatcctgtcatcctcttatagatgtttttaatgtcatcacacgttgtctcaaaatgagtggtggcatcatatgtgcgggaaataaagatctggctttctgttcccaagtcttttggtaccaggaggtcactgatgctaacaaatttctgttcaattgg

SEQ ID NO: 157774 - DNA, 1000 bp, Homo Sapiens
tttctgaatgaaagctaattccattcttttatttcctcataccacaaacatttcaatttatctgcctttttacaacctgatttacacaagcaaattgcaaacgaaaaccaggcattctttaatcatccaaaatgcatgtataaaatatagaacaaaccctagtatttaaacataaacagggttagctgaagcagctttattgcaatctcttcaagttagcatattacagtttaaatatttatgcctgtaaagatctgcataatctacaatacagagttatttcagaagcagttgacttaactagttgagaaaaaaaacaacaaacttcaacgcaaagctataataattatctgaaacttatttacaattaaacatttagggtcctgatttacaaaactcagtgcctttcatgatttattgatgagttttatagagaaagtaagcagtatgtagaatattccccaggtaaaatctggagtgaatggcttttagaggaaagtctatcagtatgcttaactaaaaactaaagagtgacaaaactgtatacagcagcaatcagaataacaggccacaagagaagaacgccatttttgacaatatcctttgtatgtataggaagaaaaatgattgccaccccccacccctgccgccaacttttttagttaaaaaaaaaaattgtccttaataatcactacatgtgaattctgggtaataatctcctttctttctatagagttgtgtttaaacttaattcctgcatcagcaaatttaaacaaagaaaagttcctttgataacagccatcagagttcaatgggtatttattcagaggggaaagcttggggcaaggtgaccaagtgattattccaattgcaaaagaaacatcatagataaggtgctagaaacccaagattacccttgaagcactttcaatggattcaagtgatttaatgtagacaacaaaggaaatgacaaaggaaaattaacgagagaaaatgtttt

SEQ ID NO: 157775 - DNA, 1000 bp, Homo Sapiens
tttttttttttttttttttttttttttgctagttcacagaaagaccatttttaatatgaaaagagaaaaacaatttgaaggccccacaatttgttgtgtaacaacataatttcaagtaaagtgaatgtgattaaaacatcttgatttcacaaagccattcagaggaggcttcgacaaacgcaaagcgacccaaaccctggagggtcacatcccggctgctacaaacctcggcggggcggccccgctcttgcggccgggacagcgcagcggcagcaggggccgcaggggacccgcagattggcacgccgctccccatccccgcagcgcgtctgcaccggagactctgcggggattgtagccggagggcgggccgggctccgaggcgctgctcaggcattggggtttgtcctcatgagctccacgtcggcgtgcaccatctccctcaccagctcatcgaaagcgacccggggcttccagttcagcttctgtttcgctttggtgcagtcgccctgcagaaagtccacttcagttggccggtagtacttgagatccacagtcacgtgaactttgccggtctctttacatctgcccacttcattttcattctttccttcccacacaatggtttttccaatgtgcaagaatgatttctcgacaaattcccggacactatggacctccccagtagctataacgaagtcctccggctcatcattctgcaacatcaaccacatagcctccacatagtccttggcatggccccaatctcgtttggcatccagatttcccaaactgaaacattccagttgtccaaggtaaatcttagctactgaccggctaatttttcgagtaacgaaattagctcctcttctgggactctcatgattgaagagaatgccgttcactgcaaagagattatacgcctcacggaagttcaccacaatccaataggcatagagttttgctgccccatagggtgaccggggatagaaaggggtgg

SEQ ID NO: 157776 - DNA, 423 bp, Homo Sapiens
cggagaacctcacactttattggaggatggcggggcggggcggggctctcgggctgcggtcagcagtgtccgtgccaggtgtcgcttcctgtgaagggaccactgggccgtggtcctgccctcccagggcatgctgtcgtccaggggagccagggcatcacttgggaggccatgggcagtctggactgggctgcctgctgcagtgtccagggcccttcctgggggcctaagggcattctggggatcctgggctgagctgagggctcgctttcctccagggtaccagccatgggaccagtgctgagcctctgagggtccaaggtgggcagtcagcagcagcaggagcaggaggcctcgcctggagctggccatggctgctcaaggaagagctgtggatgagatggctccttcaggcagctgcag

SEQ ID NO: 157777 - DNA, 1000 bp, Homo Sapiens
ttgagttttgaaaaatgttttattcaagaattacataatttcaaatatcttccaaaatacagtttcctagattgctacaaaagaaatttgataagaaatttaaatcattaaatatgtttcactagtatatacatacagaatgccaagcaatagtattcagccctggaatgcgtaccatgtcttttgtttttcctcatgaaaggctcaacccagcattttgtataggctatgtacaacaggcaaagttttgtattcaagaatttgacgttagctgcctcaatttatagctgtggtagtttgtccactggggtgtcaaatttgaagtctgtaggaaacagatctggggctcgaggatagatcagtctataggactgtctgattgtaacatcagcaacaccagcaatatctccaatttctttttgggtcctcttttcagctgatgcctgtgaggccatgtaaatagctgccgctgccacagagatggggctcctcccaggaaccaagtccagttccacagctttacgggctatatgtgtagctgccatctgtacttgtttaggaagacaaaggttggaacagaacctggacatgaagtccccagttgtaatcaaatccacactggtttctagcgctttcaaaataagtttaaaacaccgaccaatttctttcttagaaattcgtgatacggcacatatttctttaaatgtcctaggaaccccttcttgtctacaggcaatatagagacaagcagaagctatagcatcattagctcttcccttcaggctcttctgttcatatacttgcttgaataaattatttgttcgatcaactatatttcgaggtagattgattctgtctgccatggtagtgatttctttgaatgcattcatcattgcccgatcagaactgctcattgttctccgattctggtacttagaattgccaaattcgtcaaaacttgcagctcctgtgcccttgccaatcatggtagacaaatctc

SEQ ID NO: 157778 - DNA, 1000 bp, Homo Sapiens
ttgtatttttagtagtgacggggtttcaccatgttggccaggctggtctcgaactcctgacctcaagtgatctgcccacctcagcctcccaaagtgttgggattacaggtgtgagccacagcgcccagcctaatttcataagtattgataaattttcatcttacactgaatttacattcagacttaactttcttcttacactaaattaatgaattaacataaatcataaagattctatatttaattataaaaacataaaattatcacatcaatttaattcttataagtttatacatactgcataatgactttgaaaacagtataactcaaaataatagaaaacaaaattaattgaatgaagtactactgaatttcaggtatttctgtgacaacacaaatttaaaatttaataaaatattaccttttcttagcaaaaagtttcttaagtcagattatcctttcatgttttaaatgaagcttcttctaaagaagtccttttattcacagttgcaaatttctttttaacacatacaatgtatactacatgctggaatcaaacacctgaaggagctggaatcttatgaatacagccagggcaacagtgtagagaatcatgaacaaaaacatcacagtccacacagaaaacattttggcacacagcacaaacataaacatgttggtctttcaattccccctgacatccataacaaaatctttctccattatattcttctaggggaatttcttgaaaagcatccaaaggaaacaaatgatggtaagaccgtgccaagtggggagcagacaccaaagtaagaccacagattttacattcaacaggtagctcacagtactttgcccgacactgtgggcagaaatagcctcctaatgtaagccctggctcagtattgccatccaaatgcgccatgctgaaagagggttttgcatcctggtcagataaagaagcaatggtgtgctgaggaaatcccatacgaataagtga

SEQ ID NO: 157779 - DNA, 1000 bp, Homo Sapiens
actttgtccaaatatgtactgatatcagacaaaaagtaaatatctgcaaatatctgaggctgtctcaatttagacaataagaattttattcacatgactactgaagttaactgttgattcaaataagatgttctatgttgattaatgccattactccacaaatagtccctttttccaaagctacgttcaaatttcgtatggcatgcatttcacaatgaggacccggattcagggagtaggttagaaagcctatgatgagtcatgacaagctgactttgactaatagtcatcccattaaaaaaatgaaagccacaaacatggacagaaaccagtcatagaatattttaggatataatgcatagaatgattccctcaaacaaatcagtcctccagaagcacaggatgaaaaggatgtttgggaaatattttctgtaaggtcaccatattaaaaattatcctatacctatctttatttttttcagtcttcccaacaaagaatctgctatataatttctattaacagctctaaaagatggggaaaatattttatcctcaggcagacactttcagtttctttttcttggctttcagcactggaggcagagaaattttaaaggctgtctcgcacgtagtacaaatggggctgaaattgcagaatattgacaaacacacagaacagacataaccaatttcaatgagatttcgatgacagaagcaagcagccctgtagtcaacatgaactgggggtgggaggattaactgagatctctgatcttgatcgggaagaaacacccacagcaaatactgcagaagagaaggcatctgaggcaccttcaggtacagtcctcccgtgatgtcacaagcctgttggaggagccctgagtcggagtctaaaacacaggcatcaatcaaaatattctgtttctgtgctgcaaagatgacattcatgaagttcatatactgcaacgcactgtcttctgcagccttaatcaccaatatc

SEQ ID NO: 157780 - DNA, 1000 bp, Homo Sapiens
tttttttttttttttagtgtgtgaaaggcatggatggattttattgattaccctatatctacaatttgaggtaaaatagaagcaacacataaaagggcctatttctgctaccatgtcatataattctccattgtgaatattgtgataaagctactgaaaactatgccgtcacagagcctagtttcttgtagagctggtattttacaactcgcattgcttgtgaaatctcaacacatgtaagactctcctaggaaggcgcagaacgtcagaggttgcatccttagccccctgacccctcctcactccccgcgctggcacctcagggttacaagaagaactaggaaataatgccggccacggcgacccctggagagggggccggctagaacagcgttcctaagaatccgcgccacagcaggtcccgcgatgttggggccttagtgtcatcgagctagccccaatcctcaacccgatcttcaacttctggtacaccatgcattttatttggacgaaaagtaaaaagtgggagaggttctctctgtattcctctataattcacacgctgagatactgacctctgactgttaggtgatccagatggttttgcttttaattatgataaaaaaacataggaaccatgagagatagcttaggaaaaggtttagtcaaatatacagataggaactgttcactcagtcattaaggagagccgtgaacaaaggatcatttaaatgattttttttttttcaaatagaaaaactaaagaactgaactatcacaggaatttttcttcactgcagaagctgagatgttccagtaggagaagtaggagatatcttcacttgattggaaaataaacaccgtaactcaaggctctgctgagtacataaaaaatctggtgagattcattcctgtcattttccctgtcatttcccagcattgctgtaaaatcctgatagtacattcccaagtacaccagccattccagacccacagtcac

SEQ ID NO: 157781 - DNA, 1000 bp, Homo Sapiens
tctgttaagtaacaacagatcttcctgctttactaaatctattcttcccccaagccctcgagaagccctggcaggacccaggctggctactgagctctgggcgggggtaggggggtctggcctgctgcgggccaagttggggcaggacatacagcccattccatggggaggatgaggcccctgggggtcagtgaggcacggctctgcctcaaggccaccccctcctaaggacacagggtgaagccccctcggccacatccggggcagccatgccagagctgagacctcctacgagtggtactggggccttcccacgaagaggcctggggaggctctcgggcctccgtctgccctccctcctcgatggggggcctgatccagctctgacagggagcgccactgccctctggctctgtccacggggaactcccagcgccaggacactatgcaggctatgcccgcactgcctacagagctatgctcaggacgggtgggcgccggtctcagctgtcgggcactcagttcacctgccggcagccgcagggctcctgggcccacaactcaagtggccctggagcaggggtctgacccccatgctgctccaggcggtgcaggcagcggggaggggggtctggaggaggcaggggtgggggtgtctgcctcggacgaggcaggtatctggatgcagggccacagctggaggcagaggaccttcaaggagctgctgcctctcaagtgccagatcctcagctcccacggctgcgccggacacctgcagggctctggcttccactctggcagaggctgctggcgccgagtgctgctcaggaggggacggtgcggagggtgggctggagactccagagctggtcctgagtcacagggccagcacactcagccctccacacacttggaccagcagtggggctgccccaagcctgtttccttaatagtagcaacaccacactgccagccttggagggtccttggatgagtcgac

SEQ ID NO: 157782 - DNA, 1000 bp, Homo Sapiens
ccctcctgcaaggaatcaccagccaggctgagggacacggacagccagcccagctggggcctgccaggtgactcacaaggctgaaaagggagccgctccgctctgggtggttcagtcccagccaggggttgggatgtcctgcctgcggaggggccacagcccccatggggggcccctcgcagcggggcacaccgatccctattctgcaaggtgtatcccacaaggcccttcctcttggtggcacctgggcactcaaggagccaggagatcctgccgagatggctagagtctggaatgtgaggtgtgcacaggcggggcaaactctggagacccagagacaagaagcaccaactcccagtgtgatgaggccagttcccaaggggaaggcccagaagagcctgggggatgggcaggtcggggagcccctctttccagagttccagtacagtgggaaacgtgtcagtctgtgactctggccaaagcacccgtcccctgctgcaggaggctcggcagacccaaggccagggcacagtggggtctgccgagcaccaggcaggagtggtgtggcaggcggtggctgggagggaggggacgcccacaggggtcctagaggtggatccacttgttccagttgacctcgtgggggaacacacggcccagccggagggtacagtccaaggtgggctcatagaaagccatggggctctcgtccaggctggagggcacttccacctcttccaccacgggtgtagagaagagcgagacaggccttggctttctcagccagcgcttccggatgcagccgagggactccaggccctggagcaactccagcacggcgacgggctgcaggaccccctggtagtggcgcagcagggagctctcggggatgccaggcctggtcatgatgtggtacagcatggcctccatcatacccttgcatacaggaaggttcaggtggccatccacgacacgccacggccggccgatgaagcagaca

SEQ ID NO: 157783 - DNA, 1000 bp, Homo Sapiens
ttttttttttgacattcactcatttaaaaatatttattgagcatgtgcgatggaccaacacataatttatttggaagacgtctacacaactgtactatcccatgcagagtcccatcgcatacatcaccaccttagctcgcacgctgagccagggcagtgttccctacacgccactggcacagccctgtgcaatcctacgtcccacacgagtggatgagcgacggcagtaagggcaccactaacataggaggtggggacagtcactgtcacagggtacacgggctgatatgcgtgcgtcctaggagtgtagacctagacctagcttaggaacatggagctccgacccagccacgggtcggcactgtgggcaccacgggtgaacacctggaaacacagcctacttctagagggcagacactgggcagcgggggtggccacggcagctcctgccgagcccaagcgtgtttgtctgtgaaggaccctgacgtcacctgccaggctagggaggggtcaatgtggagtgaatgttcaccgactttcgcaggagtgtgcagaagccaggtgcaacttggtttgcttgtgttcatcacccctcaagatatgcacactgctttccaaataaagcatcaactgtcatctccagatggggaagactttttctccaactttttgagatgtggggtcttgtctggaagtgacagcccagctcagagccacagacatgtgccttctccacactgggtttctctgcaacacaactgaacccgtgaccacgtctcctgtatggacagggactgggtcgtccatcatgaacagcgtctgcttccagtgtgtggtggggtggaagggcccggtgctgagcacctgcggcggctgcccctcctgcaggctctggaagtggacgctaaaccaggccgtgaagccgtgcagggtccccgccttcctgatgtcgaagcgcagctcgcccctcagggtctctagatcagaaatttgcacggtt

SEQ ID NO: 157784 - DNA, 1000 bp, Homo Sapiens
tttttttttttttttcttttttttttttaggatttcaggcacctttattcatggcagatatttttggtcagggcagcctgcctttgaaatcgttccattacttgaggaggtcgactcctgcctaagtcacaactctcctacaaccgcaaccggccatatcatttccatttgccacttccgaggcttgagaacatcaccagggacgcaggtttcggatggtctggtcaatgctgcagtgtgtgtggggcattcgggggctccagcctgcatcacaacctactggcctgatcaaaggaggttctgtagttgggtaaccagagtggtgaattcattttatcacagaaggatctcactcctttatgttccccatgtaatttgtatacagcacaaattatttcttactttgatagatttgcaatataaacaccaagactggtgagatgagaaacttaaaaaaatcatgtttttcaaattttcaagtttttgtgtaaaagcactttgtggtgacaatcatatggatcaccttccaggtcatcagtattggcctctaggtttagcactcctggcactgcatttttgagtggccagagataaaggtattatccctgtcttctataatcaatgataacattgacactctgcaagaatttagataagaaacagtttaagtaaaatagtgttttttaaaaacttgagtctactacaagtcgttgatcatattctagccaagcaactggcatggacttaatatggtctcttttccttctctctttcttttcaagtcactagctcaaaggaaagactgattgagttttaaaatcctgccagattttttatggtaaccattgtagatgaaccacgtaggtagggtcctactgaagtattagaatctcatgcaaaactctaacaaacgcctcattacagaaggctattctgttattttctgtactgtaaaagttctgacacaagacagtggcagtggttacttttcatcgacttt

SEQ ID NO: 157785 - DNA, 1000 bp, Homo Sapiens
ggtgaaaaaaaaaaacggagtttatgtgcagggatagtcggggtagtggagagaggccatttagtagtgggggcttcgctcacccccgtaggcggccaggaagccaagaaggatgtgcagcggcggactggttccaagccccttcagaggcgcggggtcttagggggagggactggcttccgggcccaagtaggaggcagtccggctctcaggagtgctataaatggttaaagccccaggcaggcccagggctgggcctcccaaggccgcctggacatccagcaggagtggggccccgagcgtggggtccttccctgggcttggagaatttaaccccttgaccgccagctcaggctcaccccgctctggaaccaagggctgcatcaaggacagctccatgtccaagtccatcagggtccattctcgcccttggagactggggcccagcacatctagaggccctgcaggttccacactttcttgagggggctgaagcagcatcggaggcagcagactctctgggctcctgtccccgctttccaggcccagaggccccctgtcaggtatctccctgggatcccctggttcaggctgttgggcattcctgggcccctcggggctgaagctccctttcccttccaggatggcctgcaccacagccacaggcagtggcgggggggctcctgccatcactggagggagaaagcctggtcccctcaggggatggagagtcttctgggatgtcagagatgatggggcccctggccctgtgagggctaaggcccaaatttgtctctgggagaggctgtaagtagaaggcgactggatgaagtaggggtcctgcagaagggcaccaggtagagggcaggtgttgaacttggcaggtgttgggcatgagctcccctcatccagcatcagggacagctttctcttgcctcctgcattgctcggccccgcctgaagtggcccaaagagacactggatcagcttgccaatgacc

SEQ ID NO: 157786 - DNA, 1000 bp, Homo Sapiens
ttttttttttttttttttttttttttttttttttttttttttttttacaagacagagaaatctactttaatattcacatgtaaaagttacacatcacaagagatgggacagtagcttagcgtaacatagctatagtgaaaatcatttttataaaaaaataatctagatgcggtcatcagaatttttggtctgcttaagttaatgtttgaagatcgacttttatccctgcttgaaggatttgccattatgccttttttttctcccactgttgcctattaattctttggaggaaggaaagcagaaagtgttcatttccaagagtttgtcctttggtagcaagcagagaacatttttttcatttccatgatttaaataatctgtacagacatgaaacttagtgacattaagctttagtgtaaaatgaagagtaataagcaattttttttcactttgataaaacagcagatttcgtaaactccttaaggatccaagcatttcctcatcccatatgcaaaatcattcagaatccattttgacctcagttgaaaaacaaaaacaaacacttactctgtatatattacactataaaaccctgtacttaaaaactgataaggtgtattttcaacatgtatgcttcaaatacaaagatttcaatctacatttaaaaaaacacatttgaatggactcagaacaagtttaatttgtgattaaacatctcatgcaatcatgcaagaccactagctataactgttacttccgagtctatactgggcaaaacaaaagcaaattaagagccaggccaaacagaaaagacattcaagatatcaagagctctgtaattgagctgaaaaatgattttccaaaagaaatattcccatagattaaaaaaaaacacacacataatatttacaaaaaaatatttaattaaaaatatcttataattacagtatctattaaagcatatactttctcacacttatagaacatctctatatataca

SEQ ID NO: 157787 - DNA, 1000 bp, Homo Sapiens
ttttttttttttttttgtgataaaaagtattttatttgtttaatgatatgcatgcttttcttctgtaaatatataataaatttttgtagatagtcttgatgtgtgatctttattttgtatttctctgtgtaaaaccagtgaatataactaaagtgttagtggattggattaaaagaaacttattaggcaagaacaggtaatgtagttatccatgactacttttaaccatgcagactaataatattctggaggtttatagctcggcaccttcaccttttttcactggtatttcatgtaaggcatcaaccactgtaatttttgctgatgctgaagcctgtccttgggaattggatgcatggcactcatattctccagcatcttccttacttagaggagataccagcacccagccagttacttcatgcttttctgggccaccccgggtctgaatggccaggttgtcccggtcaccaggcaggagttctgtcctttgaactccatagtgacccctttttaccttgttccagatgaggacaggtgtcgggattccgatgacctcacagctcaagtacacctgggcaccagtgacattccagatgtccttggggggcgtcactatggaaggaccttgctcgcaggtgcccttgctgacctgggtgatggccttctccccgcggctctcggccctctggctggcggcgcgcagctggcagccgctcgggtaggtggtgccgtcgctgccgcacaccgggtagcggctcttgcacacgcacacgccgcttacacccggaccgccggctgctgccccggctttacccttccgcctcttgcggctcttcacgcactccatgcccggcgcgcagtaccccctgccggcgccgccacccccgcacggctcgccctcgccgcgggcgcacatagggcagcagccgcacgcgtcgcgggtctcgcccagcaggcagcccagcgggggcaggggcgggcaggaggccggctcgca

SEQ ID NO: 157788 - DNA, 1000 bp, Homo Sapiens
agttataattactttattaaccttttgatctttcaacatttagatagtctttcttaatatttccaggagagtacctcatttttatttgaaaaccattcagcacatttatcttatgtaacatgcagagcatatatctatctgtatttttaaaattttcctgttactcattgatacatagtacttaattacatgttattccatgtacactgaaaacaatataggaaatatatacatctaagacttatactttgtacagtctttcattaaataagaatacttacacatacattttcagatatttctaccttcctgtatgtgtttggaattgtatgtaggtagccactgaaagaatttgggccccttgggaggatggcagtggaagtccatgaagtaaagagcattctttaaaaagcagatttgattgcataccttttagttatttgagattctgagaattctgataaaccccaaagcagaaagattccttagtacccttggaagatgggaaaggtgagggaaatatttgaagcagggtcagaacatccactaagaacatagcacctcagtagagcttacattatagtgccagggtagagttattactgaatagcttaggatgatgaacattaaccttcctacaggagtagtagcagctgatttggtgaccatcattggtcaccttttagtgtaactgcaaactaagaacaattatggcttgacatatactccatgtagggaagtgatgggagaggcagcctctgtgtggtccatccttggaagcactgcatcgattttgctcccctctggttttaaggagatcttttagacatttccttgctaactgctttcagtaaattcttgatggccttcgattctggattcagacatctcttctcacccttctttttcattgtagcaatgatctcaacacgtggacaaaattggcttgcaggaataatttcaagtttttctaaagaccttggattaacaggttgattac

SEQ ID NO: 157789 - DNA, 1000 bp, Homo Sapiens
tttttttttttttcacacaacatatatttattcagaaaaaaatttgcaataaattataataaaaaagatgacacgaaatatagaatcccactagcagctttgcttagtgatcaagacgtttttgggaaatataacaaacaattacagaataagaaaacagtgaaagggagactaatgcaatgtcaccacatggatttgaaccatttcttccctaagacagcaggtgcagagtctttccctaccagctgaatccgaaatccttacttcagagcagctacaaattagtaccttagaggacttggcaattacaggttggggtgctggaatagccatggtagggaagcagatttcttctgtctgggtctacatcttgtctcctctacctagagattgtctaaaactctcaactctgtatatgttccaggatgagctgaaaaaaggtcgaggcagtacaccaacttagtgttttgatctgatgtagaaagagataggatactgcatacgtgcagcacagagcctccactaaccacacccttgatcacccaaagatcccaggtcagtgatatgctagaaaacaagcccaggaaaggtatttccctgtggtatgaccctaccccagtgtctatcatctgcctctttttgtgatcactttctggccttgcggagatgacaaacctgttctgctctcagtcttccattaactaagttcaacacctagcccctgacctatcatacctccagatctgtggcaccagtaacttgactcctattgctttaactctcaatcaggaaagggtttagccatattgcagaatacgtaccttcccccccacccccaccaagaaacaggagaaatcactggtggtgccttggatatgctagaaatgtcacagagtcaatgcccaggattgtacatacagcctgtacgttatgctccttgcaattaatgtaaacaggcaagggtggttgtaacaaaagaaaaccaggaggaacccaactg

SEQ ID NO: 157790 - DNA, 1000 bp, Homo Sapiens
ttttttttttttttttttttttttttttttttttttccagttaatttagtcctttatttttttcattctccatagaatattggttttgtaacatcgaatacaatccaatatataacattaaaacaatccgatacataccattctgctttatgaaagatcagcaaaaatacataaacaaggatataactagtacatttataaaatacatcataacaatgaaaccaaaggatcccacacaataatcttcacatttgacatgctggttacagctgaggagagccagtgtctttggcaagtgattcatatacataagcgatgacactgactaatcctaacacttctgaaatgttcattctttaccagttaaacctaaaataaatcagcaagagtactgaaatataacaagaatgaaatccaaaatttgtcgaaaggggcaatgtttaatactaggaagaacactgaatttggggactaattcttgtccccaagtacatttggattcttgtcttcgttcctggatgatcttaggcaagtaatctgtgctatgaatccttcacttttaaaatgagagagttggttggctggttctctaaggtctttctagattttaactttccatgattttaaaatctttgacacaggcttatttttgtgttgtaaaatgaaatctctaacaatactaacttggcagttgggtggaatccagtgccacccacacacatctgctcaaatagttctttaccttctgagccccaagacagcccagtcctcaaattaacaatgatggcaggcttcaggaggctgatggctagttctccgccagacacaaatgcaagatagatagttttaaagctcctgaagtcatggttatcagaagaaaagctataaaggaagaactacagggaaaacctacaacactctctttggaaaaatgacaaaataacacatttactgatgcactaacggaagaaggtaggtgcatatattaactataacacat

SEQ ID NO: 157791 - DNA, 1000 bp, Homo Sapiens
ggttacggcagcacttttatttttccttacacaatgacgtgttgctggggcctaatgttctcacataacagtagaaaaccaaaatttgttgtcatctcttcaaagaatcgagaattgcgtacaaaaaaaaccttacataaattaagaatgaatacatttacaggcgtaaatgcaaaccgcttccaactcaaagcaagtaacagcccacggtgttctggccaaagacatcagctaagaaaggaaactgggtcctacggcttggactttccaaccctgacagacccgcaagacaaaacaactggttcttgccagcctctagagaaatcccagaacactcagccctgacacgttaataccctgcacagatcagaggctgctggccacacagactcaccaagccacagacttgtcttccacaagcacgttcttaccttagccacgaagtgaccaagccacacgtactaaaggttgaactcaaagatatgtacagggtattaaacaaataccaaggggaacagttaacttcaatacaaggtcaaaatcagcaacaagttctacaatccagtgctgatatcagatacaagcttcaaggacaatttcttttcgaaggcttattccagtttcgtgaggctagcatgaggtgtgtgcatttgccaggggcaaatttctattctcaattaacccatgcagcaaatgctacgcatctgctgagtccgtttagaagcatttgcggtggacgatggaggggcccgactcgtcgtactcctgcttgctaatccacatctgctggaaggtggacagtgaggccaggatggagccaccgatccacaccgagtacttgcgctctgggggtgcgatgatcttgatcttcatggtgctgggcgccagggcggtgatctccttctgcatcctgtcggcaatgcccgggtacatggtggtgccgcccgacagcaccgtgttggcgtacaggtctttgcggatgtccacgtcacacttcatg

SEQ ID NO: 157792 - DNA, 1000 bp, Homo Sapiens
caaatgcaacttttaatactacatatttcaagagctcccatgttcagtattcctggagaaggaaagctctttttgtttctaagtatgagaaattgttagcgttccttcctttggtcttcccacacccctcaccacaagaggcaaacaaaaaaaactaaaaaggggacaataagtgcaagataaaaaagaaaatctaaatagtatgaaattagtttttattttaactaaaaataaatgcttaacatctttccaaaatcaaaactaaagacgaacacttagaaaaaagggtggaagtgtatttttccttccctggggaaaccagtaaggcagacattctaacgaagctttggttttttccataggactagtctatgcaacagaatctctctccagccttttctctatgtcagttttatctacctggcaagaaaaaacaaaaacaaccccaaaacaacccctccccacagacacaacacaaaacaagggacttgagaagttagagaaaacctttaacacgtttctgtaaaatcctttctgaggtggtttagtacaggtactacccatcagcaacttagcggccaggtgagttggtgcagaagcgcttcgggtgaattcataccacagccaccgggtgtgactcggctacctctcccaattaccacagggaggtcttaaaattgaatttcagtttcagcagatacttcagatttacctgagcaatatcatagacaatgtactcgttatatagtagagaggtgtctatcacaccagatgaaatcccggtcccaagaggaacgtctacaccatccagactaatgttagctgaaggatcaggggtagttttgcccaaacctttgacactgtgcttgcccttgggtaacctgctgatatgtgaagcgtgcttcagttcatacatgtttccaagggcaacttctcccaacaggattaagcctattgggtctccctgagacgtatggtagtagttggcactcttggagac

SEQ ID NO: 157793 - DNA, 1000 bp, Homo Sapiens
ggtttaacgtgattttattattcttagatacattttagttattttatatagataaaaatatacaatattgcttttcaaacttttaattttataactgtataactgattgtcatcatattcatgattaaaaagcctattttccactaaacaatttatccagtaacatgtggaagagagtaacaaaaatggtttatgtaagacttataataaaaggtttaaatgtaaaaatagagtattaatctagacctctggtctaaatccttagatacctcatgctggaaacaaattatgaaatgtttcagacaaatttttttcaacacttaaattgattctacaggtttaaagttttgactgaaaatacacagaactcagagatattttgtccgaagccatttttatatacattaacttactaaaaaaagtaaaagaaataaaaattgtatttttttttttggagacggagctcggtctattgccaggctggagtgcagtggggcgatcttggccctgcaacctccgattcccaggttcaggctattctcctgcctcagcctcccgagtagctaggactacaggctcacgccaccatgcccgcaatcccagcaactcgggaggctgaggcaagagaatcacttgaacccaggaggtagaggttgcagtgagccaagattgtgccactgcactccagtttgggcggcagagtaagactctctctcaaaaaaaaaaaaaaaaaaagaataaaagatggtgtcattttttctttttgaaagtccatgttaggacagtaaagttggtagggtgattaatttgcctattggtaatgaagatcagtatatcattaaaaaaacctaaagtttgaaggtaaacgaactatgtggttgtctttttattaataccaactttaagcagttggattcattacttgatttcttagaaagacacattgataaagtatgtaaagccccaacaaattaagtgcatatataaggtatggactttt

SEQ ID NO: 157794 - DNA, 1000 bp, Homo Sapiens
ttttttttttttttttttcaacatagttaaccagaagcaagtttatttaagagatcagttcagcacaggctactgtagaatgtcttaccccaccatattgtaatggtatgcacaaaaggcctaaaatcagagctatatatctaggaacaagacagatatgttggatgctgttgtacatgcaccaataatattttaaaacaagacaaactattccagtgaccataattgcctaccatagactccagagaagatcagcattttagaattagaaacacacttgaatagatggaaaagaaacaagctgttctacctgtgacaagagcaccagtattgagtgatgaggacaaaaagaggaagaatatattcaaggaaatgtttagcacttttgttcaaagctagaacccactgttggaagagcagcgtatgggctggtgtcttgtcagttgttaagcagtttgtttgcattttgaaatgcttactgcagttgaggattccaagattgcttgaagattgatttgactccggtcaaatcaagacttgaccagcaacatccctaaaggtctcttttccttcactttctggggataattaattgctggtcatcctcttgagcctttcacacctcgtttagtggctatagtgcccccaagacctgaggctgtccaccaacagctataccctgaagcatggctgcagaacactgcagggaaggcagccccatgcaggccatgtgtggatgcaggtggataggaggacaagaaattaggctaaaaaatctgagtttagcaaaaaagtatgtaacattgcttcagcacttgtagatgagtaaggatggctcataaattaggtcataatagtgttccagtagcagctataagaaaggcattaaacaaccctcatttgtgacattctagggcagcccatggatgagttaaaataattcaaatcctggctgggcgcagtggctcaggcctgtaatcccagcattttgggaggccga

SEQ ID NO: 157795 - DNA, 1000 bp, Homo Sapiens
ttttttttttttttttttttgaagacatatttcagttttattatcttttaggcatagacgggtatgttaatccatttccacaaacaattcctataatcacatatagggagtgaaccttgaacttgcaaaacctgtttcctgttgccaaagagttaaattggagagccgaaacctcaaaagttgaggatttggaattctttttcttcttagcatcttcgtgcatgtggctgccattaaacaagtaagctttcctctttatccaggcactgaatcgatggtaataatgttgtctttttttttcccggcaaactttctgctttcggtccagagctctgagtttctcatgttctgctctcgaggttctgacagctgtttttggacttaattaaccattgcaagtggaaaccaagaaataattgtagcataactctctctattgtcatgttgcttctttctgcaaatatatcttagaagttagactttaaacctttgatctcccacaccaaaagagaaaataatatttatatggaagtaattttattttagtgtttgtgatttattgtggagagcaggtgtttaaaaattttagaatttctttaacaaaattctaaagagaaaataaaaaagaaatcacagtatttacagagataacagaatggcttagccatgcaaaacaaataactttggtttttccccttttactttggtttaaatgttgaccaagattcaattttttttcctgccaaataaaacttcaataaaagtttagaggcaaaataacatattttctttttttcccataatattttatacagcatcgagtctaagaatattttatgcatttaatccataccaatgcactacggaagcttttattaaacggagtcactattgcccagacagtaaatggtttacaaatgtacaataacgtatgtttctaaataatgcagaagtggcaaagtattattcctattctcatctgactttaattttcaattta

SEQ ID NO: 157796 - DNA, 873 bp, Homo Sapiens
aaaacatgtctctgcattttattttaagaaaacacaaacctggtcacaaaacatcttcagagaacaggataagtgaagaaacaaacaaaatgcatgggaatagcaaatttggggccacggtcatgttcaaggggcggagctgacatgacatcattttgttcccggaaaagcaaggttaactcaagctgtgaagcccagatggccaatagatttacagccatctaaagaagagcagaatgctctcaagagctgaattatgatgacttgtaggtattgattagatgagaacaccaaccccatattcagcagagagttagggaatgagaagtagaggggagatggtggtggagatcgtctttatgtagttttcaaagtcacttccgaaaaagaagatgaggtaatagttgaatatgccagcaacggacatgaggaacaggaagagtatgatgcgtttcccaaatatgtagccaggggtgctctgcgttctctctcctaggtaaccgacaaagtacttttgcctcacaaacaagtacatcagtccagcaaacgcagcaggaacttggctgcaaagtagccccgcagaccagagcacagcgaggaaagtggggtacgcatctacacagttctggttggcagtgtagacccgctcaaaggcaagtgttccggtcctctggaagctcctcccattctgggtcctgctttcgtgctccactttatgggcaaagaatccattctggaccacgctgatgagggtgacgatggccaacaggacaacattgcctacagtttcttgatccatgtttgcttcaggctccccagagaggactgctctgcctccagctgcacaacctgccctgtacaggaaggggaagt

SEQ ID NO: 157797 - DNA, 1000 bp, Homo Sapiens
gagttgaatacaaatctttattattttgaaaaccacagcaaaggcacttcagaatctccaggtacccagtctcagttgccgttcagtggggacaagagtggtgctgagggcatggtcacacccttctgtgctgcatgcagaggggtgcaaggccagggcagctgacctggtcagccaccaggggagcccacgcctcttataacacagtgtccttgggtcaggaatttgtagtttattttgttattaagatggcgagagaatttttcgtccatttagagcctaacatttttagatgaatgttaatggcatctcggttgggatggattcgtgttcatttctcagctgctgaaggatgtgtgttctaaaacaaaagggctcccagccagctctccggctgcatgatagagaagtgttttgtaagacgcttgttaaaaacccatattccctggcccctcttgtggagaccctgtttcagtagatgggaatggggctggggtctgtataacctgtgcccaggagactctgtgaccagcttgggaagctcctgcagggaggaaggaatgatccacaagtccccaagcccttcatgctgaggcatctgtctggctggagaaacactaaggttggcattgtgctcacactgggaaatgacctggaggaagttgggaagaggagtccaggccggttccacctctgggtcagaaacccggctggaaagcactggaaatagggaaatagaagaccgaaaggctgggacccccctcacacccaacctgcgtccatggccgaggttgagtgaggagtcctggagactctggcttcatggtctttgctcttgttcttctgtgcctcaggggtcgctgcccaccaggctcagcagggcgttcttgtagtcgccgctggtgtcttccatgatcatgctgctgagggtcttgccgtacatcttcttgaagtgacatttgataagatttaagtcaatctcgctccttgaaacgatgtt

SEQ ID NO: 157798 - DNA, 1000 bp, Homo Sapiens
ttttttttttttttttttgacctctgcgtcctctgtttattgttttgcagcaggaggcccaacatagaacatactcgccagtactcggctgtgcaaaacaggggctagcgctgaagtacaaatgggaaaacgtgattcttttgttttaaataaatacttagaacacgacttggctcctacaagcatctggactctaggtctcagtactggagtgtctcacccatgggccccacgcagggacgccacggttccctcccaccccgtgatcaagacacggaatcggctgccgatggttggatcgcaatgcgccccttttctagagccttccccggccatctacaggcaggatgcggctgggaaaaagacaactggaatttctcgaaggttgatggtccgcacggttgaggattctacgtggttctcttggttcccctggtgtgtgtgtgtgtggaggaggccgcggcccttagatcaccttcttgagctcgtcgtacaggaccagcacgaaggcgccccccatgccccgcaggacgttggaccacgcacccttgaagaaggccttgcccccctcatctctgaagatcttcctccaacagtcgacggtgcccgtgtacatgatgtcagctcctttgcgcccgaactgcatcatcatgcgccgccgcaccgtgtcgaaggggtaggacaccacgccggccacggccgtcacggtctgcgcgatcatccagctcaccacgatgtgcgtgttcttggggtcggggagcatgcccttggccgtatcgtacacgccgaagtaggccgcccggtagatgatgatgccctgcacggagacactgaagccctggtacaggccccggatgccgtcggacttggtgatcttcaccaggcagtctcccaggcctcggaactcgcgctctgtgcctgactttcccacgtccgctgccaggcgggttctggcaaaatccagcgggtacacgaagcagagggaggtcgcgccggccgc

SEQ ID NO: 157799 - DNA, 1000 bp, Homo Sapiens
ttggaagttaaagtatttattgatgtgtttaaactgtgtacattctccacagatcatattaaggagtttgtaggtgaagtttaatctgtgcatagtgggtagagacatgaatagggctaaaggggaggaaaaaggaaaaaaacaaaacaaaaacagtcacaggaaaataaaaatacaccacaggttaccagaaccttcagattttttaaaataaaaagaaagaaaaagcagaagcagtgagcatcgacatcaactgtacaagcattacaaagactcctgtgacgaaaacacaattgttcaaagctttccacagtgtccacagactcagtttcagggacagcctggactactttcctttcacacaaacaaacctccccgtgttctctcctgggccagccgcggcccctccttggtgtggtcttctctgagtgaatgtcacaaggccggtgacaggagggggtggaggtgaggggacaaagtagaggccgagggtcagtgcctttggagaaagtccagagaggaggagcctgcacatctggacatagttggaaggggaagtgaacggtaaaaagctacggtaggtaaacaacagacagtgaagaatgtcaaatataagctacaggctaatctctgtggaagcactggattccgaaggaaagcagcagcggacaccctcatctgtatacactaagctctctagaagacgctggaataaaatgcctttaacgtccttggtgacaggacttttatggagacacacaggtatccagccgtggaaacactggacttcaagaaactggtcctttcacatcattttgcgagggtctctcacgtgcttcagtggccattacagttccctattccaccccatttctcagcaacttcctgaaagctcatttaaaaagggaatactgccttttttttctttaaataaaagccaggacagtgaatgaggctgaagagttgacttacacaacataaccggaacgacagcctgcat

SEQ ID NO: 157800 - DNA, 1000 bp, Homo Sapiens
ttttttttttttttttttggaatctactgcgagcacagcaggtcagcaacaagtttattttgcagctagcaaggtaacagggtagggcatggttacatgttcaggtcaacttcctttgtcgtggttgattggtttgtctttatggggggggggtggggtaggggaaagcgaagcagaagtaacatggagtgggtgcagcctccctgtagaacctggttacgagagcttggggcagttcacctggtctgtgaccgtcattttcttgacatcaatgttattagaagtcaggatattttttagagagtccactgtttctggagggagattagggtttcttgccaagatccaagcaaaatccacgtgaaaaagttggatgatgcaggtacaggaatacacgagggcatagttctcatagtcggtggccaggatccagtacggtgccgatggcataaaccaggaaaacttaacttccagcttggcaggctctgtgaggttaactggggtggcttcaccttcgatttgattcacagttccatcagctctcaactcctggtttaacactttgatctttccgttttccattagtgagtagttggcctggatgcagcgtccattctcaaaggttgttgggatcttctcaatttcgtaccatcttccgagatacttattcacgtcaaaattctcctgcaccggaggattggggcacttcccaagatgaaatgcttgtccctctgccgcaccgaagaggccagccagtgcggaaagcagcagcagcagcatcaccatcttggggctgggtggctggagaagggacctggagcttttctttcaagatgaaggcagtttccagatgcagaatcagccgatttgagatgcctgtcttggtgactggcctctcccaagctattttataagcttcttcaggtctctgatgtttacttttcatgcatgccacgcccgccgcccccatccagtcaggagggttggcctaaaagcttag

SEQ ID NO: 157801 - DNA, 1000 bp, Homo Sapiens
ttttttttttttttttcttaaaaatgatcttaacattttattgctgtctatacttatcatatatgtagtgcaaataatggcttctgatggttataaagcattcctgaattatagactacggctatacacttgacatacctgctttatataacatacagtaatatttagacctaatacagaaattcagctactaggaaaattctaatatactgtatataaaaaagctctcttcttagtttcccagggaagactagcacagtcttaactaatgattagtgaaataatacaaccacaaatagtaataggagcttgagaaaaatatttctttaaaaatgaatcacacacaaacacctaccattatacatacattataatcaggcacaatttttcaactgtgttcagttatatgctaagaatgtgcattacaaagtttagcaaaattagtgaaaagggaagcaagttcaccttagtgttacactttttcttcaattaactagtaaacagttcaagttctcacaagcaatacaacaccttttttatttttcacagttattgaaatcagtcaaatattaaataatttaattcggaagtattatttatgcacacaaactacacctgtaacagcatgaccttttacctgaaaaataaaggatgaaatattacatttatttatttacatattgcccataatactgataggctttttttttaatgctttgttttctaaaacttgtattgtttttaaacaaaaatagatttgaaaagaatgaaccacaacagtgctaccaaaaagtcacatcttgttaccagacatcactgtccttacaacaattcaactaataagatttaagatttaacttcatcctaatgtatcagaacattaaaaaaaaaaaagtctcaatgtacctatttaaataaatcgtgcttccataataatattctttaaaaatgaaaaacagtaaagagcacacatttttatttactcacaacactgaataat

SEQ ID NO: 157802 - DNA, 902 bp, Homo Sapiens
ttttttttttcggggcaaggagcggtttatttcacaactgagtgaaggatgaggcccacagcctcggtagcagcagtagcagctcctccccgcccagccctctcttcttggtatggtagccaaaggccaggtcaggagccagagagacagccagggcacagcctcccgccatgggagccgggtggccacagagcagcagcggcagcagtagcagcagcaggctggggtggaggagggggagtgttagtttggccggctgactcccaaccccccatgggtagtgtttggtgaaggttgagggacctggactgctaggtggggggcatctggagtggttcagtcagctgtgaaaatgcggctggaaatgtcatccaggagccagtcgatgcccggcagcaggttctccccggtgacggcgctgcagccctggatgcaccagtggtggctgcggatggagtccagctccagggcctcgcggatggcgttagaggacagtgctccaggcaggtcctgcttattagcaaagatgaggagggttgctccggccaggcgctcctccaccagcaggctctggagctcccgctggcagtcctgcatgcgctggcggtctgcgctgtccactacccagatgaggccatcggtgctctcaaagtagttccgccagtaggaccgcagggacttctggccacccacatcccagatgttcagcttgaatcctcggtgctccagggtcttgatgttgaagcccagcgttggggagatggtgtcgatgtcctccccattgaacttcttcaggatggttgtctttccagcattgtccaggccaagcatgagcagtcgcagctcccgctctttctgcttcatcttcttcagaatggtcaggagccccatgggccccggag

SEQ ID NO: 157803 - DNA, 1000 bp, Homo Sapiens
tccagggagatttgtcacattttattcagtatttctgctgcactgccagcctagggatgcacttgattcccaagaaatgcaactgtcctattcgcagagccgtccacaggtacctaccccctggactgcagcaactttattaccttaactagcacagaacagaggttgatttaaactccttacactcacttctcagatcaatgaatgggcaaagaaacacctcatggctctgggaaggcatgctgagacccgtttttgcaagtcctgaggaatggaagaatatagctgccaggtatcccaagtctagggcagggagggtagtatcggcatcactttcactgcattctgttggtcaacgcaagtcagaggctcagcccagatccaagggcagggaagaggctccatcgtgtagttgggctcacttggaaggtaatgggaggagttggtggctgctttaagacacataccacatctagatttcaacctccagaaaagtccaaagatgcactcacaggagcccgttagtcaactgaagctggttcatggctctcttcttcaggtggagactaaccaactccctgacctccttcggttaagtgctccttcctttttcctgctgcctggaatgtctatgtgccatctggagctatggcagccttcttgcaaccatgaggcaaactctatgtgcaagagcaggtagctagaaagagcctgccagccctgggcttatatcctgcttcccagggagcttaaagatagcaaaacccacagccattttcatcaaatgccaggaaattcttaggctgggattgttgggattgtttgaatggttgagcgtgaaagacttgttataatgggcttgttgaatacggtgaaagatgagatggcttttagctgcctccactccccgtgtcccatgctccatagatgtttctttttttttttttttttaatcattttttggttatgccaggtgtctcctgtgtgtccctccagatcc

SEQ ID NO: 157804 - DNA, 1000 bp, Homo Sapiens
agatttaggacttttatttttttcacacccaagttagcctgagttgactctcattgttcccctatctacccacagtccccatccaacacgaagaaatatttgctttcacattacagcataaagaccacctaagctttgacagctgacttgtagtgggtcagcgtgcgggcagaagggtcagtggcattgatccacttgggcatccagtaatggctcagccagtcagcccggcctgggtaatggcgttcaaagacttgacggtagtaatatccttctttggttttaggagtattgaagggaaatttctgggctgcatttgccatcattgcatcatcaacctgatgttcaacgtattcctgtaaaatcttaaaccaggaattcttaactgaagttattccatcactgaaggcttcttttggtcgccagagaatctctttgggtatcagattggaatcctcaaacgtctctctcaggagatgtttttctatcccattctttggaattctcatttctggtggcagagacaagtaataggaagaaaatcgatgatctagaaatgggactctcagttcaagaccatgggcagcagtagttcgatctgcgcggagaacatcaaacaaatagagttccctcagaagcctctcactctcctcctcggctttttcaggagaaggagccttgtgaaaatatatgtaaccctgcgtaagttcatctgatccttctccagagaagatcaccacgctatctgtgttcttccgaatatacttggaaattaaatacatacctactgaagcacgaactgttgtaatgtcataagtttccaaggaaaatatgacttcatccagagcctgaatgccttcctcagagttaaaaaggacttcataatgttcacttccaatatgatctgccacctttctagcagccagtaaatcggggctgtcttccatgccaattgcaaatgtctggagaggatactgtacttgggcttctttcagctgct

SEQ ID NO: 157805 - DNA, 1000 bp, Homo Sapiens
tttaccatgtcttggttccaatatttattattctgacaggttaggaatactaggataaataagtaatattttctcttacagaaaattgtaatgataccattgagtacaattaaacactctgagaatttcacagaaacatcagaattttaatagacagtagccagcgtccttgtggccagtgtgagtgacttctcacagctgcaaacaccctgggccagatttcttaaaacagctacatgacaaaaacaatgctattgacatccaataatgctaaagcctgggtaccacccaggctccactgactgtggtttccaaacatctctccactgactgtggttttcaaccacaaggaaaggaaaatggaatattctttggctcttccagcctagacacaactcctgacctaagacattgagtggagagtcctaaccctttggaagttgaactttctgctttcttcctgtgactttggaactgagtttgcaacagaggacctgccatcatactgcccatggattttgtgttaacgctgggagaattctgtcctcctcttgctgacaagctcttctggccacctgaatatcttgagatactgcacgtggtgacagccccgccccccaaaactcttagaaaccagatctgagaaaaagcatataaaagtcacatcagtgttgtgtgacacaaacatcggaagagtacattgcctagttttcttgcacacacaatttctggacataacagcatatttgctagaaagcacaaccctggccgttgcacaacttcactaaatgctgttctcactccacatcccctacgagtgacaatggtagccacggtgaaggagatggccccatccctcccacccgaggtacagacactgctgcctgaatcctaacggtgggcatcctggttttttgtagaatccagatgaaaggcgggcaggacaccagctgggggccatctggaacataagaatggccagtgtgttaaggcctaaatc

SEQ ID NO: 157806 - DNA, 1000 bp, Homo Sapiens
ttttttttttttttttttttacctcgaaatgtacgtattttttaatgaggagatggagatagaaaagaaaatcctatataaagagttgaatttcagttttaaagtgcaaaacatcagtgagcatcctgcatacagctttctgcatgaaaatttcctcttgtctgaattttgacgatgtctgcactgcaggggaatagcccagcaaacggtcagaagatgaacaagtgtgccccaacgtgctgctgagagacataggaagggaggtggtcttaataatacatgttcttatcccaccagcttccagggtagagcctgatgaagagcttccgcacctcatcatacacccagatcaggatggcgtgcggcacagccacaaaccagtactgagccctaagcatggtgaaactcaaggctgtgacacttccgaggccataggagaggatcagaccaatgatgatctgtgaggtgatccccacccagatgactttatttctgaagagaccctgctggaagatggaattcctccgggttttcctgatgatcagatctgctatttgctggactaggatgccaacaaagaaagccgtgtagcccgtccattctaggtattccctctggtaccttgtccattcctgcccatagctgtctttcaagtcattcacgtagtccttctcccattctacccgcaggttaatgagagtgcggggcagaaagccctcttgtgcatagacggtgaaatacacaaggaaagctcccagggcttgcatgaggccaatgtgcaggtatgagtacacagcgagcggctggttcaccagcctgtccttattcttgtggcgaggcttcctgttcatgatgtcactttcagctttctcgtacgccaaggcaatggaggggataatgtctgtccccaagtcaatgaacagaatggtgatggtgccaatgggcagggggagcccgacaatgatgtagatcagaaaggggcacagctcggcaatgttct

SEQ ID NO: 157807 - DNA, 1000 bp, Homo Sapiens
atcatagaatagatttatttacctgaaaccatgtctgtgcgacgctcattgttaccagcacagaaagaaacaaactgatctctatttacagtctaaagtcaaacatgcgcagtgataaattgacatttagcattttattaagataaatgcatcacaatatttgtattgcaccaacatctgtctactgcttctgatttcattaaataagttacatttaatacagtgcgaaatagctgtctgcacactcagaaaataactgaaaatgaactggaggcctacattttaaccattcaacacctgtagtgtttttaatgaatttataaataagcaaactgtacagggccaattaaaaagtagcatgttccaatgtcactggagagggatctggctacttacaaccgaaggcatgcattacaattgaatactgtacatttatataagctatgacattttgcagagaaatgtggcgacttggctgacggcttccaagttcttagataaggttacagagcctcattcctcttgcagcaaagaaaccaaacttctctggagaggctttctgattaagctaaattgtacatctgtaatcagtattttgatttaaaagctaacaaccccattggtaatacacatttcctccacataacacaaagtgagttgggaagttttttacttttctttttccccaacatcagtcatgcacagggttggtagatgtgttgctaaaaacgcacatgcacgcaaccgaacacccttacatttctgcaaaatggtttaggaagcggttactccagtattgcaggttccaggtagttgcgggccacaaacttgagcgtctcatccatgagaatcacgggcaaggagattttcagcaccatcagccactgggtcacgttcagcggtgtgatctggaagatgagtggcaagggttcgacatagaggatcaggaagtggagtgacatggacaggcagatggagcccacgagccagatgttctccc

SEQ ID NO: 157808 - DNA, 1000 bp, Homo Sapiens
ttttttttttttttttctgaggggtgtacattttattggaaaccttaaatactgttcagaaagaatatatcttcaatcaaggctcttgtgcagcctacacagaaaaatgaagctttttgggttaggggcaaggagagagacagtacagaggacaaagacccctcacgatgaatgctcttcagccagcttatcagcttttgccacagcttcttcaatgggtcccaccatatagaaggcctgttctgggagatggtcatattcacctgccaaaatctgctggaatcctttgatggtctccttcaggggtaccagcttccccatatgacctgtgaagacctcagcaacctggaatggctgagacaagaaacgctgtattttccgtgcacgggacacggtcaacttgtcttcctcagaaagttcatccatacccaggatggcaatgatatcctggagggatttgtagtcctgcaggatcttttgcaccccacgggcaacatcgtaatgctcactgccaacaatgttgggatccatgatacgagaggtggagtctagaggatccacagctggatagatgcccagctcagcaatggcacgcgacagtacagtggtagcatccaaatgggcaaacgtagtagcaggggcagggtcagtcaagtcatcagcaggcacatagatagcctgtacagaggtgatagatcccttcttggtagtggtaattctttcctgcatagtacccatgtcagtggccagggtaggctgatagcccacagcagaagggattcggcccaataatgcagacacctctgaaccagcctgggtgaagcgaaagatgttatcaataaatagcagtacatcttgaccttcttggtctctgaagtattcagccacagtcagcccagtcagagctacccgggcacgagcaccaggtggttcattcatttgaccatataccagcgctaccttagaggtggcatcttttaagttgataacaccagattca

SEQ ID NO: 157809 - DNA, 1000 bp, Homo Sapiens
gaaacagttcaccactgaatggtctcataaacaagacagtagttcaatgacatctttaatttttacccatatgacaaaagctgagtatttcagagaattatacaacttgaaaaaccctgtttcattcaattgtcactttattgcaagatggtagaattaattacaaatttaaactataacctgttaatctttagtcaggcagcaagtttttataaaggcaaactgcttattcagaagtgatcacggaacaactcaaaggcagagcaagaaggatgagaaacatctgactggccgatagagatttcgttctctcactatatgaaacaaacttttcatttttaggaagggtaaactataacttcagtagacaccaacacagaaagactttgtcaaatagactagtttccatttagtcagtcaactgtttctagctgtctcaattgggatagatacatttacataactggctgtgcttgagccttctttgccagcagctttaggtccgcaatgcacttggcaattgtctccttttcctgctgtgtggagatgctttgcaccacgtgcttctccacccaatttatcatgtgttcttgttcctttcgacgcatcatgttctgcacagatatatgatagtccaggcgattctttacttccttatatactctatacagtcgttcccggtaagtaacttccaaagccatagcaatgttattcctttgcacatcaaaaaggtaatggcgcttctgaaccagtgcctgttgtgacttctccgtatcaattgcattctggatgtgttggatggaagcctgcttcgcctcttctagttgggcaagtttttgctcattgagtttatcagcaaagtctgcaacaaagggaccatattttttaattccatagaccattacacctagtactgatagggcagtgaaggtctctgcgctaatcacatatatttctttggataaagcgtacaagataagcccagttccgagtacatagg

SEQ ID NO: 157810 - DNA, 1000 bp, Homo Sapiens
ttttttttttttttttttttaatttaaatccactttttattctttcacagattttaacaattatacacaacttttaacataaaggtagtgaaatctcaaggataaggaggcaatatatatggcctcttctattcgttattcaggatggaaggaaattttcaaagtacagtgtgtgagattcaacactggaaaaatacatatgaaacttgtttaattggctccacttaggaccagacacagcacaataaatacagaactgcatcatctttttaaaagatcattgtaattttaacacattcttactaaagaaatacatactatcagtgaccgatctgaaactctgtaacaggtgaagggagacttacgatgaatatctgagcataggttcgctagcatcttcacactcatacataaacattcttaaagggaataagaatgatttcaaattcaaaacaacaacaacaacaaaaaaacaaatttggtcaaactttcttcatcataccattcattgctatcacaatcctagtttgctggtaggtttaagaaaggaatagaaagtttttgaaatccttttaatttctaccagtcttagggcctcttgagtaggccactttggaagcaaactgattaaacagcaccatcaagtccgtatctcaacaaaccattgcataatttctgtcaatgttctcaaaggttaaaacaagttgtatagaagaatacctttcctcaatagcaggccactgtaaaaacatgtaatctgcaagaatttaaacaaaactatcctgaattctctactgattgcttctttccttaatagaccaagagataggcattacctaaaaaattaaataataatatactgaggcataaaataaatactttatttatgctatcacaatttgggtatttgaagattgttagccatgttcacacaccctttcctcttcccaaagaggaagcaacggtgccagcactattggtcagaaagagttaatgggaa

SEQ ID NO: 157811 - DNA, 1000 bp, Homo Sapiens
ttttttttgggtttttaattctttttattgaagaaaagaaaaggagagaaaaaatagattcccccctgcttcttcctggaggggactcagtcctgcccctgggggccatgagggtcggagggctgtgccctccacctgggtctaggaggggcctagggccctggaaggtgtggggagctggctgcttcccgagggatgggggtgtttaaaaaacggtgccaggccggccgggccaagcaggcagctcctccgcagcaggagctcaggcgggtaccctgggacgctggccgcgctgggcctgtccacggtccacagccgtccgcccatctgcccgctgggcctcggcccgaggagggcggagtctgaggcaccttcggcctctggtgccctgtgcccgctggccgggccgcctcctgtcctgcatctggctctggtcccagcactgcgggccctgtgcctggccgccgtctgagcgccctgaggccggggtgcgggcctggcccgctgcccgcgagcgtgtctgtgcccgtctgcggcaggagcgggcggagcagcatccctcctccgtggcccagtgcgtggccgccgcccacccgctcagacctcggtctggaggtcgatgatgtcctggcccaccagcgggatcgtggcgcccgacctctcccactccacgctgcgaagctccagcggcgacggctgcagcggctccagctccttcttcacccacgtgggcgtcccgtgggctttccggaggctctcccagggcctcttgttgggcgtctgctgcttttccggcttgctgtccggccccagcacctccttgtccttctccgctgcgtgctgcagcttccggttcaggtcctggaacatgtcttggtgccgcttccgggtgtgcatgatcttctcaaagtccagttctgcataccgcgacttccgccgctccagggagctcacagacaaggtggcgacattctcgttcttggtgctgggccccgtgctg

SEQ ID NO: 157812 - DNA, 1000 bp, Homo Sapiens
ccacagagtgaagtttattcccaacaaagttcccctcccccctccccagcccgggacagggacggacaggctgggctgaagatggggttccagtggctgaggggcctctgagaaacaaggaagggccctgggaccccaggccaagccatgtccggctcccccagcctggctgagtccacggcgcctccctgcccagccctcgggagaggggagagggcgctggctcctgggtagttccaaagtggagtgtgaaaatagagagatatatatatttatatgcagtgggcagtccagcgtggcactcacacctctgtctggaagtcaccatccggtggttctgtgggctcccaggctgctgcccggtgcagagtcagccgttctcggggcttggggggcagcgagcccagtgtcatagatttgaaggtgctccagctctgatggcgccgatgttgggacaagctggggcgctccccagggctgggcttatcggtgcacacgctccgctcggccgccccacccgaggacacactccaccgcttctccctcttggccgtggactggctgcggtagcggtcgaaagtgtggaacttctggttgagctcgtggtagagttctgaatgccgtttccgggtgtgcatcacctcaaagtccaggtctgaataccgtaatttctttcgctccagggagcccatcttcatggtagagccgggcacggtgcgaggcatggtccggctgcgctcccctggctcgggcacttggcgggcgctgggtgtcggcggtggcggttggaaggtcattccatagggattctggagagatccataggcagggcccagccccaggcccgagtggtccacggacaggaagctggggtagccttcagtgtgggccactgtcttggcagctcgccggggggtcccctcgggccgggccctgggggcatcctcaccacctccacccccaccgccaggctgcaggctcaaagtccgccggggcagca

SEQ ID NO: 157813 - DNA, 1000 bp, Homo Sapiens
atgtagacaaaagtttatttacaccatacaacattttaaatattttatacacagctgcagcagagaaagcttctcagagctttctagagaaaactgcaataataaagatgtgaaatatattattcatataaaagtgagattattactttattgcatttaaagcaatgaagaatgtagctcaacaaacattcatttaatgacaaaaactttgcttttatattataaagtaaaaagtgtagtaatggccaaacagactgttataaactttaaaaactgcataaatatatacattgtgcttcatggtgaagttttttgaaaactaaaccatatgaagcggttacaacatgaatcgttgcttgaggtttatctataaagattaccttacaaatccattccacgggtacttacaacacaggatggtcagaactgtacacctggtcatctctccactagcctgactagtgagaagttaccatatgaaaacaccactgacgtttggcacatgaaggtcctgacataagatagtcacactgtccagatagaaatgtcaggcttcccaagtcttaagtgtcagtgcaataaagttttgtctctaccttagtccattttgatttttttaaacttctgtttgaaagtcaccctcttgcacatccagaggcaaattcagacacttctcccactctgctggcctcagttccaaagcatcctttgcctctgtgtctaagacattgattgtggtgtaatgcgggtattcactggggtttttgaaagtgtcccatggattcttgtttggtgcggggttttccatactgcttgtatttggtatatcccgaaatctgtccaaagtttgaaatttctgatttagttcttgaaatagttccatatgcctcttccttgtatgcatgaccttctcaaagtcaaggtctgaatatcgtgattttcttctctctaaagaactcattgatatcgttgatccagtttcacttcttgatagtcctgc

SEQ ID NO: 157814 - DNA, 1000 bp, Homo Sapiens
tttttttttttttttttttttcacgttgcacggtgtttctttaatggaaagacagccaccgacctcagaagcagcccctccttgcgctggaccagaaggataaggggagacctagccaccagtgggccagtgggggtgaggggcttctaggaaaaccggtgtctgggactctggcggttgatggtgtcatctgcgcgggatgctgggcctccacctcccaacctcctccgggacagtacaggtttgggggcaaggcctgagcagggcaggctggggagaccgctgtccctggggttttgtgggcaggggctgggtgcaggccggacagacagaaagcagtcccagctcaaggcagaaggccagagggtgtggagtgaaagggacaggcgaagccaggttcggagagatggagggaacaggccaccaagctcagaagcgagaaaggtctgaggaagcacaagacacacacacacacacacacacacacacacacacacacacacacagaaagagagagagagagagagagagagagagaggaaggacggggaaagagagaacagaagggaggactggtcgaagggccagtggagcaggggtctgggagggacaggccatgaacttgcaagggggctgaggggagccgcagagtcggggagggttgaaaggctggaaatgcatgaggaggaggaacagaacatgtgtgtctggacaggtgcggcagccctggcagagcccactgtccccattcttatggaccgcctcctggctgctgacccagggactgttctcctaggactggagccttggacacttgggtttgggagtgaacgagaaaaaagcttcatggggtgcctctgggtggctgtggtgggagagcaggggcagctctgaggccaagggaacatgtgatgggggccgggccttgcgcccacctgcacccttgggagccagggagaggcggtgatggggcatcgagctggggtcagggacccgaggt

SEQ ID NO: 157815 - DNA, 1000 bp, Homo Sapiens
tttttttttttttttttttttttttttttttttttttttttttttttttttttcgaacgctcgtgactttattgcagaaaagccccgcagtgctggagcgcagcctaggctggggctgcccctgctggcgtccgcgggacccagtctggcttctgtagcggggcagggcggggtccacgcagggcgcagaggcggggacgcggccagcacggggggtgcccagcacgggggccttacttgatgacagtcgcttaccagtcctgaacaccttactggggcttagtactccggatgaccgtgcgaggtcactgttacagccctctacaaatgaagcggcacagagaggccgcgtaactcgcccgggggtgcagtcggtgaaggagtccgtccggggaccccctgcgaagctgcctctgcccactggattccgggtctgagaaaagggcacaggcgacaccccgccttcgcggcccgtctgggatggcacggaagtcggggtcgtccgcgcagaggtgggcacggggcgcaggcgggcgcggccggctagggctgcagctcgtactgccgctcggtggccgtgtagaagtcctccagcaccgactgcaggaactcgaaggtgggccgctcctcgggccggctgcgccagcactcggcgatgacgccgcggtacagctcgggcgggcaggtgtcggggcgcggcatgcggtagccgcgctccaggttgcggatgacctcggggttgctcatccctgggtatggcacccgcccataagtgacaacttccatcaggaggactccaaacgaccacacgtctgctttgatggtgaagaccccgaagtggatggcttccggggctgtccacttgatggggaacttggccccctcttgggccgtgtattcactgtcgatgattcgagccaagccaaaatcagcaattttgcagcacaaggcctcagacaccaggatgttggccgcccgcaggtcgcggtggatggaattc

SEQ ID NO: 157816 - DNA, 1000 bp, Homo Sapiens
ttactaaaacattttattcattcacttaaccatatttaccatgtcacatagcagatgcacctccaaaatgtttatggtagcaaagaaagctatggcatacattccttaatgattggtctaacctcccagctgttccatcaatgttacaaattttaaatctcaactttattcatgaggcactagaagatctttgaattgctgcctttgcattagcattacaatcctaattgtcctgacaaaaaggtaccatagaaggctgatagaatagagaacgtctactgtacatgtaaggaaaatacacagaatgaagaaaatccttcccctcctccaacacataatattcataatgttagctttcaagtgcgaagacttaactagaaatgggacattgtggtaaacattttaatatgcaaagaaggtcactatatacagaaaaaggcaaaactttttcattttttgaagcaatctaaaacactgcagcttgaaggctgtgggaacgaatttatatctttctctttgattccatggtgcttcatgacgtgctctttcagcgagtgcaatttatcatttaataaatgatcactattcaatgaaggggagttctgaagaaatgacactgtgaacttggagttcatcaagtttatcccacattctacgtaaaaaaaaaaacattttagtgtggccaagtttcaaaaaaccattctcaaggctaaatgaaaccatttgaagggcattaaatcttatgtaattttcaatttaaaacttactctattttgagcacttagcaatttgcagccctcaagaaatagagtatgttacataattcacagactgcatatgtagccgatatcatcatactctgaaaaagtggcatgaaccagcctgcatcaccccttgcacagttatttaaacatgtcccattaggaagaatagtagaggctagaaattcctgtcatcaggggctcagatacttctaacagtttaagtcctgtgtggaaat

SEQ ID NO: 157817 - DNA, 1000 bp, Homo Sapiens
ttttttttttttttttttttgagggtggaggtgggggcgatctttattgtggcggtgggtgggaggggggttcccacgtgagccctggtgctatagagagccggccgtcctccaggggtgagctggggaggcttctgcggttctggagtcccggcgatggcgccagttccccagcaaaccccctccagagctgcccccggatgcacagacaaggagggggcttgggagtgacttgaggctgtgacggggtcgccctcggtgtgggcaagtgagtcctctgtggccaagaggtcagagtcgtccctgaggctgagtcgaacacagacccgtggccctcataaaattaaacataaaagcacaaaaatggcgcaaccagacagcattggcttcagacaggcaggacacggggcccctcgtgtgacctgtgactttccacaaagggcaaggacctggcactgactccggccagtggagaaggctgtgccgcccacccggccatgactcagacccagaggctgaaagccacagacggggccgcagggcagcagctcccgggctctcgtgaaacacttcagaaggaaaaaaacctaaggaacagaatcctgaatggagaaaacccaacttttttaaaaaagaaggaagtgtatgatgggaatctacggggtgggttttctttaagaggtgagaacttggaatcttgcaagcactgggagtggactccggcggcggcgcagacgtggagcagggagcgtcctcgggccacctgcctcaggaagagttcctctggcggacgttcttgcctttgtcattctggtgctgcccgctgctcttcaggggtgcagagccggcgtcgtcatcatccaggacgtcctcgggcttccggcgcttctcgtagatgaagatgatggtgaccagcaccagcacctcagccacgatgcccaggaagggccagagggcggccaggtggctgcgcacgcggagcgtgatgatggcctggtcg

SEQ ID NO: 157818 - DNA, 1000 bp, Homo Sapiens
tcttttaggcactttttattttccaaaaaaaaaattgtcgttaatatataaacatctcattctctcaaaaaattctacaactatacagctgtttgctccattatttgcataggaaatgaccacaatacaaaaataagagggaaaaagaagcaaaacagcaaccgatttctgcttttcatgtaggtgtgtttccacgtataaacattttgaagcctcttacaaaattatttacatcgtttgtcatctatttacatcttttaagagcaacttttctaacaaacaaaactataatttatcaagttatgaaaattgtcttctaaaaaaacttactatattaccacaaaataaataaagataaacaatattttaaaaacaaaattaaattttcatttcaattaagaccccttttggcattttgcttatttattctgccctttggttaacagcatcagcatcacattactattttatattgcatatatgtagcatttgcttccttaagttttcaacatatcatttatatttaaaggcagacactgagtcagtattaatagattaactaaactgcactgtaatttagataaaattactgtgtctcactgtgtattacatgcaaaatccacataaattgtcatttaaccaacagtactgcacgagcgaacatctcgatatatgaaaactgcatcatcaattcaacgttttggtacttgaaactgcatcataaatgcaacattgtcatatgtgaaaacgacaccctaagtccttctttttaaaaatgacattgcgtttagcttattgtaagaggttgaacttttgtattttgtaactatctttaagctcttcagtttataattcatataaaatgccttttgtatttaaaataatcctattttaatcagtgcatgaaatttgcttttttaaagttcatttgaatgattattccttccctctaaagaaatgattttggtaatgttgagaggtaccttaccacaaatcctaa

SEQ ID NO: 157819 - DNA, 1000 bp, Homo Sapiens
ggttaaaaatgccaagataagaaacgatttattatagagagaagaaaaatttctcatccaaaatatagaaatctgtacaactttgccacaatcaatatacatgaactgtacaaatttacaccagttcataatttaccaaataaaagatgactaacaaagttcacaaaatagatggtggtttgtggaaaagacttttacccaattaagtacaaggaaagttacaaaccagacctccactttctaaaaataagaagtttactcagtcttagaaaactacaagctagcaaatgtacagagagctggctggtgctaacaccacagttgagacagtgtctttttaagggtcttttttaaagcctgttgccatggcagattctggtcacttgctactttcaaggccaaaaacacaatacaaggtctgaccatttccccaggtcatgcttactagtttgtctttatgtacatttatacatatttaagtgctaggtaaaagtcttgtaaaatttccagtactaccatgtttaaaacgtttaactttcctattaaaagctgccgaaaaggttaacaataacaactttcaagtgtaatagtgcaaattcccctgcgagatttactgcagagaaagattctttgaaatacagattttctttaaaaggattgatgtaaaaatttaggtatgtctgggagaaactgaaaccaccctaggacttccctccctagcaaataaagtgatcatttacttggactcacaggctattaaaattaatcattgaaaggtactgtccaaactatggcactgtcacttaaaatttttttttttttttaccattctatcttgtgccagatcttcacagctgtgacatggtttaaattccataatccatccccaagaggagcccacccaaagcaaaaatcaaatttatggatcatcatcagatgatccatccacagactatatcttaacctgatacagtcatcatattgtagtttttggaagggc

SEQ ID NO: 157820 - DNA, 1000 bp, Homo Sapiens
ttttttttaacacaacatttcaatattcatttttattttcctcattaaagtcatgtatactttttttttaagctcaaaacaggttacatactatatgattccattgaataacattcttgaaatgacaacattatagaaatggagagtggattcctggttgccaggggttagggacacggctggggtgtgggggtggagggaagtgggcatcctggggatccctgtggtgatgagaatgtcctgtatcttcactgtatcaatgtcaatatcctggttatgagactacattgtagttttgcaagatgttgccattgggggaggctgggtgaagggtacacaagatccctctgtatcattacttacaattgtgttgagtttgcaatgatctcaaaatagaaagcataatttaaaaacaaagtacaaacaaaactgcaggttttttaggtgtttttgtttttgtttttgctttgcttttgagacagagcctccctcggtcacccaggctagagtgcagtggtgcgatcatggctcaccacaacctccacctccaaggttcgagcaattctcccacctcagcctcccaagtagctgggattacaggcacccactaccatgcccagttaattttttgtatttttagtacagacggggtttcaccatgctggccagcctggtctggaactcttgacctcaggtgatccacccaccttagcctcccaaagttctgggattacaggcgtgagccactgctctcagcctaattttcttttttaaattaactcacttacaagagcttagataactccatggacttctgttttgtcccaaagaacttttgagattccagttacatattttccaacttgccataaaataaatacattttttttaagcgagaatctttctacttgtctgtattctgagttccctgttcacacctattgccatatggaaatatcccagatacacgggtttctgtttgtttttcaaaagcctggga

SEQ ID NO: 157821 - DNA, 1000 bp, Homo Sapiens
tttttactagggctcatgaggttttattttaaaatcaagagaaaacaacaatcaaatatgtcttcatacaaacgcagcagaaaaatacaaatcctaatgttttaaatggagaaagtgggccaccaaggcaaaagtgccataatgcagtcctgcttttttttttttagcattcaaacaaattttacaccagaactaaactatttcttaatagaaaaaatagtaactaggagcactacattctgtgtacatacttttctttagtatgtaatctaaaaatttaatagcacataaaaaactgggctaactttcaaaaatacccctaaagtatttaagtatatgtaaaataatggagtctgattctgaacaaataattttctaataaaaatttcaaagttcaatggttcccctaagtcttaaagaatattatctacaaattatcagtagcattccctccttttctgagctgctgtccacactattatacaacagaaactactgcaccgcaatcacatgggcaggaagaggcaagggctagacagaaaagactgcatcaaactcacgtggtgagataaaagtcattatttcactgtccataatagtttctgcctagtagtgaactctcacatagtggccaattatacgaagatcaacccactaattgaacatagtcacacacacacactgaaggttactatgaagaaattcagtcaaaagcagacacttaacacagggctttaatgtaacaccatttagtaacatgacaaattgaaaagtgaggagtactttgtggataagaaaatggaggaacacatctgatggagagtgggcatttgacaacaatggaacaggtaaccagcatgtaaaatcaaaatataagtgtctttttaagagctgaaagctgctgctggtcattcattaatgtgtcagacatttaatcaggatgctggaccttcaaaataactgaaaaaagaaccaagaaaaggcgtttttgttttcaaca

SEQ ID NO: 157822 - DNA, 1000 bp, Homo Sapiens
ttttttttttttttttttggtggtgcaggaaaagagctgggaaagcacttgtctcctttattgaacatctgcagggggcacctctgcactgaccaggcagccagagaagcaagcaggcaggtggtggggggcaggggagcatggggcaggaagacgcccaccctcatttccagtccttgaaaaattgcttgaagatgggactctcatggccctgaggcagaatctccacctgagtgttcggggcgtactgcatgcgcgagatgaagccctcggccacctgcagggctgcctgccgctccttctcattcgcttttcgccccttccagatatagatcttgccacagagcccgttgtccagcacaaagcagtcatcagatatcagcagttcaagggcaaatgggctggagtcagccaccttggtcaggttcatctgtccagtggcatcagagaccttatacagagctgcggcctgggcatttgccttgtcagctgtgaggtcttcctcagggttgccctccttcagagcaggcttggggcccaggacctggatcatctcagcaggctcctccccatcagtgacaatctccacctgggccttgccctgtcgctcactgtcccggatggccagggccaggtccctcgccttgttgcgttccaggatgttggactttccaccacaccaggcgaagatgttctggcccaggtccaggatgaagcagtccccagtgttgaagctgtcccagttcagtgcccgctcggtggcacggatgttcttcttccccttcacctggtagagtttcttgatggcagctggggctcctgtggaggtcttgtgaaatgctgactccacaccaccttcctggtacttgaggccccgtgggaagtagctcatgaagaggtcagactcattgccctgcacctcgcggtgctgcacaggccgctctcccagcagcgtgttgaggtgcacagccagcacggcacaggccccctgctcatcccg

SEQ ID NO: 157823 - DNA, 1000 bp, Homo Sapiens
aaccgttaaacatttttattgtgcaggcttgtaacctttacaggacatgcatgataaaaaattgtaaaatatatcagtaagcatataaaatttcagcaatcttttggaccagtaattgatttgcatgagggactaagcatctatgtagaacagacatgtcttggaatacacagtttacagattgaatcacaaagccatttcctaagtgattttcttcatataaagataaaaatatctttacatttaaaaagtatgcagtatagcacattttcagttatgtacacagtttaaaagtaaaactatatccatgccagtgtctgttttaaatgcaaaaagtcaaagtaggtaacaggttggtaattaaagtgtcaggaagactggaagaggcaaaaatcaagcagagttccaataagtgtatgaaaaaaaaatcataactgaaggtttaagaaaagtccccaaaggcagaatcacaatatgagcaggaggaataaaaagcttttggatataccaggcagctttctgtacgactcaggtttacaggtgaaattcctcagtttgagttcagaagaatttgaacttattccagcaaaatacttcaatctttttattactgcctcctcccccatcttctttctgggcaaagggatgcttggattaggtccaaagctcctggcagggggaggggccatgtgtcacagcataacagacggttgcaagtgctttactgagcaggggtcaggtttgcagcaactctgataggctcacacaatggcctccattttacagcccctccttggaggcccactgatcagctgaaatgggaacacaatgttgagccactaaaccaccccggtgatggattagtttggattcaggaaagcgtgattattcttgaaaataaacgaagctgaatagacatgctgacctcattcagttgatgagaggcagggaaagctggcttccaggactgccagcccacagagagctcagccctattggt

SEQ ID NO: 157824 - DNA, 1000 bp, Homo Sapiens
ttttttttttttttttttttttttttttttttttttttttttttttttttactacacagaagtttattgtgaaagtaaattaaacaaacaaacacacagtatggccaatggtggcaaaagcaatctggtagcttaaggcaagttttaatggagatgaatttagaaaagatgatgcaatgatgtaattttgtttaaatatagattatgaaaaaatatcaaattgcatcaataacttaatagaagtagttttcaaagcctgtactactggagaaaaagggctcatgatcttaatgccagcattaagacagacagaagcagcatggtgctaaatgacagaaaaatccagtatttacattaggatggtaacaggaacatttaagagcatttgatcttatttactggtggaccgaaagcccttagctagacaatagaggaaaatgtaccatcatcatgttatttaaaaaaatttaagtgcagaagtaaaaaaccaaggagctctgtaataaagtaacataaaacaccactgtaaggatcacttaaaaagcgattccctcaggggaaattagggcactgagtgtgtaaacatgtgagctgtacaacaccaaaaccaaccaaattcattcatagtacttatagttatgcaagatcagcatggcctttaatgacgcattattgtttgtaacaatttaaacacactcctttccatgcataacttcaaatatataacaaatacttttatttgatacaggatatctgtttatgaaataagacctatatacaatgaaagtaacacctccctcatcagtcaagtacagttatatgctttttaaatgcaatgaccttattcagacttcagtccattttctgaattgactgtgtcagtttttcaccctttaaaataatgccatttaatgataaaatacatttttcaaaaattcagaaatgtagtaacatttaataaatgtgaccatgaaaaatatttgtaaggaggtgccaaatg

SEQ ID NO: 157825 - DNA, 1000 bp, Homo Sapiens
tttttttttttttttttttcagagtcgcaatgacatttattaaaagatgcctaaagttagacacaactctggttggagggagaagaacttggaggagattgggggaaacctcccgctctccaaaacatttctgtgggatccctggttcccaaagtcagacagtgctgaggctctgggtgggtggtctcttacactgggttcataaccctcgccaggaaaaggctgctccaggtgaagtggtcgaagatcatgatgatgaagggctggttgaaacgcaagatgataggcttggacgtcaggtttagggtgaccccagtggagccagctgtgtccacaccctcctcattgagttgcagcacagctttatggaccacctttgatgacttcagctgggcgtcctgggtgatgcgtgagaaatttgcctggttggtgaacaagtctgcaatgcccatttcctccagcacatctccgaggtcatagactccagagatggtgacctttggaatgtacaggtccacctggctgctggtcaggcctgcggaccacctgttaatcgtgtcccggctcagtgcagcgatgactgtgttcatcttccccttgtccggaaggatgaagaagacagtcccattgcccacgtagttcatctgcaccagctggcaggggagctccgcgtcatgaaggtaactgatggtgctcgactgcaacatcatgggcaccttcaccacagttgtctcgtccacatagaagttctcctccctggtgcttgccaggtcaaagggctgtgtccatgtgcctttgaagaagatatagttgaccaggacgaggatggctgggctatccagccctgaaaacaagtcgacaattttcccctgtgtcttattcttgacatagctgttgatctgtctgctggctgttgcccagtcctggaaattcatagccaagacctctgactcatagtagtgcttgatgtctgctgagaatgactccagcaactccaggc

SEQ ID NO: 157826 - DNA, 1000 bp, Homo Sapiens
cacttataaagaaccatttattcatctgttgattttcattcattattttcatcaattacaatttttcctctcctgcatcagaggaaatcacaaaagacctgacagatttacgtagtcaactgagtgcgtaggttgctcaattagtagtacattagtgagtgctaattgataagagatcattttttttcttatataaggatatttatgacattgtaaatgccctttggaccaactcaggacaaggtacaaaatggggcccatggatggagctgtgagcccagctcaccactgttcaactctcttctctgaaacaaattgtccatggggaccctcagcatctgggggcaaaagggccaagtacacaggggtctctgcaccttcttctgggctcttggtggccttgggtcccgccatgtcagttctcacccaccctgggcagcaggcattcaggaggatcttgtcccctttcctctgctcactcagtttcctggcgtggatcctggacagaacggtgacgccaatcttcgtcaccccgtatgcgctgctgggccagccctccttctggtgcactcccttctttgtatcctccacaaacttgttcatgagccccaccagctcctcctcagtgatggtctcactgcggaacttctgctgcagctctgggctgcagcttttaagggctctgacgctcatgatgctagatacgttcaccactctcccttggggttttattagagggagtaattctgtgcacacatctcgggtaccaaagaaatttgttttcatcgtcacttcagcttgaatatgaaagggtgtgggatcagcaaccttgaaggcgatgcccgcgttgttgaccagcacgtccaggcccccgtactccttgcgcaggaagtcgcgcagggcgcggatgctctgcagatcgtcgatgtccagctggtggaagcgcgggctcaggccctccgcctgcagctgctgtacggccgcctggccccgcgtcacg

SEQ ID NO: 157827 - DNA, 1000 bp, Homo Sapiens
ttttttttttttttttggtttttattaacaaatgtttattatgcagaaagagaaacaatttaaatggagagtcgacgggatggcatcactatattgtactaggctcctgggttgctgggttcttaacacaatgggggagtcagggggaagagtctcacaggatgtcctgatatgagcagtgcttcttaaaccataacacaaggactattagaatcaccaagggcactatcactaccaaggcaatccaattcatggaagagtggtgtccccagtagaggatgatgtcctggcctcctagactgctgtgtctcactcgacaagacaggccagcaggctcctcagatgccacctccaggatcacctgaagataccatgtcccatcagcattaggaagaatatcaccatgtttagtgcccagttgctcctgttcattccgcatccatgtcacccaaacaggctttgggtagaagccggaggcatgacaaaccagcaacagctggccagacccaaggctggggcgactggacagccaggcttctggcctcacttgcctgtgtacatacatcttccctgcatccaggagacccaagagaaatcgggggcaagtgcttcttatgagattatacactgtttctgtgacgccttcatactgatgattgagtagatgacagacactttgggccaaacttccacagcctggagatggcacccatgttgtattctggaaactcagtaaatctaatccgttgaaagctacctgaaagaagccttctgggctctttccagaatgcagctcacagcccgctttcacctgtacttcaaagggatatttcgagtaatcttgacttgcatggtcttgaatctcccgagttaatccaaagaggtagaaacgaaataacaactctaggtctgacaactcttcattgctgaagttgcccttggaccagttatgcaggaaaattattgtgcctgattcactgtcccagccatgagtctgcaa

SEQ ID NO: 157828 - DNA, 1000 bp, Homo Sapiens
tttttttttttttttttttttttttttttttttttttttttttttttttttttttttttttttttttttttttttttatgatttatcttcgtttattaattacaccaagtaaaaatgtgagacgcctctgtttcttataacctaactttcttttaaagagaaaatgtccttcttcagtcgtaaatccaaatttacaatagaaactgtgtcctccaactgccaatatgacatccagggcaaactttttataaaagacacacaaactcctgggtttgtcatcagtcagtaggtatgtatttgaggtgtcccacatagtattttgtaaaaacttgagtcaaccttttaaaatcaggcatgttcgctgaaaatccagatttccagttttcttgaaaaacggttaaagccaagccaggtcctgactttatacttgacaacaagcagctgcagctgattcctttggataggacatgtgtgttccagttccttacagatcccatcacacacactcacatcagctcttacctgcttgtccctggtaggtcttcagatacaagtttgcacacctttgcacttctgatttcacagagccatttgggcttataaacttgtagtgtaatttttgaaaaagaatttaaattcttttagataaatgttaaaagggtgtgatgaaagctgcctcatgactgttctctactttttcaaggtatctctcctatcttcaattccttacatcttcaattcctgagcagaccaggactgaagtcttgggaacctgaggtccagaggtcctgggttccagagacacagatgtggcaaggcgagtcacaggacgccctgataggaagtttgcctcttaaaccgggaggtaaagcccacaatgaggaggaacagcaagcacgccaggactgccaaggcaatcaagcccatggaggtgtagctcccaccccagtagaggacgatgtcctggccctctagactgctgtgcttcacccgacaggac

SEQ ID NO: 157829 - DNA, 1000 bp, Homo Sapiens
tttttttttttttttttttttttttttttttttttttttttttttttttttttttttttttttttttttttttttttttttttttttttttttttttttttttttttttttttttttttttttttgctgtttacccattaaagaggatgctacaaatgtttattcattaaagccactcataacagcatagtacaaccctatttaaaaaagaaagacatattttacatgtatgtgtagaaaataatcaggaagaatgtacaccatattaacaggagattattcctaaggtgaagaattatgagtggttcttatttccttatctacttaagttttttctctccaatgggcaggcattgcttgtaccataccttaagcaaggaagtgcatgtttgggacagcagtttgggctctcagcctccttaagagagtcaggtctgcctcatccctgtatctgctagttgagcagaggccagggctgtgtgaggggctctccaacaattgtctttacaaagtataaaaagtcatcagtgatcccaggaacatgtttgtatctcaaattcagagattcaagagggccttagtttaacctcactgatgctcaaattctatttgtaaaggggtagcctgtcctctttcatgggcccctctgcaatgcaagggctgggagagcaattccgcctccacataggggtttcacagagattttctttagagatagagggattcattttccagggttaagctcaccacttcattttattttaggtctatacaattttaggcttgattataaaaaaaaaaagtctgatattgtttacattatagaactctgccaaaggcagttctcttctttaattcattacctcctcgaggctctgggcacagtatcccaggtatcaagaagtacttgttcccttgccgttggagactcaagcacctcaccctgagacaggggcctcggaaagaaagacctgaatggtgtggaggaaagagccctgag

SEQ ID NO: 157830 - DNA, 1000 bp, Homo Sapiens
ttttttttttttttttttgtgtttcagtatcactttaattgcagtatttaaacacatcactttgtattcagaaaaaatatctacccaatactctcttctctggaaatttctatttccaaccgtcattgaaaccaggatccctgttcaacccctctggaaagaaatcaacagcaaacaaggacctgggtcacccacagaagaggcagctggtgataagggttaggagctgatctgggctatgaccatatgggggtgcagagcaaggaaggggctcagggtgagggaggcagagacagaaaagcatctgttgggggactgaggcaacagctcaacccaggagtcggcaggagggaggaggaagccatggagatcagaggataaggctaggatccagcctcagaggaagaggatttttcggaagagtacaggtgagaggctcagctccaagacctggtcccatggtcctgcctactttgatccagagggagaaaaaagagcccaaaaagagtttctgtgtggccccagagagactagaactgagctgtttgtcctaaaacttgggaggcctgttctaggctccagccagaaaactgtgcaggactctgcaaatggtagagggggcacatggagctcagtggaacttagagaacaagggaggagctggtgaccaagtccacagtgtcttggaggagagatgagggaagtggttcaaggcaacacgtttttctggctatatcattacaagagagcaggtgcaaaaggttactttggtttcctcaaagtagagaaagaaaatacagggaagaaacggtaaaaatcaaagcttcctgggagaaaattgtagcctagaaaagctcatctttcccctgggggttcctgtattgcggcagagaggagggggtaggggaagggggtcctgtgtgagtgctgcaaggccatcagttgttcctgggagcttctccagaccttggctttcccccgtcacacgtttacccaaaga

SEQ ID NO: 157831 - DNA, 1000 bp, Homo Sapiens
gtaggccgacagatggggacaggaagctgtggacgaaagccccaggtcccgtgggagaggtgacagcagcaggggcacgcagccacgtgggtccccaggggaatgtgaaggcggagggctccaggcgaactggggattaaacaaatatttacaggcagcagggaagtgcccagcgcacgtgacgggggcggggcgggactttggggagggcggggcctaacggtatcgagcgagccggttgtagacgtggtccaggtttctgcacaggaatatcgagagcgtcatgaacccgagctcgagtaggccgacgcccaggcaaatgcccactatggaaataaggttgttgtgcagccacttctggaggccctgcgcgcagccctcgcggtagatgtggctctctgcagggacagcgcagatgtctgcactgtgtctggaccgcgccaggtgtccaagcctgctgagctggggcaagatcaccttatctaggattgtggagtcgttggtcgccgacaagttgtagcaggagcagggcacgcggtgcgcctccgacccgttacctctcaggatgaggacttggaaccagtcctgcgggtagtgccagccgcagcagcgcagctggaactgcacatagtcccagctctcctcggccgcggtctcctcggggttggtgccgtacttttggatggttttctctacgacgtcccgcaagcttcgctccagctgggcccgctgagtggagatgaggattcccagggtgatctgtgtggcaaacaggagcagcagcatcccaaaatacaggcccaggaggcagcggagctccttgagggcccccacacaacccaggagggcgatgcccatggtgaagattcctgagatggccaggactttggaccagatctgcagaggcacgaaggccaagcccacaaaggacacgaagctggtcttgtcgatgaggatccagatgccgaagcagaagatcaggctgccgaggacgaagaag

SEQ ID NO: 157832 - DNA, 1000 bp, Homo Sapiens
gactgatttaaaacttttaattaaaactctgctctaattaaaagcttattgggtattatactcaaaaaattcataattaatattttaaatcattctttacattgttacctagaatataagcaacttaaaaatacattaataaattaaatttttcagaaatgtgcttgtggtctgctgtagcagcaatagaaatagcccaacaaaatagcttaaaatgttttattaagtatatataatattacagggtaatatttacaaagttatgtttttttttaaataaaaaagtaccttggcaaagattgcagatattcaaagctttaaacagtgataaattgatttaatacatataaaaaaaaaaacctttaacggtaacacagctgtaaaacaactttggtcttcaaatcactgcaaaaaaatggctactgacaaatagcacacctttaattgctatgcaaaaaagctccaagagaggatcttgcacatagcaacactggagttctctttatttagaatggttaatagatatttatacgatgtgggatctaattctcaacaatggctttttgtaaataatgctccatttaataaaaacaaaatgttttcttctctcaccagtcatgataacaacacttttaagatttaagatgttgtcttacagaggagcttagtacaaatgctttctttttttcaaaaagagaaatttatgagaaagctggtcttcaatgatcttaattaagaactgtcaaagctaaaggcagaaaaactgcctggtcactcactgctcatctcttcaaagttacctggattatccctattagtcactgaaaatgacctaacaaaggaccccagcaggtgatggcagttagtaattttaaaatatgacacaagtaaaactgtttataaaaaaatccctcaaccaaataaaatacaataaaaaataaacggttgcccgacaatcatttctccagtttccaacaacaggtaaattaaggagtatgtg

SEQ ID NO: 157833 - DNA, 1000 bp, Homo Sapiens
cacttgtgtacatatttacatttatttacaaaagtatctacatcatcagtaaaaacaatttactgacaaaaaaagcaagcacctagtcatataataagttgatgacagccaaaactaatgcttgttctttgttagtgggtatttcttcttaaagcagctgcttcaagttacatttccaacagttgttcaaaaattgtaatactcaaatgagaaatcagatggctttttagtttttaaaataatttagttatgctgttgtcttcatcttctgttaccaatcaattggagttggttctgtctggttttctgtcacatttcagaataccattcatatacagcacaatacatgttgtaattactgctaatggtatgggtataagtgcatatctgtgtcttgaatgaccgctgcttgggatacaggttgtcaaaatgattgatgatgttgtattaaataatggattgctaagagtacactgtattttttgtggaagatcattttccatcttaaaatatatactggttgagttacgtttacattgctccataggacaatcccatgagtacattataagtcctcgatggctgttgtaatgctctggtatcatgcattggacttcaatgcttccattagtcaatgcacaagttagtgtgggagatggaagagactcaagcacataaagaaagaacttcatggtatcagtaatatttggcgattccatttcatactcatcttcatctgatgatgttaagttgtagatagtgaggctacctgacacagtgtctaaataaaccctatttttaaaagatgagaaagctctgaattcagaattttccagttctgcaactttatccttttgttttttccataggacctcttttaaaggcacattgcttggtacatggaaagttacattcccatacacaacaccatatatttgttgggaaaaacagctgatgaaaccaaagcagtgcagcaggcagaccacgctgaggaccccca

SEQ ID NO: 157834 - DNA, 1000 bp, Homo Sapiens
caattatttaaaaagatttcaataaaactgcctggctggctccgggccgcccctatccgctcagcccgtgcgccctcctcccccaccccattctaccatgggaagttcttggggggaggccaaagtcccttctagaggtggcttcacccttttcccaggaacagtccagtttcaggaagagggagcaggcagcagactggctggaagtgtcaggtgtgggtcagccggtggctggcactgcccagaatgaaggagatggtctgaggaaccccaggcctcaggttaggaaggaggggcacaggttcttgttggcatgagtgtcaactcagtgcaaaggactgtcctaatctggaaacctgaaagctgtcatctcacagatgtagggaagagaacttctacatgactctgactccagtgtccaccatgaccaagttttatgtaccttgttacattttgagctttgagcataagtcctagtgcgttgtgtatcatcagtcaacttccaatccttgttagagctgaggccagtccaatatgaattccctgaaccaccatttggcaacagtgaatttaagaagtagtaagagtgtgattgtggataaatttcactgaatgtggccagcttggaagacagagtttcacattgtttttggctctcctgccaattttttgaagtaagtgagatgtaaaagcagcttttctgatgcattatccatcccgacggacagcaggtgtctgctgagccgcatgtgaagaagggcttcagtctgttctccatgttgctcagcttctgctccaaggccctcctctgttgctcctcactttgcaaggtctccttcgtcttctgtctgtctgcctggcaggcctgtagctgcccttcggccgcctgatgagccctctgttccacctgtagtgcttcctgactctgcgccagctctctcctggacccctgcagatcctctgcactctgtcccagctgcgttatcttgaggcggagctg

SEQ ID NO: 157835 - DNA, 1000 bp, Homo Sapiens
tgcagttgggaagaatttattatcactaagtggccctgacagatcagggaggagggggtgacactaacgaggctgctacaatcagctcccctagaggcagcgattaagggctcattacccgctggggtgaggggagcctgggaaaggcagcggggcggggggattaggttaggaggtggggcagtttagagggaagaagagtgggacacccccaggggagtccaaggaggcctggcctggagaagagtgaggttaccctcccaccccccactgggggaatatgactaaggaagcccccagaagggctgaaaggagaatgtcccagggaagtgagctgagacactggagctgggtgcacagcaggcgggggcagcctggcaggagtaggggtgtcacggcttctccagctggacatctcctatgttgaggctgcccacatcctggtaggtgccctggaggccccgggagatgtcctcatacatggagcagtcgtccaggttcaggccttcataaaggttttcatcttcatattcatccccggcatccaacccgagcttctcgttctgccatcgtttcctgaacagcagcagcgtcccaggcaccaccgcgcagaacaggaggatgatcccctcggctgtgatgattcggttcttggtgccctcccccatgtccaggaagggcctggggggcggctggcgcacgcggaggtaggtgccgcaggactgctggtatgactcgttgccctcctggacccggcacacgtatatgcccccatggctcttgttcacattctggatgatcagcgtaccattggggtcctcgcccgggcccaagaactcagggggccacgtgtagttgccatggaggacgcgccaccaggtgacgttggcgttgttgctgctattgtgcgggcattggaagtgggcgtcttcccccaggctcaccatcaatgatgctgggaccttgtgcatccacagggcctggcacccagggcccaggt

SEQ ID NO: 157836 - DNA, 1000 bp, Homo Sapiens
tttttttgttgcccaggctaaagatttttctttatttaggtataaaaaaatacagtacttgtcatgcaccagtttggccaatatatagacattatctgtagagcaattactacaattatagaaaatagaaggttacaggaattgtttttccaactaaaaaacctgaattaatattgttaacctaaataacaacctgcttattatgcaaaaacccttattctatatgtctgtgagagctagaaacttgtaagtatcattagtaaaaaaatcattataagaagctagttattggttaaaacaaacaagtcagtgttatctacaatcccttgcagtgtgaggggctttgcccagagtgggaacctcggtccatgacgaagggtgagcttggtgtctccttccctgcccctctctgttgactgatgccacttctccaaggtgtgtttgcagtgaaacgttccagtggaagatgcatgggtgaccacagaggttgggcagggcagggccttgccttctgcaaggtgtgcctgagggtcagttccctgagatgtgacaacagcgaggtgtaaagacacatggctcggctccgtcatgcagtcatgagtgggtttggacattgtccagttttgctaaaggccacatcttgggttcctctaaaccaagggataaggagtagacagagaaaagaaagagagcatggattggcgaccaggtgaggcagagaaggggagacgtcttctgctccgggaacatctgccccttctcaggcaaaactggaggggtgctgaggagtctcaaagcaaggtctcagctcttccaggccttctccagagggggtgggtgtggaggtggccctcaccctgtgatctgtcactcctgatctccactgcccctccagaatgaattcacagttgcttcaaagtttaataagccatttccctgaatgtggttcagtgctcagtacagcacagttactggcatggcaggccagtgaggtcacttc

SEQ ID NO: 157837 - DNA, 1000 bp, Homo Sapiens
tttttttttttttttcattgttccaaagttgttttttattttatatttgttgaaagaaataaaattatatttaaaaaaaatagagaaatctcacaaactgatgaaagccaggaacaaaaagaacaagttagtactttttcctgagaggcagatctaacagctgcagaatggacttcttccttcccagcttttgtgaaacaaaacaattctcctaaggcatcagaaagcactgagtgcaaaatgggttgttcaggtacaaggtctcaagccctctaatggggactgggaaacgtgaaaagctgctacaatttcctctcctttaataccaaatgttaaactgtctatacttctactttttatgtaaatttgagaatttcacactcatgacctgcatttcggacctggtcgtgtttgattaaaatcttactacttagtgatctgcactggcatcccaacaactgattgcaggggccagcagcaggaagagctgctctgatctcaccatccgcagccaaaaccagccaaagagcacccatcccaggagactcagatgcagctagaaatttatgctaaagcctaactcctaactatgctggacctgcccacaagggcagatcacatcctagtggttcacaggtcacacacagaacaaaagttacaaaagtcacctcacaattcccgaagctctaaattgattcattccccacacgtggtttccctaattttatactgataaatctatcaaattaaaagctttcatttccaaccacttcaataagatagacaacaccatgcttaacatttttgttctctgcctaattgcttgcttctgctaaactttgcatttccatggctaataggaaagcttgaacccatttttccaaaagttccaatcttgtgttctgatttgaaatactgagtacacacccctgatgctttctctaaagtttctttttcaagatacttaagtcaattcatataactggtataaattccatgg

SEQ ID NO: 157838 - DNA, 1000 bp, Homo Sapiens
tgcagttatttttaaaactttattttaaaaatatgagcatctattttaaaagttttgataattattgccattattttcttgtgattggtacaatttaaaaataagtctatgttttcacattgattttaaaaaatatagcatgtttgaattacaaatgattaagcaaactctattacttcatagctgaccatcttccagaaaattcccacttaattgaatacttagaaaaaaatggccagtggccgattgaaaggtatattaaaattaagggcagttttaattctgaagacaaatatcttcatggaaatctatttgtaagcttctgagattgctgctgaaagtctacagtctgtgaatataccaattcccctttacaactgatgcagatcattatgaaatactggaaggcataccctacaatttaggaattggtgtggctgccactgctatgctctcaattgcacactcatcagttcctctgcggatccggaagtagccattctcaccccagccggtgccccagctgtttttaacaatccagtaatccatcccagaggctgagtcagtgccatagcccacaagcagaacagcatgattagtcagctcaaaggggttgaaagggtctcttagaccagtgtggtggtagatcccctttttgtagtggaggaagtcatcatatacttcaaaagcaactgccatgggcccatgatggaccaactcaagcttcatcagggcttcattgcagcctccatagaaacctcctacatagtggtactcagaggagtaataacgaaagcagtcttccttcattttgcatggagaatcagtgcctgtgtaggggaagcaagcttcttccaccagcccaaaatcttgggcgtactttcctgcaataaggtatgggaagccgccttcacagccttgagcatactggctacaagacacaacctcctgagggcttaggattggggtctgagaattgttggttagtatacggattctc

SEQ ID NO: 157839 - DNA, 1000 bp, Homo Sapiens
cagacgcaggcaggccaaaaccctagtttatttcagcatcagcagtatcttagccatcaaaaaaataaactctaccaagggtgacggaagtctctacagcaaggctaagggctcgccagacggcgaacatcaggggtgcatggtgggcactgcccaggcaataagttaggaagcagcagggctggtgtcgggtgtgggccgggcttcatttctgggcaggcatgaggtcgtcgatggcctggccctgctccagccgctgctccatctcgatgagcagcttcactccgtccaccaccatctgcaccagctccacctctgagaagcccaggcggtcagcgttggagacgtcgaagaccccgcccaccgcagccgtgtccacaccgcctgtgcctcgcttctgaagtcgcagccgcttaagcacctccgagaacttctcatgcttgcccaggttgggcagcttgatatgcacacctgcccgcagcccggtgcccaggttggatgggcaggtgaggatgtagcccaggtgagggttccacatgaactcatagtccttagacttgaagagagtttcaatctgggtgaggccggtgcagaagcgggtgaacacctccttcatgttgccccccttctgcatggagatgacccgcaggtggtcctcctcgttgacccacaccaggaaggtcttattgtcattgtgccagataccgcgggcgtcgggccagtcgcgggccatgcccgaggccagcagcaggggcgacacgggcttgtcgaagaggaagtggtcgtcgatgagctgctgctgctccgcctccgtcatgctcttgagcgcgtagtatcggcccgccaggtcgccgtccaggctggacagggcttccaccgcgagcttctcgatggcgcggcgctccccgcggctgcagtgcggggggaggcagaagccacggatgctgcggcccgtgcgcacccgcgagctcagcacgtagttggggtccaggtcgtcgcc

SEQ ID NO: 157840 - DNA, 1000 bp, Homo Sapiens
ttttttttttttttttttgacattaatgtgacaatgtgacatatactttacaattatgatcacttaagcaaatacctctgaccccataattctaattaatgtatatcattaagtgaatcacactgactttactctgaatttccttgacagccatgctaaaatacttaccttggacataagctaagctttaagtttgttgtttataacttcaaagagagacaagggacagtgacttaagaatattctaagctataaatttacatgtggactttgctacacacctgggatgcagccagatgagttttgttccattgcagtacatctgatgaccagaattctatcagagaatgttaatgaacgaaaagcctgagctttaagactgagattggtaccacgggtagtcatggccacctgctggcagcgtagggtactgcagcccagctatggttcagactaaaagccgagaaacgcctgtggtccagggaaaggtatgaagatcatataaaccggcggtggacaggaaatgccacagtcaagaagatgcccctgggatgctgagctcttacaactcgaaatcaacagcttttacaaataaaaccgctgcaaaagcaatagctcttacaaataaaactgataatttggacttctgggcaccaaatgttttcataacgaaaacatcaattatgcattataataccaagtacaccttacacttactgattcttctccttaactttcagtgtattcctttaggagattgtcgcaccttggtcagaatacatcgacagttttataatagaacagaaaagcttccatttgcagcaatatattttagttggcttgttgaaacacatctctcttcctgaaagcaagcaattcttgaagtggatcaaccttgtcatcatatcccttttattcttcacccttttattcttcactggtatgacagtccctataccatcttagccactgcttttttgtttctacttattttccatcc

SEQ ID NO: 157841 - DNA, 539 bp, Homo Sapiens
aaggtttgcaggaggcctttaattgtgaagagcgcaatcagaaaacagatatgctggtcaaggaggtggccagcccgggagatgcgctggagcaggggagagatgcccctgcgcctagtggcctacagcattctgggctaggtgtgggagtgggtgggcagtctcactgcttggagcgtccagcgtcatggcagatgccaaagttggtgttggtgatggagcccacgatggtcttgtctccctcacaggtcaggccacgctcacagggacacttgtagtaaatcccatagagcgtcttgacagagcactcgctgttctcgctggccatggatgtgcagcgggccaggcccagcgcacttgaatgctggcagcaattgctcttacactgggcactattcatgcagagctcaccgttctccaggttgataatgatcccccgggggccaggagctgcataggccacagagagggcgacaagcaggaggatcaggatcttctccatggtgagtgggacagctggtgtgggtggcgggagacag

SEQ ID NO: 157842 - DNA, 1000 bp, Homo Sapiens
tggcttccagagaagtgagaatgataataaataagtgtaaaaagagtcaacaacacaccctttaagccaagaaaaaaaatacatcaggagggacagtcacaattgagtagactgagaggaggcgtgaggggctggaccagagggccaggagggagcgaggcgtgatggggtgagggcccccctcccagcgcctggagatggggaggagtggaataggctgtgggtagcagctgctgcgagtctccaccccgaccaaagcagctgctcctcctgtgcccaggcccagcccatgctctgtggccatgcacctagcaggcacctagcgggacagtggcgtctgcttcagggacatgagcaccgagcgcaggcgggacacatctttgcactgcttgctgctcttggggttgaagtcacatagctgggccaccttctcccactctgtgcctggggtctcctccttggattccttcacgaaagcctcctcggatgcccggttgttgatcttgttcttctctacttgttcactctggcgctggttccactcctccaggtccttcttggccttctcccgccattcctgttccgtgaccttagatgcagcatccagctcttgcagccgtttcctctgctcctctcgccacttgcggatgctctcaggctcctgggtcagcctgtcagcctgggcaatggctgcgtagccatcagcaggaccgttggcctcctgaaacacatctccattgactgtggtccccatgtcctcagaaccagccccactcgtggggcccggctgcgcgggggccgcatggctgccggcaggtgccccgaagccctcgtcgttctctatgcctgcaatctcgctctcctgctgggccaggaaggcggccgccgggtcctcctccgccgcctccggggcaccgctctccgacgacgagaagaagccaaagtcatcagccattttccccgcgcctccgccggagcctccgctgcgctcggctctgcc

SEQ ID NO: 157843 - DNA, 1000 bp, Homo Sapiens
ttttttttttttttttttaaggtatgcaaagcttacaaatttattagcagcttgtgcagtaagtttcttttaatgcgtctgtggcaatactagcaacaaattaataaaagcttaatttttatacaaatagttttattacaaatttgaattcttaagaaatacacatttaaagaaattacataaaaggccttagtagtcttagaaatgttttggagacttttagtgaaatgtcatttcaggcctagtggtccgaatctgccctcctgcggtccatgcgatgccctgctgaggtctgtgaacacagctcatgagaaaccacggaaatggcccgaatgtgcttacgtgtgaaaatactgatactgtgattcaacagagctgtttttcaagccaggatgcagaatgaggaatactaatgaaatgacggcctttaaggttgttgcttttgaagtcaagtcattcagtttgtgattagtgtttaaaaccctgaaaatatttaatacagaataaaaacaataagctcaaagtacatgtttcactataatagacaccatattcatgaacctgggtttggttttggcaacacataatttttggtttagaagtgaacaatgaaaacggatgtttcacattcaatatcctagtctttaaaaacctatgttaaaggacagcacagtctttcaaaggaagaaaactatgtaagctttattttaacagtggaagttaaactaaaccttgatctgcctaattgctgacatctatataaattactaatatatatatatatttaatttttgactatttttggaccatctttattccacaggaaaattgtgatttctgcaaaagcagctgcaaagtaccacacatagcagaaagacagaaatttatactggggggttggaagatatggctactgagtctgtaattccatttggaggttcaaaaaaccatttttacattgctattatttgtacagaccaagggacctaaattttgaaac

SEQ ID NO: 157844 - DNA, 523 bp, Homo Sapiens
tttttttttttttttttttatgggagaaggagccaatgcaatggctagtctttactggaaagaagaaactttacagcacattttgagtaatttagtgcaggtgctcagtgtgccagctgctggggcaccagcttgtaatgggctccacagcgggggcatcgctgggcctcgcctttgtgcagccaaaaccagacgacgctggtattgtcctcttcacagatgcagcctactattctcttgttggagatggaggggactaaattagggtcttccctggtgcctgaagctccctttggggccagtacattgtatgggtccagtcccttctttgcagccagcatgatctccctctccaacccagtcgcctgctcttcatcagtgggaacaccacctccagatgccatggagcgcatcgcggccgcgccactggggccgcgagccctcagggcctgcgcggccagcgttccagctccgcgaagtaaccttgaagccattgcgtccgcgactagcagcaaaacttccg

SEQ ID NO: 157845 - DNA, 448 bp, Homo Sapiens
tttttttttttttttttttttttttttttttttttttttttttcacgtcataagtttattgacaaacatatctagtatggcatatgagttctagtttgatccacttccagaggctgcacctcttaaaatgctcttcatatctgttaaatggaggaactgaaacatccttatgttttaagcagttggtgtcttactacaaggaagggtgtagcaaatgcagatccaaagtacaaacacatcttagctagtaacgaccacttgttttccactgaaaatggcaaattcttcccagggccctcctcatagtggctcctacggaccacagaggttgtgaacctccggatgctctggcccaacataccgctgctggaagctctgcgaaaggcgcagagaatgaggacagatgaaatggcggcacctcaccaagaccttttttttcacgaccttg

SEQ ID NO: 157846 - DNA, 1000 bp, Homo Sapiens
gcttcaaaccaaagagattttaatggctcttgtttcttccccagggccctaataggggtggtctcgcacatgctccatgattgccttcaagccaagccaggtctcctcggctgtgggcaggatctgacgggctggcaagaggaagccgtagcgccctgtgtctctcagttcaaaggcaaatgagtacttgatgccataatcataggaccagtcaatgcttcctccactggcttggtagatgacagagcagattggtcccactttgtacttggtgccatgcaggcttctcagagattgggcagccttttgggccacttcactcagctcatcaaagtcatctaacttggtacatttgtacccataggggaacatcagcagctgggaatagctgtggaggataatgaaggccttgacttttccatgactcttgatgaagtccactatggatttcacttcaacttcagagttggcactgggtccgtggtatgaatcagagcaagggttgctgctggctccaggtcctccaaaacctgcatcccagttccggttaggatccacaccaacacagaggcttccagataccttggaccgggtcttccgccacatacgatttttggtttgagagaacacgtatccatcagggtttgtgactggcaggaggaagatatccagggcgtccagaatggaagtgatggatgggtcctttccataatcagaaacaatcttatttgctgtccaaagtgccgtagcttgtgtaacccactctcgagcatggatcccagcatccagccagatagctggcttgtctcctccggtgctgaacttgagcacgttcataggccggttctcaaaagaagagccaatattcactttgctcactagaccagggtgctcagccacgaggttatccatttcttgggaaatctcttccagggtatggtaggccccaaaattgaagttaccactccgttctcttctcctattaaaaagcatttcttca

SEQ ID NO: 157847 - DNA, 1000 bp, Homo Sapiens
agactttattacacattattatgttaccagacaaatgcagataattcttaatttatcaaatttgtgagcttaattaacaaaaatatttgaccctcaccagaaaaacagataactctaaatctactctgaaaatctaatcaattgcgaagtattacctatttggagactatgtattatatcaaagataaagctactattctcacagaacatatggggtcattggcagccaaccaataatgaagtaaatattctaatatttgggaaaatactgagaaaactaataaattgtcctggatattatttattcttgcctttacaaaagacttacacatccaaatgagattagtttagaatagaggtttttagttcagaaaatgttcaaagtccaatacagtcatggctaatcagagactagagaacctttataaaggtaagtaggcttgaaaacccttggaaactgagcagtcttattttgaactagcatgttttaatcaaaggtatggaattaatcaaatatcaattaagaattactggaatgcacactcatgccaaatgacaactaacatgttatttcctactatgatgactctttgatttgagacagatggcataaaaaaatattgctagctatacaataaattttactcttctgcttctgctctctaaagaaaaatcttattttttcacataagaagctcatggaatcgaatgttaattaaagaaaagatagggtaagtacaactgggggaaagacagtacctctaattacataggaaatccatgaaagaattaatcatcataagagaagaatcatttttccagtagccccactaccatgaatgatattttcatgagcctcggccaccttctccaatggatattgagaacctatcacaggtttcaaccagccaatttccattccagcttgaagggctgctgcatattgctgaaattcctccttggttgaggaaaagagagtaactccaattatactcgactc

SEQ ID NO: 157848 - DNA, 1000 bp, Homo Sapiens
tttttttttttttttttttttttttttttttttgaatgaattaaaagtttaattctgaaccattttttataaccgcattttctcttgaagcatcgtatcacagcaggttacaacaactttgggataaaaggcaactggtaaactgtccaaaacaaggttccaaataacacctcttactgatttaccctacccatacatatcccaaatagtttttgatcaaaaacatgaaatagatccacctgcttattttaagcatattaaaaaggaaactaattggaccattttctatttgtctattttatacaaaaaggctacacaattgttacactttattcagattacaattaattagagtgattatgaattaattagtgttctacaccattactcaattcttaaaaattagaaattgctgtagcagtattcactataacttaacactacgagagacttaaaaaacagttactgcaaaaaaaaaaaaaaaaaaaaaaaaaaaagagctacttcaaagcaagcaaagtcagtaccattacagatattcttaaaaaaaaaaaaaaaaaattttaacaagcaaggctagggtttgctaaattccatcttgtgatccattcttgtgcattcttcacttcttgagtcactcccaaaatccatttgtattgttactcctcgaccaaaaaggaccagaacaaaaagtttacttcaattgttcccataggaaactcagcttggttagtgtgtcaggcactttctgagataccagcccacccctcgagccctctcagcaactctacaggccaatcacaatgcaagttcagacaatacagctgtataaagagagaaaggctgctattaatgtttaaaacagcaaatgttactcatttgagtattaagttgcaaaagctgtggcaaaaaacattaaagttaataacttccacacatgatcacataacaaccagaaatctgagaacattccaatgttccaagacatctcctttcaaag

SEQ ID NO: 157849 - DNA, 1000 bp, Homo Sapiens
ctgccttactgatttatttcttaagttagagtacacatcgagtctggccagaatatagtgccacgtagctatgcctattgctaggtcacattaagaaagtaacttcatattgcccttcaactgcagtaacaccatcctggaagaaaaatggaccctccagtcaaagctgtctatatatgagagggttttagaggaagtttcccccaaaagattctttgttctgtaagtgaccccttgatgcaaggagtgtttcccagccctagaaataggaagcgcacgcacaggcatggggattttaaaatcacgcttcagagacagacatcttggtgtttcatgttgacaccaaactgaccgtccctttgaatgaggaccagccacagttggcactgagaattccccccaactcagggcagtatagagattttgtctctggtttcatggcttagtggcaagcaataccctgaggttcccagcaccaagtgttcaaatcctagctaaaatcctctctccatgctcggtaagtccatgtggcacactttataacggtctaggtatccaagggaaagcgacaggcaacgcgctacgatctgcaatgatgcgaggtagttgagaaacaaggtgaccgatggggacatctgcagccccacccaccatcggttcccatcgcgatgttctgccgcaactcaagaactgcaaggagagtgtcacgcaacaggcagacaccacagaggagccagtacacgtgatgggacatgcaagtgacaagtttcccaaatacctttccgcataataaaataatcttaataaaaacataatttaaagaaagtctccaaagccgagtgtaaagtcagagctgtaaactctacccaagtttgaagggtctcttgaagaatcatccgctacaagatcagtcatgatttattgatggaaacttcagttcggtgatttcagagtcaggggagctgcttccactcctgtcactataggtgtccctgggtga

SEQ ID NO: 157850 - DNA, 1000 bp, Homo Sapiens
tttttttttttttttttttttttttttttttttttttttttttttttttttttttttttttttttttttttttttttttttttttgaggggaggccggaggccaacaactgtatttccatgtcagctggggctctcagccgcccaaggggaggacaacagaggtcagctgcagaggaaggctggcaccagcccccaatcccaaccccacctccaggccaatacatgcccctgggactggctcagtcccagcaccaccctgcaggctccaacaaggtgggttttgtcccctctcactccttccagctcatcctcaggcctctagcggcctcatcctcaacgggcccgggacactgaacaggtagggtggcagagcccagctgggcccaagctgggcagaggggccctcaggcagggcaggtttccaagggagggcccgggaggacggcctggtgtggggtaggggctcagcccagcgggcgctggtagggccggggaggggactccctggagatgaagggagccccaggatacacgagctcggctgccaagcttgggtggggtcttccaatgcacgaaacagatctgtgctctggatcagctctacccccaccaaacagatggagagacagacaggcaggcagcatttctgaacccagggaggggaaaaccacagaacaaaacagcaagtcgggcttgggccgccggcttccagggcgcccaggacagtgggcgggcgagtgtgtgggtgtgtgtgggaggggccgctgggccaggggcctcctgctctgggactctcctctgtttctgtgctggcgcgcggacgccttgggaactagaggcgggcagcctcggcgaagcccaccctgttgttgtcacggtcaaacacagtgtagtagcggccgatgaagacgtcgcccaggatccagagtggcccgctgggtggcgggatgtccatgcccatgaagccgctcaggcagagggtcttcccggcctgcgaca

SEQ ID NO: 157851 - DNA, 1000 bp, Homo Sapiens
tacatttgaaattaaattttatttaaacaggtaaaaatttatacatccttttaaaaacgaaaatgcaaagtcagtaagtgaatcaataatataaacctatttatagcagtaattaaaatagaggtaacatttaccagtgtgaaaatatcacagaattcaaatcacactcggatcttcaatgattcgagtgtgtatccgacacagcgggggctggtagactgaagatgaattcctcccatgcatgcgccatccccagtcaagtccttcctcatcaccgtccaccagctcacacagtggggtagctggctgctgaggcaattccacaatggtttctccggtctttggccatctttacgtagccacccatgccccattcttcaccccagctgttcttcaccagccaatatttattgttatctgattctgtgctttcaaatccgtagccaaccaccagcacaccatgatccatgtcttcactgctacagtctggctcaaaataaatgccttctttatagaacaggaaggactcatgacctgcatcaatagcaacagaaatgggccccacagttgcaactgccttcatcagggccttctcctgcttagggatgtccacaaagccggtgtcattagcaacagaatacttgggattgtacttacaggattcttctgttgcctcatatggataggattcctcagagtccaggcctccattatcctgaacatactggaaagcataatccattaggccaccattgcagccttcattgccttgaggcccagagcagtctaccagattctgctcactcagtgagataagcctcccagttttccggaacatctgtccttcaagagcaccagtagcactaaaagcccaacaagaaccacactgaccctgattcttcacaggagtcacgtagcctttctctctccaatccacagatctgggggcctcataaaacagaggttcctggaacactttccccttcctgggcttacggtt

SEQ ID NO: 157852 - DNA, 1000 bp, Homo Sapiens
ttttttttttttttttttaagttgaaaaataccttgtttaagacctccctgggacccacaggggcacgtgtggccgtaagcctgtggcagcccaatcgttagcctttttcttctttgagcctctctaagtacatctgcagggacttctggatggagtctttggagatgaagctgacgaagttctgcacgtccgcatcgcgctgcgtgaccaggcggctggccgtggcctttcgcatcatggccttggtcagctgtcgagcatggtctggaatggccatccactgggctatcgctgacagcgcagtgctctgcacctgctcctccgggaccacctggtccactatgcccacctgcagggcctccgccggcgggaagagcagccccagctgcagggcacgctccgccgcccggtgcccgatggtgttctccagggtgtctttcaaccagaaaggggcgatgatgcccagctgggtctcattgagtcctatgcagtacctggggttgtccgccaggatgcggtagtcacaggtcagggccaccaggcagcctccagcggggcaggctccgttgatggcggagaccagcaccaggttggactggtacaaccgcagccacagctcctgaacggccttccagtacccagcgtagtgggcggggctcctcccacacatctccgtcaggtccaggccggccgagaagacacccgggcggtccgaggtcagaatgacaccgcggaagctcttgtcattctccagcttctccaggctgatgaccagctccgtcagaaactccaggctcaggctgttcactggggggttcttgaatttcatcacagcgacccctgcgcccgcgtccggctccaccagcacccgctggctcccgaagcgccgcgcgccgtctccgccgccggccgcccgctccgtccgcccgagggccgcgcccgggagccgggcccccgcgcggagcagaacgcgcgccgggactcgcacagaagccacca

SEQ ID NO: 157853 - DNA, 1000 bp, Homo Sapiens
tttttttcttcttatattctactttatttggtaaaactcagaaactaacaattcacatcctcccaccttcttctttccgaagaaggcagtttgcagagacaaaagggctgtggcgtggggatcatccaccatctccaggttttacacccaggctacccatggcttggcagtcaggcctctaggcctgatgctctcagaggcaatagaagaaaagtaaaaggaaggtctcacttcacagacaatgaaaccctcctaaccctcttccccactacccacaactccctacactgccaatctaaataaaaagaggacaatgcatgagtgtgagatacacatacacacacacacatacacacacacacacgcacagcttcctttcagccaaagaactgcaaaatccttccccggaaggaggacaactggcaacaccaatcaaggcttggtggtctaaggtgatggctggaatcatgtgagactggtaaaaatccagggagaaaatgtttcaccttcagctcattcccaagtctctatgaagcccgccccacttccacataggggaactgtggctctgggggcagctggcttagggaaaggcctcccatggccaagaagacgatggtggagaggagggggagggcagcagggcaaagcctttggggagggtcagcaaaggggccccctgcccttggctaatggatccgagttagctcctccacaaccttgatgaggtcgtctgcagtggcctctcgcttcataccgctgccatcgtcatactgtaggtttgccaccacctcctgcatcttggggcggctaatatccaggaaactctcaatcaagtcaccgtcgatgaaacctgtggctggttctgtcttccgctcggtgtgaaaggatctccagaaggagtgctcgatcttccccacacttttgatgactttattgagtcgattctgcatgtccagcaggaggttgtaccagctctctgacagtgaggtcaccagcc

SEQ ID NO: 157854 - DNA, 1000 bp, Homo Sapiens
ttttttttttttttttttttttggcttgtgtgtgaatctctttattgtttctctccagagcccctgcagcaggggaggggagggcgtggggaggtgggcgcccctcccaccagcctgagaccgctctctgcctctctcctctcctctcttctccagcatctcacccactttctctccttctcaatctcctgctcccacctccagcaccttcggggattccctcttgtagcccctgctttctaagtccaccctgggctggggaaaggaaagtaagagaccacggggacaatttcaagccccccagtctccacaggggctagtccccctggctacctgcctggctttctctctcctgggctaggggctggggaggtctgcggggctcagtcctggccctgcagtatcccaacaccctgctctggggctgtctccagagccaaaggctagtgcctgaggtcacagaggtgggagggacagggccaccgctcccgcctgggctccatccagcacaagagccaggctcactcactgccaacagccaaggctcacagctggggtccgcagaggtggccggggcatgccctgtgaccaggcagggatgggctatgtcgctgttggggaccacgagggatggccagtgaggaggggtcagaggctgtgaggggaggactgaggctgggtgtggtgtcctgggatggaagaaggctggcttcagggagcagtgaggacaggggtgaggacggtctctggtggcagagggtctctgtctttagagcacttcatgctgctgctgtgtggcctcactgacgacctccccatcccgtgtctcgatggtcttgatcatcaccgtcttcttggtatggacctcagaacccctttgctcagggctggtttctcggaagttgagggcagagtaggtctggatggggagattgatccggctctcctctccctccagcagcttccggtaggtggcaatctccacatccagggccatctt

SEQ ID NO: 157855 - DNA, 1000 bp, Homo Sapiens
ttttttttttttttttttttttttttaaggacttcagataccatcttattctagagacgtagctgaccaaaaagtaggggaggggctgggtctgcaaattaataaatagaagagggggtaagaccttcctgggaccgcagccgctcagtcctcgttcttctcatgcatgaaggcatccatcttctgggcaaaggtttcagccacaagcagggggaagaccagggaggcgtcagcatagaccttgacgggctgtgcatccacccggatcttgccccaggagacagcctcgtctggtcgggcacctgagtcagagccatcaaactcctgggctgtgttgatgtaaacagcgtagtcggccccgttccgcatgaggttggcattggcaatgtggtgcttgaccacgcccccgcccagaatgatcatcccagtgcacttggcaaagatggcctgtgtgttgatgagcctcaggtcctcaacgatgtccaggaccaggcccgggttcttgtaggaatggaagaagatcatgtcgcccagcgagccgtctgtaagtgcgggactaaacacagggatgtggttcttctgggcccagtaatacacggactctgggttgttgatctccttgcccagccgggcgatcatcttagaaggcgtccactttacaccctctgtgttctgctccatcaccatctggtccagaatgggcatcagccagtcctcaaacttgcagtaattctcattgggcaccagcaggtttccgatcctattgatcccgttctcccggagctccttccccctgaggctaaactcgcccaagtatgtgggcgccaggcacttgatgaggtcttcctccacgccgccagctgtggtcaccaatacgtccaccatgttgtgctgcacaaggtagcgaatggtctcacggatgcctgaactgatgaggttggatgtatatcccaggaaaatggtgcagctggtaagtgggcggcggctctgggtcaggtcc

SEQ ID NO: 157856 - DNA, 1000 bp, Homo Sapiens
ttttttttttttttttataaaacacatcacaattttattgcttgaagaatacagcatatgaaatcacaagaatgtcaaaatgaaaagtcactaggcttcaaacgtataatacattatcagatgcagtaaaatattaacctgaactctgcatcagaaaaaaaaaaaaaggtgtggaaaatatctaagttgtttacttaagaaacagatatacttaaaatagaaagtataaggatgttacagtacaaattagaaaagccaacacgtattaacttatcgttctagactagactacctttggtacttaaactttttaaaaaacaatttcttctatctcatccaaatgcacttcatgggtatgacatccatgaagtaacttcaacttaaaacattcagcaaaattaaccttttcacttcatgggggaagtatatttaataaatgtataacaatatttcccttttactaaaactgcaaaatatgatcattaagaaacctaacagttataaaactttacttacttagctctccaattaaaattggaatcctgggagccacaatctatttttgggcttggtgaatacataagtttaaaagatttggcaactgacataggaatttaattacttaatactatcttaagtgacttttcctttctgtttccaaaatatagacattatgccatttcttcaacatcctggattcctataaacactaccatactgtatttattagaaccaaattaaagcttctctaacaagcaggtagaaactatttatgttccatatacggctgataagttataacacaacttatgtttcatatagggctgatcagttaattcatatagggctgatcagttgtaacataacttcttaagcaaaactaatcttttttttaaagctatcactcaattatggagacaataatgtcatctcaaaaggtaatgttggactctaggccatctagttgggaaaatgtaaaagtaattctaaaaacaataag

SEQ ID NO: 157857 - DNA, 1000 bp, Homo Sapiens
tcttaaaaaaaatcattttattgatcctttaccatacaaaatttattcaaattacacccatttgaagtggtaagatcacagctagagaacaggtcaccctgtaacaaatctatttacaaaatccatcataaaagcttttttttgtttttttttacattatattacatattttcttttttaaactagcatacaacacaaagctaaactgattagtagtttgcctactcccaattttgggagaaatacttcctttttacaaaatcacgtaccccgtaggaaaagaaattcccacaccctgacaattgccacccgacttactctgcaagccatcttccttcatatccctccttctcatacacacgagttgtcatgcacacactgaattcttattttctttttcctgaaagcttaagctttaaatactgcaattttatttacagatctacacgtacaacaaaaatgaaaacaagagccacaacaaagaacagaaaaacaaaaacaaaataacactcttaaaaaattacaaagcagctagaaagtattctggcagtgtttacaaattaattgctatttttgtacaaaattgctaaataatgaaaatgtgagtagactacatatcaacttaaataaaacgattgctatgcacaactctgtacatataaacacactcctaacactgtttgacagctcatgtgttgccctttatacattttattttctaaggctcacgcagtcataatttgcacacttgtaacttttagccatttcgtgtgtgagctttaatagcagcaactcaatggtaccaggaaacctgcatacttagtacttaaagtaacgcaaatactgtagtactaacccactttgtgtgccggatactaagtcaaaaagaaaattacttaatgcaaacaaaatacagtatggacatctaattaatgtacaccagttaagcccagtaactggaaaaaaatcttatgcatgaaggaacttttaagacttatta

SEQ ID NO: 157858 - DNA, 1000 bp, Homo Sapiens
ttttttttttttttttttcacttatttgttcagacatttattgagcacttcttaagggccaggcatggtgtgaggcactgggatgtaacagtgattatgacaaagtccctcaaggagctcacagtctaatggtaaactacagagtaaactgaggcacagagtggtaaatgacttacccaatgaggtagaaacagctaggtatgtgaaaatgtgggagcagagctggagagagggcaaggtacaacttgtcctaagtaaaaccccttggactgactcaacagcaaggctgcatacacaaacattacaaaatctacttgcaaaaacctgaaaggagtttccaattatcaccatgactgaattcatgtttcacaatgaattcagctatttcctgatggcatttctatccttgcccccaaagccactgggcatgccaccagtctgctgggagacagcaattaggtagacagcttaaaaccaagaagtatctgactccaattttagcactgaaaaccatattaaaatactttaattaaatccacaaacataaatgtgtagcacatttatgatacttctacatgtagaagtttggaaaaagtctcttctaaccctcatccagaggattctaataagttataggtaccaaagagattagagaatttgtctgtcactttccatatatacattattttggctgtacaagggtgaaaagtgtcactcagacatatttcgtaagtaatctcaacattatacagatatatacaaagacatcacatttaaattcgtgtgtacatctatgcaatgtacaacagtaactgcaaacatgaaccagtgtaaggcaatttcttttgtgatatatgacatactccttgaagggaagggtagagtccacaaagaactgtccatttcagcctgactgtctgtcttcatgacactctgtgatgaagctacttcaggaggcaagatgtctatttcactgacaaaaagcagtgaataattataa

SEQ ID NO: 157859 - DNA, 1000 bp, Homo Sapiens
tttcgcggcaaaggagctttattgctgcggcggcagaacgagctctgcgaagggcgagggggcggcgaatggcgcgcggtcggagagtacgagcgcctcctgcagggcgcggctctgcgggccgctgagcgcggggccgtcccggtgcacgcggagccagggggtcccacggcgcagcctctgacccacgtcgaccagcagctctgcgcccacccccaggcggagcggctccccagcgcggctgcgcccggccccgagctcgtgcagcaccagcgccagcggcagcgcccggaccagctccacggtgccatctgcgggcgccagcagctcctcctgctcccgggcgcgaggcagcagctgccggcgttctgcgggacttcccgagcacagggctcgggccagaccgggatccacgccctgcgccgccagcatccgctcgaagcggccaagggccgagccgtcgtccagcgccgcggccacccgggcagcgccctgagcctgagtccccgcgtgtccgctgagccagagcagggcgcccccgagcgtggtgaccaggtcccttaagtctggcgggcctgcgccgtccatgcagagcagcgcctcctccacctccagggcgtggcccacgcagcgacccaggggcttgtccatggcggtcagcgctgccgcgacccgaagccctaggctggctcccacgccaaccagcgtctttgccagctcccgggcctgctcctggttggggaagacggcggcccctccgaacttaacgtccaccaccagagcggacagcccctccacgagtttcttactgagaatggaggctgtgatgagtggcaggctgtccacggtggctgtcacatctctggctgcatataggattccgtccgcaggaaccagctgctcactctgacccacgatacagcagcccgcctggtccagcagcacttgcatctgctctgggctctggatgacattgaatccaggaatagactccagctta

SEQ ID NO: 157860 - DNA, 1000 bp, Homo Sapiens
ttttttttttttttttttgtggaaaactcaacctttattattacctgcctagtgcaggggattaaaattgcctcaagctaggtccatatattagtgtaaaaatctgtgtctctccccccaaaaatgtacaaaccccaagtgattatagaaaaatcaatgtggcagctacactagagatgtccaaccccaaggctatgggccgttgctccctctttccccccaatcccaatatttactccacagaaacgtataggcttagagaagttctagctacaagactgcaagtgggaagtgggggtgactgagggctggggcggggctacccccaggtccagtgtttcaggtgatggaggaggaagaagcccaagctgaggacaagtacaggagcaggcacaaggaaacattttcctctccttcttgtcctcctcacccccagattctcagccagtggggtccagtgtgtgacagggagagagaagctgggggcgcagccacctctccaggaatcagtgttgtccagtggggcccaggtgctccaatgggccatgtccagtgtctatcctatatttctccccacccttccccaagggatggctagaggagggtggagaggatcccatccacaggaccagctgggtgggcgacaggggcttctaggaaggaagaacaggaaggggacatgagagtgtgtccaggaaggggagaaggggcatcagctccctgggtgggcccagcccacctgcagtctcactgcctctattagaggtgatgggctgtcgggaggggaagggcagaggtgccattgtgtcctcttgttttagtgtcactggcttcccctggatcgctccctgagggaggggcagctggatgtgtgattcacaccgtgttgagtgcatcctctgccaggaaccgatgcagctgggaaaagggtggtcgctgctcagactcccggctccagcaccgaagcatcagctcatataggccctgcgggcaggcaggc

SEQ ID NO: 157861 - DNA, 1000 bp, Homo Sapiens
tttttttttttttttttctttacttgcatgtttgtcttttgagtgtgttttcaatttgtgcattccttagaaaatctttgtgtggactttggagtttctccctgaaatgtgccaggcgcctgagtcagacacaaacactcccttaggaccttcgtcagaaactccacccctgtgtggaatctccttcctctctctctctccggaggatgccacccgaattcgaatgtgactgtgtgtttctgctgagaggtccattgtcatccccagatgaaagaagagaccaaagcagttaccactgatggaagccagtgaagatggttgggggaactccttaacctttcttggaatgttttgaacgaggacgctggtcctttgccagtcaggaaccagcagaggatgctcctgctctgatcccagccagggtggagagtgcagagtcggccacagggctctccgtggaggctatggcttcagacaggccccgaaggtctgtcaccaatgtgctcggttgtgggtcacataacgctctctggagggattgcctttcagcttgggatcatgaaaagatgatttgacgctgtttctcatggtctccgacctggtttgtcttaggtgttcctctgaacttcttctgatttttcttcctctcactaactgctgataaatacactttttcccaagcttggaacagtcttttcctttcttatgattattccagtctttctccataatgtcttcagccctgagttcttttcctgcttggcaaaaattccagcacttcttgtctttttggctagcacattggcatctattctcacggtctgttgcctttgtgggaagtaaattctccaaggctctcttggacctagggcttccaagtccatacggaacaacgtgctcgggagtgttgacccaaatgatgtccaggtggcagaagtagacacactctttatccatcagggacgagcaggagcagcgcttggaccggcggagccgccag

SEQ ID NO: 157862 - DNA, 1000 bp, Homo Sapiens
ttttttcaccaccttatcaaatttattattccaatggcactagtacagctggaggtgctcatggtgacaccgcacaggacttcctgcctgctagaaatcatctacccgcgtgttcctttcccctttctggggcaaaagccactgcgggccatgtacccaaataaacctcttaatgcgtttgttaaaattagtttggacatctgagtttccctctgaagaaatggaaaaagtgttgggtgtcccatcccgcctccccctccccgaccggcccattaagtccctactaagagggcgtgtctgctgcctccggactctggaaataaatattgaaagaaacggcatcaagtgttatggttgagtgatggcacgcagcgggccccagaaacctctcaggggagcgtcgctgtgtcgggacagtctccaggtgtcgtctgagaattcgaggacgtggtgctgtgggtgctgcgagtccccggggcggcaggcgctgcaggaagggccgcctacaatttgtccaggaagttgtccagggcagggatgccttctttcaggcccttgcgcttgcgggtctccgccaccacctggctggggcggctgctgttgtcgaaggggtctccgggcaggatctgccagtggtcaaacacacactgggggaacgcctggccgcccgtgttggacctcaggtcagcggtgaagccaaaggactcgttgacgggcagataggccttgaccacaaacatgggggtgccggccacctgggactcctcgaacacgtggccccgcttcctgttcaaaaccccgtagatgccaccgaccacctgctctggacactggatctccacaaggtagatgggctccatgaggcgtggctgggcggtcagcacactggcgtagaggcagcgccgtgctgtggggatgatctggccccctccgcggtggatggcgtcggcgtgcagggtgacgtcgtggacgtcgaagcgcacaccccgcatgttctcct

SEQ ID NO: 157863 - DNA, 1000 bp, Homo Sapiens
cccaatcgcagctactttattttcgttttaattttttggaaggatatacaccacatatcccatgggcaataaagcgcattcaatgtgtttataagccaaacagtcactttgtttaagcaaacacaagtacaaagtaaaatagaaccacaaaataatgaactgcatgttcataacatacaaaaatcgccgcctactcagtaggtaactacaacattccaactcctgaatatatttataaatttacattttcagttaaaaaaatagacttttgagagttcagattttgttttagattttgttttcttacattctggagaaccgaagctcagctcagccctcttccttattttgctcccaaagcctcccccaaatcatcactccctgccccccttaaggctagaggtgagcatgtccctcacaattgcacatgtcaagccatcagcaaggcgcatcacacaaaaggcaccaagacgtgaaactttttaaaccaaaaggacgaagaaaaaacactttcaaaaaaaaaaaaaaagaaaaaccaaaccatattttgccacatgtgagagtacggtcaagcagtatttacaaaaaggttaacggaacaacactctgacacatgctctgagaatactgggactgctgtttcaaaaaaaaaggttcaaacttattgtcacagcatcatcacaaaatagaggatcaccattggtttgcttggcttttcttttttttttttcccccaagtgaggacctaactccaaataatacaatagaatatgcaaattatcttcacatcaagagtaccccaagaaaaacgaaatccatggcacagacactgtacaagggtgcagggcagggctctgaggggcccaaaccccattttgccaactcgattttctagcattgaagggagcaaggggtcaggcatatgatggagatgatactgaaatgatttatccaaaatccatgcaaatcaagttctttggatagaggtgaagaacttgga

SEQ ID NO: 157864 - DNA, 1000 bp, Homo Sapiens
ttttttttttttttttttttttactactttcaggaatcatttttattgatgtctttaatttcacaaaccaaattatataaaattaagtagtacacatttcaaacataataattgtgctctgtacaattcaaggcacacttggattttttgttggttttttgtttgctttttaacaacggaaaacttatactccattcaagatttttccatcagaactttaatcattttatttgggttcacaggtgaaaatattgtgaaagttcatttacaccacaatgaaggataacatcttcagccccatttatttactaacaactttattgagatataattcacataccatataattcacccacttaaaatatacaactcaatggtttttaatatattgttatgtgaccattaccacaataagtttagaccattttcatgaaccataaagaaatcctgtacccattagatgaatcctgtactccccattcatcacccccaattctagccttaggcaaccactaatgtacggaaagtattttttgtagagacagggttttgctatgttgcccaggctggtctcaaatttctggcctcaaacaatcctcctgcctcagcctcccaaagtgctgggattacaggtgtgagccactgtgcctggccctttatttctttttatggctgaataatatagtccattgtatggatataccagatttggtttatctattcattagttcatagacatttgggttgtattcagcttttggccattatgaataattctgctataaatatttgtgtacaagtttttgtattgaccagccccttaatttttaactacacaaggcaaaaagtaaaaagagaagaactcttacaacaaaatcatacaaaatatgttttgcaacaattttagatttttcaagattcaaccatttccatatgtaacatcacagaggcttgtcatgacaggaaaactggtgtcattactctatcacagaattgggaa

SEQ ID NO: 157865 - DNA, 1000 bp, Homo Sapiens
tttttttttttttttttttttttttttttttttttttttttttttttttttcatattaaacttgtagttttattcaggtttgattttaacaaatgtgtcggggagagagcccgcagggaagggtaaagcccatgggggcagggccctcccagatgcctgaggagggggcaggtcccctcccctctcctcctcttccctccccatctaaaggggtttggggagagacacaggcaggcgagggggctggtccccagtctgttggggtggtgctcagggtaaagggctatgggcaacaggggaccagaccagggatgagtggggagggcacaaggaccatttgccagaatccaccgctttctgattccagattgaatttaaaaaaaaaaaaaaaaaaaaaaaaaagactaaaccacaagcagcacccacccccttctcccccaccagggctgtagtgtgaggggagaagaggagggcagcttcaccaaggccacagcttcgctcgctcctggccaagggagctaggtgaagggcaggggctccccgacagattgagggggtggggaaaaccaaaataaaacgtcaaataaattgtgtaggaggagtccagcttaggaccgggccagagccaggccaggctcggggagggggcctctgcaggttcagaggatcactgctgccaccaccgccatcctgggagccagttattttgccatggccttgattgcaacagctgcctcctctgtcatggcagacagcaccgtgatcaggatctcttctccacagtcgtacttctgctcaatctccttgccaaggtctccctcagggagacgaaggtcctctcgtacctccccgctgtcctggagcagtgataggtacccatcctggatgccaatcagctggaagtcattccttttgatgttggggacatccatattatgagttgacgggcagatatcttcatatttcttcccagtaaagatgtcaataccaaccagatgga

SEQ ID NO: 157866 - DNA, 1000 bp, Homo Sapiens
gcactgattcagactttaatggaggtgctcatttcaatgccacagaggtggtggcaactgtggaacgtggcatggggagtgagaggttgctctggtgcagctggaggaagaacagggaacctagggttggggagagatgtatagaggaaaactcccccaggcacacagcctccgctctggaccaacgcaggcttcagtgagtacacacaaaggaactgatgtcaaggccctttctatgacccttcccattctagcaagacctcccaccccagtcatcttgggatctacagccacatgaaatacagacacatcgttcccccaagtcaggccagttttaggccattgagttatggggaaatgattaatgggatgaatgaaaaacaaataaaataaataaataaataaatacactaaagccttattagccaggcgtgatcacatgcccaacactcccctccatcccagcactatgcacagttcacggctcatatgcaaagtggaagacacgtgggacaagagcaaagcacaagtgacacatggtccctctctaacacctcagcacaccaaccctgacgctcccatcacagatgctgatcattcttccacggacccccttttataataatcctcattcacatttctagtttctgagggaagagagaaagagaaaggaagaagtggaaagtgcggaaccccaatgagtagggcacagaaaggagggcgagcagagacagcaagaggtcaggtaagccaaggagcagcggagcaggtcaatcagggaagttctgggcaccctggggctcaggggatctcagggggtgaactatcacagatcaggacagcaaggttccaggaggatgagacagaggttccacgtctccaggcaagcagaggaatcacagcacactgggattacggaagttatgtccggcaaagcgagcttcatcccccagctcttcctcaattctcatgagctggttgtatttagccagacgttcag

SEQ ID NO: 157867 - DNA, 1000 bp, Homo Sapiens
ttctccgtgaacagtcactccacctctccaagaacaaagacagccagcagcatagtcatcttagctttattgagtaaggcatcccaatctctgctaagattcttctaaatgaacggctgatttttctgccaaactatgcattggtcaaagagaaatcaccacctggccaccccattctgtccccctacaggacactaagggttcttacagataaagggacgatgcattcatgcctggagaactaatcacacctgatttctctgggatctaaaataatgtcaaatttgattcactttatgtaaagaaaatcttttttttctgcaaaccccttcagaacaatgctgccatccatgcaagatgtgtgtaaggccacctctgtatactaagaatggtgccccagcaggtggaaggatggcacacctgctgagcgtgggcacacgctgcgttctacatctttgagaccaccggtgggttccgggcatcagaatccagccacttaatgaggatctgattcacctcggttggcttgtccatctgtgtccagtgcccacagtcctcaatgtgtccccttttcaggtggggaatccagtcctccatgtgctgggacatctgaggaacgagcacgaagtccttctccgccgtgaccatcagggccggaatcaggatcttccgtcccaagcttttgcaagcccacttccagttcctttccatgtttcggtaccagtttagaggacctctgaaaccagacttcttgaactgctgcacatagaactggatttcctcctcagtgaccatcctgctgaggctgggctcttctgggctatttacaaaaagtcctcccgcttcacagactttatgcatggataaaacactctcatcgcttgctctgaagaggcttttgaaagtccgactcaggttctgttccagttcagcctcagccactcctggttcttggaagtagagctggtaatcaaatactgggttggctttgatactctcc

SEQ ID NO: 157868 - DNA, 1000 bp, Homo Sapiens
ttttttttttttttttcctagtagaacaatttattaattaatatgcaataaaatatctccccaaaatctttccagaaatgacaaggcaggaaagtgaatacttttatgcttctctggaaatttttaatgtaaacatgaaatatttgaagaaccgattaaaaagtctcaagtgaatctgtaaatacatttttaagtctgacttcaaatcggtacatgaggcttagacatacacatcattggacaagtgacttaaatatctaaatacaaatcaaatagcattttcctaacttcaactataaaaacacaaatttcagtaggtactgcaaatctaagaagaataacttgaaaaataccataataagtgttgtaaaaggggaggactcatatgacagaccttgaaggaaaggtgggacatcacgggaggcaggtccccctgtggacatgattccacagaggcgtggagtccttttgccaccagcatgatcctgaaatattgaaaaccctcaagacaagtgataccttcaacatagccacaaatcagtgagcacatcccacgacagggtgtttaaagaccaaaagaaaaagaacagtcagaggcagaattcccctagtaactgccacacagtgaccaccagcgagtgatccaatggacgcatcatggatgagggagattcggaattgtgttaagtaagggacgcggcttctgagccattcaatattctccacacctgtttggaatcaggcatctctacattagtttcaaaccaaatggtgttaaaagtcacatgcttacactactacatacaggagtaacaagagttcacgacatttggggcatcctgcatgcactcctttaacattctgactagtgactctcttaacagatgtccgctcaccagttcatacattttacaagtctaaaaataagtgatattcttctactaaaaaaatgagcaataaaaaggtttaattatcatgaatccctatacattttggaaat

SEQ ID NO: 157869 - DNA, 1000 bp, Homo Sapiens
taatagtttacatttattatttattctataccaggtgctgtcccaaaccctttacatatattaatctgtgctgattgtatgtacctactcctccttggacacagcatggacataatcagagaaccatgcaaaactcaattgcaaattggatatatggatgggattctttattattacttaaagtttactgttctcataattacaggctacaacttagaggtttgaaactttaagagaaaattctataaagagagctcaaataaacatgaatcagtatgtagaagacatttaaaactttgtaagtagtgccacttagctctgggcaatacttatctgtccttttcaagcacaggccctggagccagagtcaacaacataaaataccacaaacgactctaagacattcatcctacacaagcgagcacatatacatatatatttatataatatatacatactttaatattatgttggtccacggggtatacacattttaacaaaagataaaaatctatgtaatccagttaaacatacataagattaggatacatttattacattgaaagttggtgtttataagttatagatatttaatatttgagtttaattgaaaatttttttgaagcatttaaacatttgcttattttcccagtgcaaaagaaagttgttcaagtcaacttacctttatcctaaggagtaagaggaagaaaataaacaaaaataccacctatcacaactcccagtcaaattttgcagaaaatccttaggtcactggattcgtttatcaaaattaagccttgtgattatgattcagcccttgcttcatatgtatgacttttatgcagaaatgtttctatttacaaaggtagaaaaaagttagcagtgcaagatagtggtttaaagtttgttttaaactgtaggagtctaattgtgtaatggaaagaaaacaaaacaagcaccatttcaagaagaaatgaattggatattttggaatttattt

SEQ ID NO: 157870 - DNA, 1000 bp, Homo Sapiens
ttttttttttttttttataaaaaatttattgagatgatgtaattataggcttttctttaaaaattatttgcaactcactggccctgagaaaaggcatttttttttgttttttttttcttttttgttacattcatttgattcagtcccttataaaccccacacctcataaacaagagattagaaactaaacaaaaaggggggcggggaaggaaattctagagtcgttctggtttgcaggtggttgcggtcacaaagagaaatcatcaagaatgttcacttggcatgtgtgaaagattcagggggtctgcagctgtttagtgttgatgcagttgggtcaaaagagtatcaggttagtcttctgtgggttttagggagggattatggtgcctccctcccaccccactggcttccttgtgtcacagcctttatttctactccgaagaggagcaggagagagtgaacagcctctaactagcaccaaatgcttgggcaaagaaaactgcccctttttcttggtgtgttttcccaaatcttttatcttcagtttcctgggtgggaatgagccacacagggtgagcccaggctggatcctgagcctaattccattcttggcatgctgtctgctcctagggcaagtcacttcacctccctgacacccaggtttcttttttgcaaaagggagttcctatttcaaaaatgtattcagacttggagcctaggcagtgaaaggtgggaatggtggttacttcatcatttcggtaaattgtcacagccatttgaatttcagctaaagcgacattctcatttggacaagagatcagtatcaaaggacattggatcagagggttccaaacatactggtgaaaggagaaaatccattggtctattattcctctttttctgtggggataccctcatctccctaaaggatttggaacattggtgatgccaccttaagcaaaaccaagtcgccctgggtcaagatcttagagttcatgtt

SEQ ID NO: 157871 - DNA, 1000 bp, Homo Sapiens
aacaattcccagtcacctttatttaaagtatattaaataaattatctcaatatatacaaatagaacaatattacctacataaatagaaaatccccatatagaaaaacctttttaaaaaattatatatacaatgtcaaccatagaagctttaagtaccttaaatcataaactctgtagtttgtatagtagtcttataaaaatatagttagctctcaaatgtttaatgccacttaagtcagttaaagtgcagattgtaaagcatattaggaagctgcccagaataccaatgtctcctgcacttaacacattaatacaaagtttgcccaattgttttgaatttccaaatgtattcctgaaaaaaaaaagaacctaaacactatattatagacatatgttagaaaagtcctagaaatgcacccaatttccttccattttactttcctacatggattgaagtcagcccctcaaaagcttttcggctgggcatggtggttcacgcccataatactagcatctttgggaggccaaggtgggtggatcactgaggtcaggaattcaagaccagcctggccaagatggtgaaaccccatctctactaaaaaatacaaaaattagcttggcgtggtagtgcgcacctgtaatcccagctactcgggaggctgaggcagacaattgcttgaacccgagagacggagggtgcaagtgagccgagatcgtgctactgcactccagcctgggcaacagagcaagactccgtctcaaaaaaaaaaaaaaaaaaaagcttttcaaaagtccacccaggattttttaagacattttcccatttgtttttgcttggacgacctggttaatccttaagtgcggaatatataatctaaagcatgttatgtgcaaaaggtgccatggtgttaaaaattaaaacttggaattggttgtagtaccattcgttacatttcaaagtgactaatgctgatgtcaaaaccagaatgctaatggtaat

SEQ ID NO: 157872 - DNA, 1000 bp, Homo Sapiens
tttttttttttttttttttcactgtgtgggacgcttgctaagactttattaacgccccggagggcagggttaggaaagcaacaggagggagaccccgcgacgcgaagcgagtgctcagagctctgcagacacaaagatgaaaagcttggccacaaaggagctgacggtgccgtggcgagagagatccatcttgacggtcaggagcaagtccctgggctcggggacaggcttggtgagggccaccaccccactgtgggggctcaccttccgggtggtgaaaaagccctcctcattgccgccggtgatggccagctgcatgctgtccccggggacagcactggaggggcccatgcggaaaaccaccgcgggcgcttggatgttggtggggaaagagaggtggtagtaggttattctcagaggcagcttggagcactcccgattctcatggcaaggcaagcgctcacagcgggtggctgcggagcggcggtagttctcagggcactcgaaggccaggcagcggaagccgccctggatgttgaagcaggtctcgttgatggagcagttgtggatgccagtcacacactcatcaatgtcttggcagttgcggccattgggggccagcctgtagccagacgaggggcagctgcactggaagcttccagggatgttgatgcagcggtaggagcagatgtggcccccggtgggcagggcgcactcgtcgatgtcttcacaggtgactccatccacatcgctgagctggtagcctcgccggcagtaacactggtaggagccgtagacgttggcacactcctggctacaggggctgctgctgcactcattgatgtcttcacatgacctgccatccacagagagccggaagcccacggaacagctgcagaggtaggagcccagcgtgttctcgcacttgtggccacacaggcgcccggggtagcgctggcactcgttgacatcgacacacatcctgctgatgccgtcaaaa

SEQ ID NO: 157873 - DNA, 1000 bp, Homo Sapiens
tttttttttttaaagggaccaagaggcgttttcctctgttactttataaccctttcatactagttgaacttttttttatataatgtacatgtactactttatagttaaacaaaaaactttaaaatgattttttaaaaaagaaaagaattaatcacagtggaacatgaaatggaatgtcaactttggggacgggtcatccagaggagtccaagagccccaacatggtcgcgtgtctctggtcctcaggtcatcacccagcctcacccacagggcacccgccacggccgtggcccaccgtgcaagcttccacttggtgcctgcgtgggaacgcaccacctgccgtggaacttcctcctgcggggcagaggaggggtccagaagccacaggagtcaagtcagcaaaattaagttaatttacaaagttatagtaaaaaccacaatagtgacccagtccctcccacgcagtgtgagccctgggctgcgccacacccgcaggtggcccgtgctggcacctcacagggcaaaggtggtgaagaagatgtgcatcttggccaggaaggtggtgacggagccctgcctccagagcttcatctccacgtccagggcaaagtcccggggctccagcacggcccgctgcaggtagaccacacccgtgtaggcattgagcctgcgcgtgccaaagtagccctcctcattgcccttgatgatgttcagggcgatggtgtcccccgtgaaggctggcgcggggccaatgcggaagatatgcgcaggcaccaggaggcccgtctggaagttgagctggtagtgcgtgatgcgcgctggcgagttctggcactccaggaagtcatggcacgtggtgcgctcgcacttcgttttggagacttggacatagttgggaggacactcgaagcgcaggcagcggaagctaccctggatgttgtggcaggtctcagcctcggaacagttgtgggtacccagtgcacactcatccacgtccttg

SEQ ID NO: 157874 - DNA, 1000 bp, Homo Sapiens
tttttttttttctgtcccaaagtaaacatatttagaaacataattctccctctggtgaggttgtgggcatgtggcggcttgactgagctgggggcaaaggggcagctgtgggcgtcatgggagtgtgtctggctggggaaatggggtgacttccacgacgcagcgcttgtgggtgtggcctccccactagcaggtgcatgtggaggggtcctggcccgtctaggcgggccgcaccttcatctctgacaccttgtagctatatttgtaccccttcgccgcactccagttgataccattggcatagctctcatggggtcccatgaggtagagaccattgaggtttgaagcatgacagtcggcgtaccaccaggctccctggaacttctcagcacaattcgaagaactcacatcattgtcttggtctttggtggagaagaagttgttgttgtggcccgttagagaattacccgcactgcccccgacaaaggctcccagtaccagcttgtacttctctgcctcgtcagccaccttgaatgatttgtacttagcaaactggtggttgccctcaaagtccaccaggtctacacggagctcgctgcttccctgggcagtcagggcgtggatgttgtcgttccccagccagaactcccccagctgactgccgaagccctgcttgtatgcggcccagtcccgatagaagtccacagagccatccatcctccgctggaaaacggtccagccccctccgtccgtgtccatgtcacagagcacagtcaggggccggcagtcgggcaggtagatggtgtgccagccgctcaggaaatacccccggtctagcaggtccttgcagttgcgtgggcctgtcgcacacgactgagactgcccagcgtctcctttctctccacgcatccccttctctcctcggtctcctttgggccccactggtcctgcctttccaggggctccagggagaccgcgttctcctctctctccaatgaca

SEQ ID NO: 157875 - DNA, 1000 bp, Homo Sapiens
ttcagtgggcacaagtggttttattgtttctgcccggaagaggaagccctggcagcagcagggacacagagaggacacggcgctgcatcctgccggcagtgtggatgctggtggcaggagtccaggactgtgaagagctgtcagcatatgagctggagccgctgaggagctgcacctaggcctgcagaggccaccagcttgagaagggggtcccagcctcaccgatgccgctttcggatgctctgcagctcctggtagatggtgctgaagctgggccgctgcccaggctcataggcccagcactgctccatgagcctgaacacggcatcaggacacagctctgggcagggcagacggccccccttctccacaaactcccgtgtctgctgattgctgaggttgggatagggggaggcccccaggctgaaggtctcccagagcaagatgccaaagctccacacgtcgctttcggaggagtagcggccgtagttaagggcctcaggtgcggtccacttcacggggacttgtctgaggccccctgaggctgcatagaccccatcggcttcctctcgggacatcccaaagtcactgatcttcaggacattcttctctgtcaccaggcagttccgagcagccaggtcccggtggatgcagcacttgctctccaggtactccatgccagcagctgcatcccccaccatctgcagcagagtcttcacccgcaggcgggccccctccgtgcggaggaaggtcaggaagtcgcccccctgcacaagctccatgacgatgtagatgggctgcttctgggtgcagacaccaatgagacgcacgatgttggggtggctgtactgcttcaggatcctcgcttcctgtagaaacttggccttgaggtcaggtgggagcgtctctcgacaagacttcaccgccaccagggtgttgtcggctcgcaggcgtccgctgaacacttcgccaaagttcccccgtccaatctgctcaccca

SEQ ID NO: 157876 - DNA, 1000 bp, Homo Sapiens
tttttttttttttttgcagcagagaaggaagtttaatcataaggctgccgaataaggagacagggggaaacctcaaatctgcctgtctgagccgtttaggtctaggtattttaagggagttggagtgaccgaggtgggggatcactggttgaagaatacaggatggtgagatgaagaaactgcattttcatgctgattcagttcctcttggggagaggcgggggggcggtcttcaaactggttggcaatagctcttttgctggaattcaggatctgaaaaacatctgtgtcactgaaagtagacccgcagagctgcggcttctgctgccatttcctcctctgatctccaagaggcaggaaagtcctccttgtcatgtttctggagctcctcatagatgctgtcattcctgtgaaagtctccagccttcctgggaagaacatggacgtgaacgtgcttcacagtctgtccggcttcggggccatcctgcatggaaaaggtgagagaggtcccatggaaatgtttttccaccactgtcccgactctctgggtcgtctgaaacaaatcggccacttcatcaggacgcaggtcatggaagcgctccactggccgcagcgggcacacaaggacatgtcctggtaccacaggtttcctattcacaagagcgaaggacagttctgttttgagaaacactacagagggcttgatgagatgttggccaaatctgaacgacatgtcctcacagttgaagtctttcagaagactgctacctcttcggagtcctcagtggcaggatgcacagagcttttatagagggtctaagcaggcaggtattcctaggataccttctttctctttctctcccttccaccgtctggatgtagatagcactacggacctttacagactgttctcagtggatttctcttctttcctgagcttcaaagcttccaggatgttgacagctgggaatgaaaggcagagggagggagcgcggggccg

SEQ ID NO: 157877 - DNA, 1000 bp, Homo Sapiens
ttttttttttttttttttttgtctgacacccaggttttattgtttccactttattgctcaagcatggaacttgaggcaagcctggaccttcagcaacgtgcagagaagaggctgaggggattttgggacacaacctggccgagaggggaaactgacaggggaaataccagaacagggaacagggggtggtcaccatgacaccagaagacatcatcagccacaccgtcgggggtgaggaagggaacagagagaagaaatggcatagcagtggtttttcccatgtccctagcacccacatggaggccacatttggaaatggactgggagagggaaaggatgaggaaaacggctgcccaggagtctccctctccaccctgggttcttatcagacctcatccctaccacttgcctcttctacccttagaaaatggacctaacagagggagcaaaataaattaacattctgatgaatatatatggatggacatatgttcatgtgcaatggaggaagggaagaggggctgacaccagctaaaatgattccccacctcaatcccccagcctacacctttcccccttcccctaaagccaccatccaaccagatagaaaaataaaggtctaattcactcaaaattcttcagtttttacaaaactaacagggtggagtggggagactggggggcaggcagccgcaggagtagggctggtggagaggggctatgcttctgtctccacctgagactggctccctgccgtgttgctcttctgctcctccttcatctctgtgtcagtgggatggtctcctgaggaagcctctgccttggccttgttctcctcctcagccagcctctcaaacatattggcatagagcttcttctcccgggcaagctgccttcggatccgctgctggcacacagccagctgggtcttggcggctttgttgttggggtagagctgcaggaccttctggaaatcagcccgtgccagttcaaagtcatt

SEQ ID NO: 157878 - DNA, 1000 bp, Homo Sapiens
ttaactcaagtatttaatagcttcacaaaaaattcctaataaagagcttattctgcataattagaaaagaaagacaccaagccatttaaacataatttatgtacatttatggctttatacaattatagcaaagattgttcttgtgtctgtaagtacatcaacatcaggcacttctcagagtatcggaacaagaacgtggaatctgcactgttactaaactcgggtagcgaaatgcaggaggcatgactacgtcctgatgggacttacatggccacccctggccacactgccaggctgtgcccacctcaaggagaggccaactgtaatgccaggttggtctgttcgcataaaccacaatacattttttttaatgaatgattattcccaaactaaaaccagaaaagaaacttctcttttaaaattagttataaattaagaactcttaggagcttgaatgtaagaattttaagttggggctggggttattggtagcatatatccagcagttgaacaagtccaatttgtatatcgttggagaatgatttccattttaagcatccttatcctcttcttgggatgttccattgatttactgctcactgggatacatgtgctcatttagactttgtcagtttgtcaaagcagaactttccaagtaatacatctattacctaaatatattccatacgtctatattacggaaacaatacatctttatatttaaaatatctgaatagctctataatacaatatgcttttaataacagtacaaaccagagaaaataaatcaaacaaggctgcataggtgatatcatttgcacatttcacaaagcaatcatgtacaataactgatatatactcattactccagaaagtcagtattcttacaggaaaaaaactaccagaggccacataatgtttgctttccagacagaccagatgcctttccctggacttcactgttctcagagagctaccaaggattcatgacaggatttca

SEQ ID NO: 157879 - DNA, 1000 bp, Homo Sapiens
aatagtttatttttaatttagatgcagcttactataatattaattatgtccaagatgattttttgaatacagaatactagaattccaatagaaggataatagagaaagatgtgctagccctgatgttgatatagccactttggtatacagaactgttttatatttttggctccttcgatatttctgaaaaagattaatttagaaatttggggagtgtctaaaacttaaactttcaaaaacataaaacattacttgacccagaatctcctaaaatactccagctagttttctaaagttagctctccatgatattgatttcttccatttaatatttctgaaatatagcgtttaaagatcattacacaataaaaataagctaccaccaaactaatgaaatactatagcatattttaaacagattgacaggaaaagataacttccctgaaagtattatgaagtttcttgattgaaagtgaacttgcttcattcttctattcttggattaattcctttgccattaatttcttactcatagtaatagtatctctgtgactgactaaatcccagttgtttcgatatatcactagaatggccacataaacctgggtccttattaatatacgttgcataataccttggatgatctttaccaaacgcacttgctttacagatatcagatctttccttgaaaacaacaggattggaattgtaactaacacttccgtgctgagagtgtctaaacccggattcaccataatcataatctgcactaccatagctgccatgtctccaaactaaacctgattgacctttttgcctttcagtgccctcagattgataatgataagaactagaactgtgaggactgccacgtgactgtattcctgagtgatacgcagaatcttgtgaaagactactaaagtgaccatgttccttagcggtactagagtctgactgtacaggtgaagactgtacatgactggctgtatcgcggtgagag

SEQ ID NO: 157880 - DNA, 1000 bp, Homo Sapiens
tttttataaacatgattaattagcttttaatactactctttgatgtattactcatattaccaaggaataatcggcgggcacagggtcaggtgctgaagggacattgtgagaagtgacctagaaggcaagaggtgagccctctgtcacgctggcataagggccgcttgagggctctttggtcaagcagtaacgccagtgtctgggaaggcacctgttactcagcagaccatgaaagggcgtctccctttccttggaggagtcagggaacactctgctccaccagcttcttgtgggaggctggatattatccaggcctgcccgcagtcatccggaggcctaacccctccctgtggtgcttcagtggtcacactccttgtccactttcatgctcctcttgtcctcctggttcctctttgaagtttgtagtagatagcagtagaagaaatagcgaaagtcttaaagtctttgatctttcttataagtgcagagaagaaaatgctgacgtatgctgccttctctctctctgcttcagctacctgaagccgctttcttgtctatgcctgctctctatctgctcaaactcctccgaggccagcaccatcccactgtctgtctggttgtccacagagcctttgtaggtcgttggggtcatggggaattcctcaaatgtcttcatcctggaggaaccacgggtctcagcccctctggccaggcacccgggaaaggacacccagttgtaatacctggcggccaggctgtggcgctgcaggcttggcgggctgtcctcagcgtcagcctgggcgatgtgtagggccatggtggacacctgcgagaagctgccctcttctgagctctgagagctgcgcggggccatgcagacctcctcttcctcttgcaggcccctgccctggagcaggtcccccaggatctccaccaggtccgagaatgcaggtctcgccttggggtctccggaccagcagttcagcatgatgtggcgtat

SEQ ID NO: 157881 - DNA, 1000 bp, Homo Sapiens
ttttttttttaaaccatatcatatatatttattttagaataatcactgaggtagcagggtagaagatgcattggaaagggtggcaagaaagagggtactgaaaacaaagaagaagataatacaataattcagataggagatgactgggcctgaatttggctaatagcagttatgatggagagcagaggagggatgcacaagatacttggagatagaattagcatgacttggtgtaacccttgtaacaatcaggttcatcctcgccaaagacttactaggtaaggggacattctgtcctgtagtttatctctcaccaatttcaagaaaagtgaagatttacagataagtagaagagaggcaagtaggacaggtgccccccaggcttttaaataatgtgacatggaggcaggcttggaggaatcagggacaattcgagtttttaaaggtttcaatgttctgtcccactgggtcaggatggcatttctggctccatcccattttccagggcccatgaggcggtactgataaggagtacatggtccaaagaaaacttcccaagctagtctgggatccttgaggaacagaagtgggatgctgggctttgtgcctatgcaggcagcgatatcatccatgtaggcaatgtagtcaaatttgtctttgctggtgtctttaaacactccccttttaatgagctgttccttttcagtagcctccatcatcaatttttgggatggaggtatcttacagagtcctttgaatactcttgtgacccatcgtgcttggagctctgtgcctgataagatggatcctttaaggccgataaggccgatgatggctaatgtcgctctctctaggtttaagggaaagacttgcttgtatagaaatatcttctttgtacagaggcttttaagaggttcttcaaaaaatggaaaagaaaatgtatatcctgtagtgaagatcacaacatcaatgttttcttccactgtcccatcttcaaaga

SEQ ID NO: 157882 - DNA, 1000 bp, Homo Sapiens
ttttttttttttttttttttagatgcaatcataaaataactttattggtcaggttagccaccactcatgcttttcctgtaataaggatcctttataaaggcatgatggtgttcacatgcagatgctttctgaagagccctggggcagggggcagccttgcccctcacatcggagctcctttgttgaaatgagctggtttggcttttgtggattccaggtctggagccaagaacgtagtccaaagatcccctcttcccttctcagggaaggtgcttcaaagcatacacagtatcagggatgtgatggcatctgggcagagcctatacttgggctaactctcctccaacagtccttgcccctgactgcccagatggctttgtcccaaccttgcccaaagggcaggtgggttaagccccaggcaacattaccttttgaaatgggaagaattaagtgctccccagccaaactataaagcaaaagccaccttcactaatgaggatatagctcagagatgtgaaagcagagggttgtatgcccagcacaggcaagatttggctgcctggcctgggcttcacggaccccagccagagctggtactttttaactatggccttaggacaaaccaggtgaaacagattaaccacatcctccttctttgggctagcaagtccagggctgcctggagtctgtctctaccatcaggatatagaatcttcctgcttggataaaaggagaggacaaactgtgtttctcatactttaaaaaccatgtggccgctacctttgtggataaaaacccaggtaggatgctgtttggaatgcagaaagtgctgggcaagaatggaactactggggctgctttctcaactcagccaatttgaggtgtgtttggcccattgcagatgctgatggtaagcaaagtctggcctttcctcttctgaagtcttatccaccttcaaagagctacccagctgccaaaatatagccctatacattgatct

SEQ ID NO: 157883 - DNA, 1000 bp, Homo Sapiens
tcattttccatctcattattttaatcattttgtcaaaaaatctgaacatgtgtacataaatacttgatttgttaaaagaatgtgtagcatagaaatccctgagacacattcaaaaatgacttgacatcttgacatgtattcaatgcaagtattcaccaaactaaataccaaggacttggctcctttccctgatatttgaggcatataaagctttaaaaatatatataatatactatatatataatttacatctttaaagttaaattatattttctttctctgattcctggttttctgccagtttactgctcctgcatattgtcagttccagactgtaaggaagccacattggaaagcagataagcactttcaaccttagggtgccagttagtagaatgatagcacgtggaactaggaggtcccaacagatgattttgtctaacccactcattttgcagttcaggtgacagaggctcaaagaggttgtgatttgcagaagcatggctggttctgccactgctattgtaatgttatgcaagtccttcagtgggcctggaccttggctccttcctcggtaaaatggactgatggtaatcacagcgaatattttccaggtgcttcctacatgccaggcactatcctgagtacttcaagtgtctaatctatcctctcaacacctccataaattatatatgcaaagcgtaaaatatttactccctggaaaaacgtttgccaatccctggtttagatccttgaaaatttagaacatcttataattatatagcactttacaatatacaaagcaccttggcatacatcatcacatttaatctttgttttgtagggggataggcattcatgcattgtaaaggagaaagctaaaactcaagagtttaagtaacttgcttcatcaaggccacagagtcatacccaggttctgactccaaactgcatgctctttacatgaaactcctctgtctcccctaaattactgctagga

SEQ ID NO: 157884 - DNA, 1000 bp, Homo Sapiens
tgatcattttatttcaaaagcaactctcttcaaaatcagccttgtctttttttcttaatgagcaaactttataccatcatcagcctttcctaaaagctacatatatgctccgagaaaaagtcacactttttaattttttcatttgctttaattaattcatgagttaagttaaaaagtcaagtcgaaaattttagctggtcttttttttcctttttttttttttttacaaaaatattacagcagtataagcaaaattggaaaggaagagatgggaaaaacaagtagatgctaaaatgggataggtgaacttcaggtcatcatggttattgaaggaactgtaaattcttaagcttctagattttaccgctcttcagaaaacatttaaggaggctgcctttccccatgaatgagaaatgaaacgttccctaagcatttgagtctaaagacaagaaagcattgcttttcctactggaaaatatctctttacttcccattgcactgccctctcccgtccccctcgtagctttatgggatcaaagagagagagaagccatgagtttccaccagcagcagagtgagtcctgagcacaacacagggctgtcagtgacattcagactcactggcaatgggtccaactcatcttgaataaaatacacaaagaaagaaagagagagagagagagagacagagagacagagagacagagagacagagagacagagagagagaacccgagaaaccgaaaattgtttttttatggaaggtttaaacaaagtcctcaagatttctttatgtgccagaaagtacatttctggacttaatctctaggggggcaaaaaagaataaatagaaacaaatttaatgatcattctggaatcctgttctttactttgttcacacgctattaattctcataccttcacctctctaccacaaagcctagaaaatcaaatggtctcctattccatatttgcatagtattaataatactgtcaggag

SEQ ID NO: 157885 - DNA, 1000 bp, Homo Sapiens
ggttgagcacagggtactttattgatggtacatgacaaggtgcggctccctaggcccctcccctcttcaaggggtctacatggcaactgtgaggaggggagattcagtgtggtgggggactgagtgtggcagggactccccagcagtgagggtctctctcttcctcttgtgctcttgctggggctggtggtccaggggtcttactccttggaggccatgtgggccatgaggtccaccaccctgttgctgtagccaaattcgttgtcataccaggaaatgagcttgacaaagtggtcgttgagggcaatgccagccccagcgtcaaaggtggaggagtgggtgtcgctgttgaagtcagaggagaccacctggtgctcagtgtagcccaggatgcccttgagggggccctccgacgcctgcttcaccaccttcttgatgtcatcatatttggcaggtttttctagacggcaggtcaggtccaccactgacacgttggcagtggggacacggaaggccatgccagtgagcttcccgttcagctcagggatgaccttgcccacagccttggcagcgccagtagaggcagggatgatgttctggagagccccgcggccatcacgccacagtttcccggaggggccatccacagtcttctgggtggcagtgatggcatggactgtggtcatgagtccttccacgataccaaagttgtcatggatgaccttggccaggggtgctaagcagttggtggtgcaggaggcattgctgatgatcttgaggctgttgtcatacttctcatggttcacacccatgacgaacatgggggcatcagcagagggggcagagatgatgacccttttggctcccccctgcaaatgagccccagccttctccatggtggtgaagacgccagtggactccacgacgtactcagcgccagcatcgccccacttgattttggagggatctcgctcctggaagatggtgatgggatttccat

SEQ ID NO: 157886 - DNA, 1000 bp, Homo Sapiens
tcagttcaaaaataatttttaattgctataagaaacatcaaccactttcctaggacttttgacacataagacaaagtctacatatactaggtaaacacaagagcattattaaatgggtcaaaaatgtcaaaaaaaatcccatattctcttctggggaaactcggaaagatttcaagtatgagtgttaagaattagaaaagactatcataagctttaacattctaaataataagtaattgaattatttcagtttagttacacagcatcttttaaagtccatctttgcaaattatacgttgctataaatacattgtgtatttggcattatgtgaatttgtttaatccagtgtcaattgtctaatggtctaaagtgtcccattgaagttataatctggatgaactgaacaataagagaagttttcttcattagcccaattgtttatcactcaattcctactcctgcccatggtttcttccaccttcctctggagaacataaagagattctagatctctgtataaggtggtttgctttagcttgaaatcatcagtgaggattatacatgggcaatgtccagaaatcacattattgctcatagaccgtgtagtcttgatctaatggataactgtacattgtcttcactaagaagctagggtggttgtccttgatattgggacattgtagacttggccagaccaatgcccaaatatttcccaagacttttacctaagactctgctcagtatccatttgtctactgctggtcatctggaagaataaacttctcctgagtggtaccagcttatgagatttcctgagttgatacagaggtaaatgcatctttgttgcacaatttacagtcttttttttttttttaagaaaaaacatgattttgatcattgtaccacatgcctttataaacttttggtgttatgatgcaagatctaattattatcaaatgtagtgacgcttgttccaaattctaaaattgtttcaattat

SEQ ID NO: 157887 - DNA, 1000 bp, Homo Sapiens
cgcccaggctggagtgcaatggcgtgatctcggctcactgcaaactccgcctcccaggttcaagcgattctcgtgcctcgcctccaaagtagctgggattacaggagcccgccaccacgcctggctaatttttgtatttttagcagatacagggtttcaccatgttagccaggctggtctagaactcctgacctcaggtgatcatctgccttggcctcccagagtgctgggattacaggcatgaggtgtgcccgggcagatttcacataattttaatgatcaaattacccaatcagtaaaccacaaaatcctacttaggaaaagggtctataatatttattttgaatatggaaccatagttctttttccctaggttgagaaaacttgagcaaaattagttttatttaggcctgtggtttaaaaatattgagatacaagagtttttttttttttttgagatggagtctcgctctgtcgcccaggctggagtgcagtgatgtgatctcggctcactgtaacctccgcctcccgggttcaagcgattctcctgcctcagcctcccaagtagctgagattacaggcgagtgccaccacgcccagccaatttttgtattttagtagagatggggttttaccatgttggtcaggctggtctcaaactcctgacctcgtgatctgcccacctcggcctcccaaagtgctgggattacaggtgtgagccactgcgcccggatgaaatacaagagatttttaaagaagttttcaaactattcaggttacagacacaaatttatagaattaaggagatttatagtgtacatcaaagttcatagcttatttatttgcaattttgtggttcgtaaactaatgaagaattatactaaatgacctatatagtctcttttagctataaactttcaattatattattctgctttaaaataattaagaccatatctcaaagttgtttaagtagataatgtcggccctgaattaagga

SEQ ID NO: 157888 - DNA, 1000 bp, Homo Sapiens
cactgaatcatctataggttttttttattagaaaagaaattaagtgttgtcactagagattgaaggaaattaacaatcttacaattctagaacaggcaaacttcatgataagggattcttaagttttcaaagtgtaggagctctttcacagatacactcttggtgtagggggctgtaagttttatcagatgttttacatttcatgctttaatctttgctggtagtctaaataaaataaatacacagtgttcaggattatctggatagccatcttaaataacagagtgttccgcatgaccacagcctctgcacttgtgcctctgatccatatgacaccaagaccaactatgcttttcatatgatttctccaattgggtcctgtgacctttcacagaattgttgaacatttcctatgagatgtgtggaggacaaggtggagaacactggttcagagcagcgattttcaaggtgggatgggatggggtggagttgagtggagagatgcatgtagttagaaagaacacattcaaaataccactgatttcataatacaaactccataaagtcaagcagcaaaatgattttagctaatgggcagtagcagataaccaactgtggattcatcattgtggagaaggagtctggataaacatagttgaaaaacactggcttagaggtagagacatgccgacacatggagaacagtaagaaacgcatgccaaagaggacaattgagggtcagtgagcgaatcctgggccagaacttgtcacagtcttctgaaaaccaaagagctcatccagaagaaaaccaagatggcccggtcaaccttcttgccctgtgattaagagcaagttggtccacttttaaatactgagccaaaagaggaaaaaagctgtttgtgcccccaaattcatccaccagaagtgctgtcatcatttgcaatgccatccagctcttgaggagggacgtcagcatggggcctgttctgtggttactgca

SEQ ID NO: 157889 - DNA, 1000 bp, Homo Sapiens
agaaaaaagcgagccataagtcaaggccagaaaaaggctgcctttgccgttgacaaaaggtgagaaggtgcgcgaagtgtacggagggagagatgtacatcccctgataactgtgaaataaaaaccatttgttaaaaatatgaaaaaaaaaaaatctcctcccgcggcagagccccggcccggactcggcagcgccacccgcccggcagcgcaggctccgtggaaggaaggtcctgccccgtgtctccatcccgtctccctgggcctggggcgctcagaccaggttgtactccttgaggttgagctgcaggatggtgtccttcacggccgcgaacacgaagcggatgttctccgtgtcggtggcacacgtgaagtgtgagtagatgatcttgtcgctgtcggggttcaggtccacgaacatcttcaggatgaactcccgcgccgcctggggctcccgctggggaccatcgaactcggggaagtagtccaccaggtgcgagtacaggatcttgtcctccagcaggtccttcttgttgaggaagaggatgacggaggagttctggaaccaggggtaggtgatgatggtccggaacagggctttgctctcctccatccggttctcgttgtccgactccaccaggacttggtcgtattcgctgagggcgacgagaaacatgatggatgtcacgttctcaaagcagtggatccacttcctccgctccgaccgctggccccccacatccaccatccggaagatgatgttctccaggtcgaaagggtactcgatgatgccggtggtgggcacgcggacccgcagcacgtcctgctgggtgggcaggtagcccaaggtggcgatgcggtcaacgtcggtcaggtagtacttggcagagtcggagagctggtactcgcgcctgcggtcgtagcattcctggatgcccgggtcctcccacagggtcttgatggcactgacgtactgatgctcgaaggtggtcaccttctc

SEQ ID NO: 157890 - DNA, 1000 bp, Homo Sapiens
tttttttttttttttgtgctccattcagggtattttattttcttaaagtagacaacctttgactttcatccaatccccagcttctctttcccccgtacatctcttcacgtccttggctgtgattccgcacactgacctcggacacacagctactgcacggagagagggagggagatctggcaagggctccggcagtgcctctcctctccatggcgcagttcgtatttacacacggcccttggcgaacgtcctttcaacgcagttgcccataggccctgggacaggaaggcccagatcagggtcccagcagggcctccctcaggccacaacgctggctgtgccttcacaggagtcagagcatttccagccagtctcaggcgcggggcatgctgggaccaggggcaccaccccttgctccccttccttcactcagcaaagccacaaataatttactctttaaataccaagacacttagctattgttcatttgctcccaggtgaaagaaccttctttaaatatgtcgtgtttattttcttaaataaaaacaaagcagaaaaccccaccattaacaagaggacactgcagaggcttatgtacaacacgtgtcccgcgaggctggcgcaggactgccactcactccaaaatttctttggagcagagagacagatcgtccagataacaacttttacactcagcaagccagacacaaaaaagaccacctgaaaaaaaatatgttttgaaaatctgcatttaaaaaagaatactcaactgcatttgaaattttctggatttttttctgcgaaacaccacgagatttggccaaaaaaaaaaaaaaaccaaaaaacaaaacaaaaaaaaaatgtcagagaaggaaaaccaggttttgatttataaaacatcagactagtagaagaaaagctggaatcccagctggcctagtttgaaataaatcgtgccactcgttttgttgtattggtttttgctgcatattttgaagct

SEQ ID NO: 157891 - DNA, 1000 bp, Homo Sapiens
ttttttttttttttttttttcatgtcaaactgctttattacatcttaaataacagtacagtttaatatagtatctatcttgcatccagcttccttgcagtacactgactttaaaattaaatacaaaaggtggaaaggggtaagggtgcagagagctctacagagttgttggacggaaagagaaagaaggggtttcatttgtattctctttgccagatccaggcctaccgcaaggtcacagcacagttttgtatagaatgttgcagaaaacaggatggagaagccactactgctgctatgaaggagtgcggggggcggggcggggggtcccacagaacctgctttccaaacgctgctgctgaacactggccttgaaatgaacaccaggacaatctgtgtgtgatgggaatgagccacctcagatgtggagggccctgaagaatccatataggagggcaggctcttcactccctctccctccctctctctccctccccaccctcagaatccaacagcagtcgtttgcaacagaacttttttttttttaaagaaataaagaaaacagtgacttatcccgctacccaagcgtgtagagccgcgcgctgtactgcttccgatatgtgccacagagcagcaacgagaagtggacagagccgcaatggttacaactgtaagaggttatttcttaaaagaaaaagaacacctaaggactgagtcccatatgcacttttgagcatttctacagcatgcgattctaagagtaaacccacccaatatggcaaacaatcaaaatttttaaaatttaacttagaaagtctgagatcattattttcaaaacattgatttgtacattgtttcatacacaaataattgactgactatccaagcacaggacaggcatctctcttgaaaacagaggttcctcctagttgggggtggggtagtgttaggctattataaacttccctccaacttcacaaggaaacccaaagtgagattaa

SEQ ID NO: 157892 - DNA, 1000 bp, Homo Sapiens
ttttttttttttttttttcccactagaacagaaataaattttaattcattgaaaagtgcagcagtgaacagggtccttttgaagggcactttctaagtcaaatgactgagatgacacagagcaagggcagaataggaacagaggatgcaaacacaggaagttacaaaattcagtgggaactaagtggtggtaaaactcaagaacccaactctacccatctaattccattggtggatcagttgaattaacttttgctttctttaggatgaatcctgggacaactttcctttaaaaaagcactaaaccttagtttagacacttaataagtttaagaacacttctcacagaataaggtaaaacttccatggctatcattactattttgtacaacagccctagtgttgtcaattaaaatgtgtttgcaggccgggcacggtggctcacacccgtaatcccagcactttgggaggccgagaaaggtggatcacctgaggtcaggagttaatcagcctggccaacatggtgaaaccccgtctctactaaaattacaaaaatcagccaggtggggtggcaggcgcctgtaatctcagctacttgggaggctgaggcaggagaactgctggaacccaggaggtggaagttgcagtgagccgagatcacgccactgcactccagcccgggtgacaaccgcgagacttcatctcaaaaaaaaagtgtttgcaacagcaccatttgtcaaattcaaagatgctcaaaaggtgttccctactttgcatgagagggagagctttgtaacaggaaattgtataaggcaaactctctattcattcctaaggcctctgttcattcctaatgtttacatggttctctactctgaagggcaccaacatggacctcaccttcttaacatggaaaatcaaaatctaaatgaatacaattaaaaggaggcagcaagcttcttgcagtgggtcccttaaacattatgaaaacatcagtgcat

SEQ ID NO: 157893 - DNA, 1000 bp, Homo Sapiens
taataaaaattggctttaaatatggaaaaaacagggccctgtaatcccatgctaccctaacactgggaccaggatggccatcacagtctgggaagggccagggctgggacctggggcacaggcacagcctcgccctatccccttcacccacacaggtacacacgcgcgcgcacgcaccccacaggcgcacacaggaaggggcggattattgctgggcacatgtgtctattgttatgaggggagtccggaatgtttgagggttgaccagggatgccccaccccctcctaggggctgggcttgggcgtttctgaaagaggtgtctgcaggacagagcccagtatcagggaccaggctgtgggagctggaaggcagaggcagacctatctgggccggccggggcagtgggctgatgggtatcacaggcagcccaatctctggccactttggcacaggcctagggcatacagaggccccagacccagcgctgacaagcactgagaagggacagctttgggccccagagggtagcagcctgagcccagggcagcagggggaggcacgagtcttactcagaggccggggtggccagcacagtgctgaaggctcaggggtgtgaccaccctcagccatccaagctgggccagaggagccttgagtttggcagtggctcctctgccagctcccgctctcccagccagggctggctgcccccaggagccaaggcgggggcgccaggtctgcggcgggaattaagaatgctctggtcgctatatacattcgtacaaatacataaatacagaaagccccgagctccacggagaagagctgaagggacgcacctttgtcccagggatggcccaggccctgccaaactcagccaggccaggggctgagggacggaggacactggggacagctccgtctgtgttccccaggccacgacttgagtggacaatggggaagatcactgtgcaaaactgtaaacggcgctcggagtag

SEQ ID NO: 157894 - DNA, 923 bp, Homo Sapiens
tttttttttttttttctaatttgtctgtttattcccacaaggtagccaggggtgggggcgccgagccaagcccagcaggccatgggaccttcctccggcggggtgcacgctggattttcgggtctgccccaccagcaggtttgcaggcaggccgtcatgagtgccggtggaaggctccaagggcgtgggcaggggctcgggcggggccacacacttgtggagctagaaatagtggggcaggtccttctctatcaccaggggctcctccatgggtccgtagcgcttcaccacgcagccgttcttgtcgatgaggaacttggtgaagttccacttgatggcatttcccaggatgcccttgcccttgggttggatcttcatccacttccacagcgggtgggcgtcgtccccgttcacgcagatcttgctgaacatatcgaatttgacgttgtagcccgcggcgaactctttgatctcttcgttactccctggctcctgcttcccgaactggttacacgggaaggccaggatccgcaaaccacactcagcgtatcgggcgtgcaggtcgacgagctgagtgtagtttacttcggtcttgcctcactgggaggccacgttggtgacgatgcacacgaagccccggtacttgtccaggttaaccatgtgcccgtcgatgtccttggcggaaaactcgtgcatggagcgcgcacagcgccagtcgtcccgggacgcgcacatggtcccggccaggccaggcgcggccagagccccacagagcagcgccggcttcagtaggcggcaaaggcggccgaggctcatcgcggcggggctgggagccagcggctcctcccctcgtccagccgaccaatggacgcgcgtcggctttccgcgcctcctttcccacggccacgccctccagagcgctc

SEQ ID NO: 157895 - DNA, 1000 bp, Homo Sapiens
tgatgatgttaagctggttaagtcatgttcacaggattttagagaacacacacacgaaaattaacccttactacttatattaatatagcaggacttgaggtaataatatattcagttgactcacagactccaataataaatactcttaggtaatcttcagcctgaaacaagtcttcatttattgactacagtacagtgatttcgcatcttagctggtaatcaaagatggttatgtattaagtaagagaagacatagtctctcttccaggtatcacctgtcagaaacctgggcaaatttaattttaagaactagaactgcatctcctggtggcagtcgtcaccctgagaacaggaacaaggcaaagaaagcatacaggattttgattctcctacacaggtgcacataaagttagtttattaatgactatattttgaagccagccattttgtccaatatttaaataacaagctgtttaatattaaagcagaaagtactgccacattgtgacagaagtacagctttatccataaacccttcacacaattatacattaaatgctatttttatttaagcaaggcacccctacttgttctaaaatatgggatgtactactccatttaaaaagcaaatgaggagactgatttttttcctatctagagctggtttaaattcaagtgaagccattaattttcttaccagtctggactgttctgacatgtcacttcacagttttgagactaacaaacacccttaggtctaccccaaaccaaaaaaagccagggagggacagtttagacaacttttaagttaagactagaatgcccccttaagtagataggcaccaccgttatacgcctttagcacaaggcttagaaaggcaaaacatttctaaagacataaaaccgccaaattgtcatttacactaagctgtggtattttttgttttgatttttaaaaattcctatctctaagtaatcaaatacagcaaaatttaaaact

SEQ ID NO: 157896 - DNA, 1000 bp, Homo Sapiens
ttttttttttttttttttaatattctttccaaacgtgaccagtgttgctgagtgacactcaagtaactggtggtttttcctgtgcagctggctgctcgggactgttcaggtggagttggaagctgatgcagaagcagcattattggtctgtccacggtctccagtattagcatctgacgctgctgtggcatttgtgggggttgaagcagctgcttgaatccgagcatgaggaggaataaggatggtagccagaggtggattacttgacagttcttgagtggtgaagttgaagagtgcaggtgtgtctcgcccatttggtagtttgacatttgggtcccgtaattcatcaaaaaatgaatgtgcacaagcttccagtggtgttagtcgggcagttggtgtatactccagcagacggctacacagtgcaattgcctccggtggagttcggggtcggaagacccgcactcctgaggtgaaatgtcctgttcctgacgaatccttagtccaaggatgtgccttaatttgagggaatttaaattctgtgtagtttgggttcatttctctgatttgctcccttgttggagttcccaggaccttgattatttctaccaactgatccacaccactatcccctggaaatattggttgtcctagtaacagctcagccaacacacagccagcagaccatacatctatactagaggtataatcagtggctccaaagatcaactctggtgccctatagtaccgagaacagatatacgaaacattgggttctcctcggaccagctgctttgcacttccaaagtcacagagttttaatacagcagtatcaggatccaacaagaggttctgcggtttaatatcccgatggcagattccaaaggaatggatataggctaaacttcggaacagctgatacatatacaacttgacataaatcacagggagcgtctgtttggctcgactatagtgtctggcaactctgtatactgtttcc

SEQ ID NO: 157897 - DNA, 1000 bp, Homo Sapiens
caaattgaatattttattaacatggtagttgcctttgtaacatgtgcacacacactcgcacactcacgaatgatctggcctgggggaaaaatactaaatatgcctaaggggaaaatgaaaaataaaaaaattcctgtaggttttcattattgtaggcaattatgtccacatcacttacaaagctattgccaaatctgtccaaggaagcagagtttgaagtgagggctagggacaggaatcttgggaaaaattcaacagtggcatagcagagctctcaatatgagaaagctgacataatgtggacttttgctgtgaatttcctctttgcaaaatatggggagaggtttatcaatgggcagaaaataagagaaggcggtgtgaagtaggcttctgcagtcaattttcctcacagtattgtgcagggtcatcaagaaaatgcttagtctttctctggaaccagtttcagaacttttccaattgcaatggtcttaccctcatctcttaaggtgaaacgacccatctgagggaagtctttaaaggtctcaaggcagatggttcctgctgtccttaagcgagcaatgcatacttgatcttgtttcacaaaacggggtcgggtcttacttttttctcctgattttttgtctaccaagcagattaaggctgttatttccacctcctcaatacaggtatgaatatgcagcaccgcattatagcctgggcagatgatggatttgtgctctataatcactatctgggcatcaaatgtgcgtccagaatgacaaagattattaggatcacaaagtataaaccctggaagaatctcctcttcttcaattcctttcagtctgattttgaggttttcacctggggctacggtatcagtctctacatcatcggaaagtattccaagaacttccacgttgtgcttgtttggcatcatcacaagctgctggcctttacaaatagatcctgattccagctttcccaggaccacagtgcc

SEQ ID NO: 157898 - DNA, 1000 bp, Homo Sapiens
tggggtcatggtatcttcacaggaaagatttctttattacaatattttgctgatttaattataaaaatacaagggaaatggtcatttcttcccccacgaataccaaatttaactatgaaaatttcattgctgattcgaatgtcacctctggaacctttgttgaaatttaattgccattgtaacagtgttgggaggggcctttaaggtcacgattaggtcatgaggactccattctcataaatgtaataacgccttatagagggaatgggcttctgatgaaaggatgtgtttggcttcatttcctctctcttcatcttacgcttttgcttgccttgctgctttgttatcatgcagtaagaaggttctcatcagttacaaggcagatgtcagtgccatgcccttcgccttcccagcctccagaactaggaagaaaataaatttcttttctttttaaattacccagtctgtcgtattctgttatagtagcagaaaattggctaagacattcatatatagaagtacagagaaattgcttggaaaagttcaaggaggtcaaagcagtttgtactttaattattcactaaattctgtagctctggttaagaaggcacattcactctgatctcttcctgtctttgacttgtaaattactttagcaaaaaggttaatctcaccctctcttgtttcaacatgttgcttttattaaaaatgtaaatttaaaattaccttggcatttgggtcattaattggattaattaacctaataatgctcttaaaattacttttaaaaaacatgtatcaacagaaatgttcccttcttagtctcattctctattttaagtagtcaatatagtacaaaaacactctccgaacatacaagtaggttaaaatttagattttttaatttattaaaaggtaaatttctgttaccatgcctgaaaatatgcaaaatagaaaacatttacttggttatcacacaataataaaaagtcatatagat

SEQ ID NO: 157899 - DNA, 1000 bp, Homo Sapiens
ttttttttttttttttttgggattcttaaatatagatgtatttttttcatctcatctccggacacactccaatcacacccctcctgccctcccctctcaactgcaaaccaagcggtgcagacacagcacagcacacatgaggggccctccctttcaccaaagctgaaggcagggcacagtttggggatggaagagcctcgaggtaaatgtgggggttctagaacccagtgacctcagttctggatcatgggaaagggatcagtatgcagtaacgtggtaaggttccagatctagaagccaggacctagaacctagtggtttcacagtgggcagagcagttgggaataagccaggttaggggtgggggaagacagccagctctgtcctctgcaggcggattccctggagggagatctcagatttagaaaggaagagtaggatctggtccagaaagggccagaaagacaggaaggcatctggactgagactgtgtgtcctccagaaggaatgagcagccaagtggttctaccacctcttgcttggccaaagtgtaggggatgacaggagccggatggagggatcctccaggcagagcctggctctgacatgccagggagggctagaacatccctcccagagccccacttctggagttgaaatggaggaccatctgctctcagttaccttcaaactctgaaagtgccccggctctggacttgatcgccccattcgcagggacaccacgtggtttccagaacttggtggcccgcatgccgggcctgagcgtggcctgctctgtatgctgtagaatttgtaagccacacggggggctctaaaagccccagacctgaaagcaccatgccaggtttcctaaaacctctggcaccaccgcagagtaatggcagattcctggcctctgggaagcggtccaggcccaggggactccagggcgctgattatgcatattctggagccagagaaaggcacggctttgtggatt

SEQ ID NO: 157900 - DNA, 1000 bp, Homo Sapiens
ttttttttttttttttttttttttttttttttttttttttttttttttttttttttttttaaaaaaaaaacaatcctttaataaaattagtccatctaaaactccccaatgcctaaggttctagtcgtggaagggttagctgcagaattccagttcagaagccaacggaggctcagtccagacagggattaaccgacttgtgctggtatctaggtgcttggattgccgagttgagtttgctggaagggaaatggggcggcgtcggggggcccgacaggcctggctgccagtcggcttccgcgaaaacgactcttgctgtccacatagccagccgtgaagccaaactgcaggcctctgccctcccctaaatgtcctcctaggaggcagtcactcgggaggaagatgtgcctgttaccaagtgcttcgtcccggccccagcgcagacctatgaatgaagatggagggagagctgatgtgaaaggcctgggtcccggccgcagaaggggcgccagaccgaaatcggcgatcgcgtctctcccaccaaagcctcccggccagcggccgcgtctgaaagtcctgggctaagcaccacgccgggggggtaccagacaccccggctgcagctgccgagggcctcactcaccttcagggccgccggcctctcggcctggactgcccacctcggccctgcgtcagagcggaaggccaagtcttccagaaggtgctgcggcctccccgcagccccttagcgactcgggatggggcggctgagtcacgaacgccgaggcgggcaggtgcggcgccgccggcctccccccggcaggctcgggtcttccgcgccacggaggtccccgaagagcgcccaagccgcatccggaaggcccgaaccctaccggagggcggacggcggacagggcagggcccgaggccgacgcggcaggcggtgcgggacgggagcgggggcgggcggggactcgaggccgggcggcgaaggcgggcg

SEQ ID NO: 157901 - DNA, 1000 bp, Homo Sapiens
ttttttttttttttttttccgtggttgaggcattttattggacctttggcaattggtggtggggaggcatctgctccaactggtgcggggccctgcagatgggaccatctcaggctgggtccttgtagcccaggagcacagactggactaagcctcctgggccttgtatgaaaaaggtgttgtacctggccgtttttgccagtaataatcaataaaataaccataataaaaatcaaaggctctgttctgaccactcttcaggtcttccgctgaaacggaaaagtgcaaagcaattgaagtacatatgcagtttgtcttaacctcaaatagtgccagtcccacttcctttcctctgatagtttgttcagttcagcagatgcagaggggctggcctgttctccttttgatttcctccacaaggtcttctcttcggacatccacctcttccctgctcgtcactgaacggagcttgatgaccccatccttgagttcctgctcgccgatgatagccaccagtgggatgcctgcctcctcacagtactgtaactggttcagtagctttgggttcttcttgtacagcagctcagccttgatcccagcatcccacagttctgagacaagctttagtctttcctctagcagcttcttctgtgcagatgccacaagcacctgtgtctccgtggtccgtatcttctcctccaaagcctctagtctctgttccacgatggagaaaatccgctccaccccaatgctgagccccacacatggcaccttgcgccctttggggtcgaacatgcccactagcccatcatagcgtcctccagcagccacactgcccacacccaggggctcttcccctgcctgggctggggtctgtagcagcactgcctcatagatcaccccagtgtagtaatccagccctcgagcaaggctcaggtcaaaggagattttgtcatcaatgccaaatagggtcaggtactcaaagagcaacttcaggtct

SEQ ID NO: 157902 - DNA, 1000 bp, Homo Sapiens
ttttttttttttttttttgatggtttccatttttttcctttaatttggatgtacaatgtttgcagcagttaaaaaattaaatatacatctctcgtcagtccttccctttgctctcagaagcattcaggtctgggtggggctccgggactcgcccatcacagccctgctggctccaggggagctcaagctcagctgacagtccctctgaccacggtgcaaagcagtgagacctggacaaggaggccccacttgggtcagagcccaccctccgtaggcaggtccacgttggccacgatcctccaaggctggcagttaccacccagattgcagcgggagactctgctcttagaaacaactgaggggaaggcgttcctttgactgcaccagagcgtgacaggcacatgggggaagagcggcccctgaaccttccaggttgccttcagttgtcatgcggcattctgagcagctccctccttcccaggaggcccaggcccggcaagcgagtgtcctcgtctgagccatcctgagctctccaaggtccctcagcagctctcaagatcttccttcttctcactcctacacgtgacccctctggaggacagctccaagtctaccctggccagcagctgtggtcccgggtcctccccgcagagggaggaagcgggggagggacaaagcccgatgaggatgtctgctgggaaggatgctcacaggtagcaagagaagcctgactccacccaccagacacacagaactaacctcactccaccccgcaacgggaggaagttccacctgccaggcggccacacaccgagttattgctgtctactatccgtcccgagctccacgtggggctcatctcagctccaagaggaggagctgttcattggctccgagggctctgaaatgaccccctccatgaagatgggggcgaggggtgtcctttagggcacagggccttctcagatgctacattctgggtgtctggagggggttcagc

SEQ ID NO: 157903 - DNA, 1000 bp, Homo Sapiens
tttttaaaggtcagtaaacaatattttactgaaacatttcataacacagaaaatctgtctgaagtgtaaagttactgtcttacacaaggaggacagacccattttcaaagactaatatgaatacataaatatggagtttacatactaatttatacacagaaactctgccccatagccataaaatttatattcaacagtggaacatataatttaatcatttgatttatttgacaggttttccttactaaacacaaataactacctggttttcatatacatatataatatatttttatgtatatagatattcaacaatctgtacagtttctaaacataaagctcctaaaaggcacaattgtctatacaacatgtacaaaaatggctggagctgacacaaaacaacaattattggtcaaaagttcatgattgcacaaagattagtcatgagtttatgtcagaaaaatgtgctttaaggaaaggagggttttcaaagaaacctttaagtgttatataaaaaaaaagcaaataaaaaataaaatccatcaggttgctatcacaagcctgtcctcgtcatcatcgctgctcacgtcgctgaagtgcacagtgggctgcctccgcggtagtcctgtgggcctgggaacctgtctgtctggagagagagtctgctggcctgagggctttgtaaaaacttcagaatgtgccttcagcagaggttgtgacgtggacgctggttggccctgtatggaagtgagttcaggcttgggcttcacgtgatttgccgaggcagccttctctgtgtccattttactcaggccatcaagccttgcatggtcacctgcaggggcaggtggattcagaactttttttgcattttcccgctggactgtaggtaacccctgaggagactcggtcctgctgacctggtttgcgctggctacagaagtctgcttgggttgtgtctcgcatgctttgctttgggaagctggcatttctggagctc

SEQ ID NO: 157904 - DNA, 1000 bp, Homo Sapiens
tgagattcaaatttcctttatcctaacttatttctctgtcatacttttaaaagccacattgaaattagtacagacttattttttggttctaaaatttttgctataacaattctgggccaagggcagacggtatccattaatttcattgttgcctgaattgaggggtgggtggcagtgccaagggtgggaacacaaggaagcaagaaatattaatgtcagctaagaaatcaacatattatcaggctatactgtacttggtggcttctgtgttactggacatgaaaaatgatctgggaaatgaggttaaattggattgaaacataagagtaccccaattattagccatagtttcagtcagccctggatgaaagatggaaaaatttgacatagatctcataaaaggaatttattgcttccttggagattttagatggaggttactgaggaattaggtagccgggtggcttaccccaggcatgtctttgtaggtaacatttgagaaaagaaaaaaaaaatcaggaggtcagggaaagaatgtaaaggcatttgtgagctctgaggggatatagcagcttaagtcccagagaaaaggtgagaggagaaatatttggaggagaaaagggatatgataaatcgggccagagaatagtgctaggtcatttagcaagtccattcttctgctcctgtagatggcgatgcaccttcccttccaggatgggattcacaatggcccttggtgtctggaagcaccaactgaacgcaggccttggatgatgaagacagtgcccaccacaatgcccatgaggcccacagacaaccccagggcacagaccacagtctctgtgagctctgacataggggctggaatctcaggctcccagtgtttcagaagaggctggtccaggccccagtgctccaccttgcagtcataaatctcatcagcagaagggaggaaggtgaggtaactgatcttgaagaaggaatgatcactcttggagag

SEQ ID NO: 157905 - DNA, 1000 bp, Homo Sapiens
ttttttttttttttttttttttttttttttactgcaattattagtttattagtatcatccaggactcagatgttcagtattcctcctgaaattacataaacaaatgcaaatggaaagaatccaagtctaaattatataacaaaacagcactccatcacaaaagcgtgtaaaattacaagaacgctattttaaaatactggcactttaagaaaacgataatctcgaaaaccacaaaattgccaaattgttccctaaactcctaagcagataaacatgactaatgaatgagtttgttttgtaaagaaaaatcattcaaataaattgaataattcatactgagatgcaaagtttgtcttctttcttcctatctacttggatttataaaggggcaaaccgtaatataggaaaatataccctattttgaatgtggcatctttgtttgaaaagctggcccaattaattaaaaatacttgtaatgaaagtctcgtttcctgagcagtccatatttagataaatgggaaaagacatctatagccagcattttcatagtcttcactgagactaatgtcaacaaaaaatttaatatggcagtcttgtattttaagctcacgcttttggggatacattctcaggtcttctttaatgtgggaactgcaaaatataactgccattacatggtaatgggagttaaagaatagagtcctcatgtaaaggttagaacatacttttctattagtccttcaaggacagactttcaaaatgtttgattctaataatcccatgctttgagtagattgattactcttcagtttgtaaatgtaagtgggctatgtgaaatttcttaactgatcaagattttggatgttcagttatggatgaaaactatctcaacttaactttacccccattatgatatgcagggtgtgtagacaaaagctttttattagctaactatatgaaaggatagacactgtaataattcatgtgattcaaaatgggc

SEQ ID NO: 157906 - DNA, 1000 bp, Homo Sapiens
aagcacacacacataaacacggtatatatttctttaatcctccctcaacacttgaattcatctatgaagtccaccacagctctaaaaatctctctgaactagccgcatttctattataattaacagattttaagtcctttttatttaatggaagcataaaacattaactatctgtgcaaaggggtacttttgcacatttatccagatttgttctaaaaagcacaatacatattaagcaaaaactgggcatttgggaaaatattcatataaatcttaatggctacataaggaagtattattaaaacaaccaacaaacaaattgacattaagtcattcccaatttggacagggaggacacattatggcaaaaattagattttgctaaaaacatttcaaacttcactgcaattttaatcatgtcctcaatttcggcaagcctgtcttccaaacttatgcttttaataacttgaatccatgacaatttttcctattctgatgataaaagagccaatacatttttatacaaaaggatttattaaaaaaccagtaagacactactacatcatgacactgtcacactgggcttttaacacaagacttgctctacaatactgggggaaagggcataaaacacaaattgattctgaagcatagcaattaagaaataaaacaatgaaagcaaatttcttttaatgagaactcagaattaaacttcagagggacccaacgtcatacttccattcagggacttgatacaaaaaatttagtttgaactgctattagcaggtggcaggagccaccttcaaatgaatcttcaaattggaaaatactgcttcaccacctgttggggataagttgcaaatggaataatttagtatggtttgtagctattttgatgaccacctcgcctggataccttcccataaccactctgctggtcaccacctcttccacgagctcttcctgcaaatcctcctctagatccccactgttgctgttg

SEQ ID NO: 157907 - DNA, 1000 bp, Homo Sapiens
ttttttttttgttggttttggccaaactttttatttagtattctgtagttgtttaacacacacttaaatggtcttattgggggaagggaaaggggaggttcttgcagattcccaaggaaatgtcagaaaggcaaaatggccagcattatccatttgcttttttgggtttactgggtgaatagcactttccttacataggcatgtgatttcaggtttttcgtactgagaacattgagatttcagttggaagacaccctgaaatcttatgagtagcataccccaaccaccctctaatagctagcttgtttgtataggtagaatgattcatctctccattttagatggctagatgttttgtggaagatcttagaattgcctgcctcatttgctgggaaaaatcagataggaagtggcctttaggggatacttttacttggaaagttacaacactagtacaagtcttaacacatttaacatttgcttgttgaaaagcaatgcgaaagtcaaataaaattaaacatgttttacttttttcctcacaagaacataaaaattatggaggggaacttaacagggaatttaaaaaaagtaacacaatttttccttttagtagtccttgggtagttatgatagaatagtttccactttttgtttctttgaactgggattttggtccaaagttttgtttgtttctagtatctgcttctgcctccccctctatcagatcggcttcctccacggccaccacctcttggtgctccgcggcttgaactgctgtaggaatcacgtggaggagggtaccccctttccatagaagggggaagccctctttcttgtctgccaacccgatcacgaccacttgagtagagatcacttcggctgcttgagtaactgtctcgacttccaccatatccgtcacgtgagctgctgtaatcatcatagcgactgcttccaccataagatggcgggggccctcgtgtaggtggagcactacgtgagt

SEQ ID NO: 157908 - DNA, 1000 bp, Homo Sapiens
tttttttttggtattataaagacatttatttaatctatgaaaataatgtacaataaatactttccccttttcctattattaaagaattttaataaataatctacagtctaaaacataaaaaagaggaaaataggtccctctagttatttttaagaaagtccccctagagtttaattattcctgagatttcattggaaggagtctaccaaacggaatttttctgtgtgaattttaaaagataaccgagtgcccaatattttagaagaagaagaaaggaagtggattaaacgctaattcagtaatacctgaattttagcaaaacacataagtctatgcgactgagggtgggagaggctcgatttttccagtagacggccaaggagcgcgggggtcgaaaggaccgggaggaggaaacaggttagggaaactgcaggtcgatggcacagagcgtactggtgaaaaaatccagctcttcctcggaaaaagggaccgggctgtcgagagaaccctgtaggctaggggagaggcctccggatagctggagacaggagtcggccgcgaagaagttgaggtcgggaaggaaaggtgaatcctggcgccccgagaagacgtcttctggcaatggcccgggctccagcccgccggccccgcgcagcgcgcagccgggactcgacgcgcctgcgccctctaagcgaacggctaaaggccgggggtccgcgcttaaggcccccggcaccacctccggcgggtgacagcaggcttcccacgccgcccgcgaggcggaggggccgcccgggctggccgcgggttcctcggcagggtcgcagatgtcctccagggctcccgggcaggcaggctccccatccggcggctctcggtgctgcgtctgccgcttgtgcttcatgcgccggttctgaaaccagactttgacctgcctttcggtgaggtccagcaaggccgcgatctcgacgcggcgtggccggcacaggtacttattaaa

SEQ ID NO: 157909 - DNA, 1000 bp, Homo Sapiens
tttttttttttttttttttggaccggggcacgctttaatcgggagggctggagcagagggcggccccgccgaggggcgtggtcagtgtgggcggagccttgggggccgagtccgctggtgggcgggacccaaggggagcagccagtagggaagttgggcgagttccagaatcagggggcgtggctgtgtggctgtggcctccgtggggtgggcggggcttacatgccgggcaccaccccattggtctccatgttggtgaggttaccccgcaggttctgctcctcctcgaaagccttgaacagtgagttgaagttgccggctccaaaaccctggtggttgtggcgctggatgacttccaggaagagcgtgggccggtcctgcaccggtttggtgaagatctgcaggaggtagcctttctcgtcgtagtccaccaggattttcagctcctccagggcatcaatgttctccttcaccttgatcttggccgtcttcagcttctcccgcagttgtttgtagtacgtggagggaacagataagaactccaggcctctctctctcaagtggcgaatcgctgtgatgatgtcttcggtcttgagagcgatgtgctggaccccagcgcccccgttatagtccacatattcctggatctgggacttcttcttgccaggcgctggctcattgatgggcatcttgatggactcttcatagttggccaccacaatggatcgcagagagctatattccgtgtgcacctgcgtgtcatccacggaccagaagcggtggaactgcaggtttttcaggtaccattcggaggcggacaccatctcctgatcaggctggtttcccacaatgtggtcgatcatctccagactgcatttgggcagtttaggaagtagggggtccatgaacgctggggcctcatatccaggcaagaattggccgatgtagttcatcttctccaccagggtgtgtgtggtgtccccatacgtctgcagcacag

SEQ ID NO: 157910 - DNA, 1000 bp, Homo Sapiens
aatcaaaaccatctttattatttaaagagcatcccatcatcaggggcacctagacaggagtcccagacagcagaacaatatttacatgggggtcaggagggtgaggttgggtggtctcggggctgagtgggcccgccactgtggaagagaggaccctggagggagggtgtccttggacctgtggaccgggcccaagaagaaaaacgtcccatcctcggcccagcgtggatcccaccaccgggatcacctcgggccctggaggctgcgcagcgagaagccaccggtcagagctgggtcaccatgccgctggcttcggagtgagtctttatggcctggaagatccactcccggaagtcactgactttggtgtagacgcctggcttctgggccagggcacagccagtgccccaactcacaatgccacacagccgccaacgtggcgtccgagagatgctgtcctcacacacaaagggaccaccgctgtcgccctggcaggcatcaatgccaccctcggggtagccagcacagaacatcttgggcttgatctggtttccatagaagtcagcgccattgcagacatcattgctgattatggggactcgagcctcctggagtaccccggcctgttggccatagtactgcgtgttgccccagcccgtcacggtacagatcttgccatccaccagggcctggccggcagctgggaggcacacaggctggatgtattctgtgaggggcaggggactggagaggtggaccagggcaatatcgttgctgttctcctcgctgttggggtcccgaaagggaagatagcccccgtggtagaccacagcctgcacccccagctgcagaccgtggggagaggcctgggccacggcaccggcaaacactcgccatcgggacaggacccggttccgctccgggaagcagtgggcggctgtcagcacccagtccccggagagcagggatcccccacagaggtgtgctccatcatagcgaa

SEQ ID NO: 157911 - DNA, 1000 bp, Homo Sapiens
taatgggagcccttttattgggagagagggaagagaacacaggtgagggtgaaggtgaaatatgaagaagctcagagcacacctttgttcctctgccgtgttaatccatgccgtgccatgctccagccctcacaaagagggggaccccatccccacaccaggcagggagcatttaaagcaatctccacaacagatttttaaagcataattagagctcctgccatgtaagtcataatgaaaagtctgctggatagctagagctgtagctatagctcaactttccaaaacaaacttattcttgtagacacatggttaaacataaaggagtgaagcataagctcagtaagactaactgggcttctaaatagtaccattatgaaaaagatacaatgcacttaatttctgtatctaactatttagaagtgaaaatgctccatacattacctatttcccctccccgaaaatcccctaaaaactgactaagaaatcttcagtattcacttgcgctagttgatatttagaacaaagttgacaacttaaagctttataatagtctgttttaatagaaacaagtgttggaatcaatcaatgtccatttcaggaagcttcttgtctgaatccgaaggcacagctgtgtctgtaccctgctcagcagcctgggggcctgggttgtctccttgtccatccactggtccattctgctctgcatttttttgttcctcttttggaggttccactttgggtttgggctttgaaattatagggctacaagtacttgtcagctccttaattttagcttcaatctcttttgacttgacaactggatccatggtcaaactctgcttgttctgcagatttagcttgttattcatccactccattgcttcatttgtgcttttttctacctttgtcatgtcagcagcatccaaatgatcatactggtcctccttgtttttgaaagagctgattattttcatatactgttggatctgtttcccta

SEQ ID NO: 157912 - DNA, 1000 bp, Homo Sapiens
ttttttttttttttttttttttttttttttttttttttttttttttttttttttttttttttttttttttttttttttttttttttagggagtttgaaggctttattggtgcggaatctgagggcacagccaagcccccgccaactttgatcccggatcccagcgtcactcagctctggacggttcttcccccattgcttctgtcggctgcatagacgtgaggggcagataggtgctctcctccctaacatggtaactgccgctccgttggtgctccctgaagacgtacattaaggccagtacgatagtcaccacgcccagggtcagtaacaccgccacgaagacggggacaaagtgggagctcccagcctcaatgtccatcaccacgaccagggtgtatttgcctcgtgagctggacgcttggcactgataagtaccattatgtgttacgttgacgaagaacgggatccccaccggcacctcccggctggagccttccttcaaacaccgcagctcggggtacgggttgcccctggcttggcactgcaggacgtgtctcgttttatctttccatttcaagtgctgggggcatgtggctcggtcaattttgggaccatacaggactcgcagctggacgctactgttcctgtgcaagaactcgccgtccacctcgagagtggcactgcagaagaagctgcgtccgtcgtcactctcggtagcatttagctgaagttgagctggctgccccggggccgcggccggaactccgtccagcgtgacctggactcgagccccagccatgcaactcacggtcactgtggacccctcatgggcggtgggctcgctgaggttcacaatgggtcctaggaagctaaagaccgtcaagttctcccgggcctcccgtctctcgccccctagggtcacgttgcagacgatctcccgggcaccctcctgatccgcgcgcgccgtggctgtggctgtggccgttagcgtgtccccg

SEQ ID NO: 157913 - DNA, 1000 bp, Homo Sapiens
aacttttataaaaagtttaatatacatcgcattgttacagaaagtcaccttcctgtaaaaaaggtacaaaacctatatactctattatagagttcataaatcagggcaacagaacctttctccaaggagaccagaagaccagctctgccgccgccttggcatagtttggagagcagccactccttccacacctccacgctctgaaaagaccttagaacttgggggtggggtgggagcagggtgacgtcgcccagctggtggccagagctagctctggctcttcaggctacaagttcacagtccttcgctcctgagcaccaggtttagtctccaggaagggatttggtgaagtcaagtgggcagggcgaagttggggcccatccctgccgtccggcttccggcaggagaggttcccggggtcccaggcagaacgggcgccagcacctgcgttctggaggtgtcaggacacggccgagtcagtggcaaaagctccttttgtcgttggagatgacaagttccggagcgagctcggctgtctggatgggaaggtgggggccatcagggggtccaggggctggctcggccaggactacctgcaggtcgagaatgtagtcgatgacgcgctgtaggatttccacctggctaagctgagtgcctctcgggactccgggtaccagttcccgcaggcgggagtagcagtggttcatgtcgtccagcaagctcagcggctcctcagctgccgggcccttccctcggccccgggcgatggccagactgcgttccgacaggcagcacaccgcctcgtagcagccgcgcaccgggctcagcgccttcatgctggggagtgagtccagaggtgccccaaagagaaagaaaaccaaaagaagtccgctacagtgacctgcaacgcgcgcacgctcgccgcggcggtcacttatagagcctgcctggaaggcacgcctctttattcaaaatggcccgcctcggccccgcccccgcc

SEQ ID NO: 157914 - DNA, 1000 bp, Homo Sapiens
tttttttttttttttttgggttaaaaaaaaaaaaatcactttatcatgaaataaacacacaaagttctgttcttcttcctggcagcttcggacgaaattacacaggcatctcccatgcccaccacccgttaggaatgtccattcctgggctgcgtgcgcaggtccagcagccagtctgtgcaggcgcctggcccggccagggagattgaggcagacccccacaagccctgaaccccagtctcaagttttctgcacgacctgtacttcagtcaccagacactcctccaggccggctttgcccgcctcccagaccaccagcttgtcgttttggaagctgtcaccgatggggtctttcatgtgagggatgcggggaaagagtctctgcatcaccagataccttctgcagatcacgaagacacagaccagggccagcagcgtccccagcgcgatcagcagcgacgtccgccaggcacgtgtgtttgcgccctcctcctggtcgcactcgaagcgctggggggtgctccaggcgctcaagaattcatacactctttcccgggctcttatttgtactgtgtacgttccaggattgagtagctggaaggaggttctgtctctgacctgttctgtgattacaggctgcattctcttttgtatctgaagctcatagcgaaatttgcgattgaaatgacttctcattttccagtgcataaaggaatgtgtcttattacactttgcagtcatgttgggtggagttaatatctcaatctgtgaaaagacgacaaacttatctgtgcaggggataccgaaggctgcgctcctgccccgcaccaggatgtgggaactttgagaaccgctggagagtcgagagatgtcatcgaaacgacacccgatacgtgttccctgagcatccgttttgtagtgaagacactcgtactgttgacgcctgttggcaacgttcaagtacaggtcgtactggacgtccgcgggggcccccgggcct

SEQ ID NO: 157915 - DNA, 1000 bp, Homo Sapiens
gctgcatgaatgtcatttattgaaattaacattattatgaatacataatggaaaaatactcctcaaaagaggaaggtgaatgttaaccagcaacaggacaaagccatcctcaaaagacagagataaccgaaacagtttcacagttcagtttatacaggtacaccggggttagagttcctctaggtatgcgtctctgcaggtgccaggttttggaccaggaggctcaggaatgtctccagccgcttcctggatctgtatgcaatgagtcctcccttgttggcccaccgatccaccccagcagcaccctcattttccacgtggtacaccaactgtggcaaatcaagccctgtttctggatttctttctaagcattctttcaagtctactattcccccacccatggcccgcagtatggcatgagcagcacaagagtcccatttgaatgtggtatcttctgaaaagatgtaaatgtcaacgaggccttggacaacacataggctcttataaccagccccagctgccccaaatatgcgatctccacacacacgtgacaatgcagctttgatagtctccttttcacttgtactaattacggctgaaaaactgggggagaatgctgcctcagagccggtgtttccagtgtgtgtttcactgccgtttcttctagagatggtgagctgtagtgaatgcatgttggtccccatgtaagaaaggccccaatagcactgtcctttccacctgagggtgtttggatctcgtgacacaaaaggttgattgatgactcccatcaggggaacccctgtctgtatgtcatagacaccaattaaaatggtgacacactgaagtccacaggggaagattccctggttggatttaatgtcagcagaaccttttatatactgataagttgaatctatggggtccacccaaattcccaaaatgtcctgtggaacattgatctctgtggaatccagagttgggtcagtaaaggcaacatcct

SEQ ID NO: 157916 - DNA, 1000 bp, Homo Sapiens
aacaattttactttttataaaaagacaaatgtacatatttacacacgtccttatgtgttcacacatgacttaatggttagatgacatttccaattttaagtcataccaaggcgctcacacttccctccctgggcctgttgagggctgctggggcttgagggggtggtgggccccgagcaaggcactgtataaataaatgcaaaggccaagagctcgggggaaatgttagtgtacacctctgatcagaaatgtggcaagatccacacgaaaaagtgccaagtttttttcccaagcccctcagccaaagcagggagcagggtagagctcctctgaggctgagggagcattgccccgaaggaggggagtttccttcacattcactggctttggaacagtccccagggctcagctgaaaaggggtagttctttggaacgagattcatttagtgcaattttcgcttagtgcagagccagccctgggattggtgttatgcttttctggggtcactggtctgttcccctaggagccagccagtgacagcgagaccctctccaggcagctgggctcagaggaaaaagccagacactgactcctgtccaagtccctgacctgatacactggtctcagaacctcatcttcccaggaggcagggccagctttacaccacaagaaaaacccagacactggcctgccaggccctgagaggtcaatgacccaaggagggaggcccatccccacttggcagtggggtcacacttggctgttgaggggcccacagaagtccagcttctctgcaccatatccaccatgatgccaggtcctgcttgcctagaggaataagaggggcccaggggccctgctacggtgcacagggaatggcctggatggagggcaaccggactggggtcagcaggctgtccagccaggtggcatccatgttcttcagatctgtgaagacacgctgtagactcagcccaatatccccccctgggctgtcaa

SEQ ID NO: 157917 - DNA, 1000 bp, Homo Sapiens
atctatgccaaatgtttattagtgaaatagtcctgaagatataattctacatatggcgctttgatttcacataatatttaagaaaaagacaaaacacatagaattagacatataattcaaagaccaccgtacaacctttatctttttttttcacttcagcaaacaaaaaatgtcaaatgacatgaaaagtggcaagtcttccgacaataaataataaattactttataatttttgcaatgcaagagcaaacaaaaaaagtttccttttttttttcctttttatttccatagagagagaaaacagtcattttaaccaataactatacacatctttgggggaaaagttcttggacagacacaagtcaaacacaatcccgagacgcttgtggcaaaatagaggtaaccttgttgcaatgctttataagttggtttttaaatctgaattcaaaaacctttatagtcgcttcagacttcttgataaaggatggatctcaaaaaaagtggggagggggcaaagtaaaaaataaaccagctacaggacaggccaagagacccaggatttcaattaaccccttgttaaagtcaactttaaacatatcaaaccaatgcagctccaccttcctgaaaggactctttcagccaaggaggccagtctctcttcctgcgcttttgctggagctcctgtttggcaaggcaatgaccaatatagaaacagcaccattcagattaggatggactagaaaattttctatttttgtttttctctagatgtgcagtgaaatgaaaatgctttctttgagatccttgaatataaatcctctacgttttaaaaacgtctttttttttcagtacttctaagatcattgaatagcatatactgggttttgcgttttgtttgttgtttaattctagtaaaatcccatgattgtcttcacagtgttgctaccatatcaccttgtcattaaaacagacttcgtgcatttcatggagcattcatttc

SEQ ID NO: 157918 - DNA, 1000 bp, Homo Sapiens
cttttccaagtcaaattcttggaggattgtgtatttgtattataggaagtccagatcagatcatagacttttaaaactaaaaagcatcactgctgaactccagctcagtcttcccattttataatgaggactctgaagtttatagaggtcaaggacttgtcaaagctttagatatgtagtgtctgtgaattttaatctaagtttctcctagagaatgtgggggctcaggaacagagaaaataaggtgcaaaaagtagaaatgggtggtgtttctcaaagtgtggtccatctgcatcctagtgactggggtgcttgttaaaatgcagattgctgggccttatcccaatctgaccaaatcatctcaggatctaccttttgaacaaacttgcctaggtcaaattcactcttgtggaagaaaaagtacttcagaaacaagacagccacagaaggtgcacctgctaatttggtggtggtttccagtgcctcatctgtaacttctggtgaaatcctgagagtgttttactttacattgtttacatcccataacattccaacatttagaaattcactctagcttatttttcttacttgtttagcactaaatgaaaatagctccctgaagttaaggagtttatatacagtaattcatgcaagtgtgtaaattaaacagatgactttcccccctaatatctaatgcacagcagctgtcctgaaggagtgggaactttggatgaggggtaaaggaggggataactttggaccgctggagagaaagtcaggctgtagagggcttctataataatggtaccaccaggaggtgggagagtggttcagtaagggaggaggaaggttgccaaagaaattactcatctttcaaaaattcactaggttactgccagtcagccaaacaaatcctagaagagaactgttgtgcctcctaaaagagaaaggaaatttcctccttttccttcctctggcacaggatgggcttctagcagat

SEQ ID NO: 157919 - DNA, 1000 bp, Homo Sapiens
tttttttttttttttttttctagttctggtcagtgggggcactgggtcagatttattgcacttgcaacagagtttaaataagtcctgggtgtctggtgccaaggtgagggaagggttgggcagagagatgaggggcagcatcagtgcagctggcaggcagaacccaaattctgcaggcccaggacagtgggctcccctttctctggggaacagggagggcctgtgtctggccaggctgaggttccagatctgttgccatcatggccccttcagggtcctgggaaattcctggcttctcctaaatcagggtgaactgggcctccaggatcaggtctggagcaggcccaaatatagtcctggatctgcctggattaggtgccaatgtctgagtctgggttccagatcaactccagaccccaggctggatctggccccatttgagttctgattccccttggagctgggctctgggccctgggccagcatctatccttgtgtggcatctgtcctgagctggtcctggggcaccatgcatagttagtgttctttgttggcccaccagggtggggctgtccagagctgccaggtcttaactccccaagttccaggttcttagctgggggcttcttttggatctctggcaaggctgaggacagatctttgcaggttggagctggacaggaagtccttgtggcatgtctggcccaaagaactgtgaatggatttcctagttatctttccaagttgtttcaggaaactctccaaaatgcaaaggcttcagggaggctggggcctctgtccctggatctgagttcccccatccatgaagagggtatgtgtaaacaagggtccttcacagtgcatgggggggagggatccccagctcctcacccccctggctctggcccttcaagtatgtctctgggctggggagaggagcttctccctggccgtcagcaccttcaagaagtacccagacccctccttttcagtagaatga

SEQ ID NO: 157920 - DNA, 1000 bp, Homo Sapiens
ttttttttttttttttggtaccatatgcttatgtttattgtacagtcacaagttacatgttgtaaatcaagcagaacactgtaccagttttcactaactcaaatcaagttagcaaattacaaattttagaacagattcattttctgtctcacccaatgtgggtgaccacaaagatatttactttctatgttattaggtagcaaattaatttgatatactacacagcttccaagttaccttaggatatttcaaagtgtttcaaaactggtaaagaataattcatttccagcctgaaatacaatgcagaatggaccatttaggggtaaataacctcacttaatcactctttcctgctaacaaaaataatacaaatatttgtttatattaggcttactaaattaatgacaactttgaaattatctagatttggttacattgttatattgcacttgagaacaatgacaaaaaacatcaaagattcagtacctctcccaagaagttcattatatatcagaaattaaaatgaaatataagcatatattgcatgctgcatatttctatcgttcaaaccagccaaccaacaaactaaaaggaatactctccaaaacactgagtattaagtaatttcatctgccttttttgatcctacaatcatttttcaaattttaggtgtttttctttaaattattcatcaaactactacatatacaagctatccaagaatgcaaacaaggtgacattgagatgggtagtggctgcacataggtattccaagaacgactcattcttctccaccaagctcatcattacattttgcaacttaggaagatctgccaacttacaaattctgtttgccttacaaaaatcgctgatctattatatacaatacttttatcacacaaatctctcccttagggtcatgattcactatcaaaaatctttcacagccctcttaagccagtaaagtctcttttattaatacttgagttttctttatgga

SEQ ID NO: 157921 - DNA, 1000 bp, Homo Sapiens
tccgatttaagtattttaggcatatttaataaataacttcagtaaatagcactgtaaaaagtgaactgttaaaactaaaggcacttaaaacaagaatgtgactagtgtgaaacaagatgggcaactcaaatggtgagaagtaaacatacagtggtctgttatggcactaactcaaagtaagactcgcgtaggtgagagctgttgcatagccacagtataacttcacatgttcattaaaaaggcaaattgaccgctaaaacttcaaagaaaaagtactcataaaaaagtcttaccccaaaattgcaaacaaatacattaaaagattagaagaggtgatagaaagcaccagacattaaacaaaataaaaataataaaataaattcaactcaaaaggtccccattcagcaaatactttgtaaagtatggcctgtatgtaaatagtgctaaatcaaggactttttagcagaaaattgctcggttcttttatctaaggcttgaatttgtaaagtgaaggcataaaagttaccaaacattaagtaactcttaaaatggcacacaggttttaaagctattggtttttccttcctaactctctgaatttttcccatggcctttgtagatcaactatttcaaacgtattttacaccagcaactctcaacatacttgtctttcagatatgtcatcagtcatgtctaacaggcaaatagcaaaataacagatttaaaacaatccttaactagctagcaggacatttactttggattctgcataactgcaaactgacatatttgtaaagctaaaaatcagttttaatacatgattaacagaaactctcatcatgctcattactttaactattgccctttcaatcgctatagaaatatcacttaatccaataagcttgatttcaatagtccaggaagaaaaggtcaaaaaggcacaatgtgaccttagctgacaagaataaccatcctgtctcaagtcttttgtcagtccctg

SEQ ID NO: 157922 - DNA, 1000 bp, Homo Sapiens
tttttttttttttttttttttatcagacaaacacaaattcttttggttttaatctttacttccaatcccaaacaatcttgtttcttttcattataaaagtactaaacaaacacggacaggagaggaaactgacatttgcaaacgatgtaccttcaacaggcatctcaacagccccatcaccaacacctgtgtgcaaggcatagccatcacgcggaaaagtctcaggactcagaactacaccataaatgcaggatctttttatttcatataaaaatgatcaatgtgaaaaaagccaaactgtatgctggttttacagactccgacccttcctgacagtcgtcttgtctggccaggctgggggcccagcattcctggaagggagagacagcccagcatctcagtatttcattgggacaacaagctggatgtggcagggaaagctgagagtgccaaggtccccttgctttatcccaagctcggagggacgcagcctggcatggctctggcctagcagccaggtgacatggccaggcaccttcctgtacaggcactgtgggctcctggcccaggctcactagaaggtcttctctgtggtgcctacctagggagctgtgatcaagccgagcagccgtgcaaggcgtttcagtctgaccttttcatcagatccccgctccagcccctcggagaaggaaacatcagtccacagtgccattgtaggatttgttgaacttgttgaaggtgaagtccacagtgtgcgtggagataggctttctgtataatggatttgaagccatttcatagcgggccctggatcgctcgctctgaaactttgcaaactccctccggtcgtggatggtgacaagcagcttccagatagccaggagtgcaagcccaacaaggaggatgctaccgaccacagccaggaggatggtcatggcgttgggggtgtttccacactctggctccctgaggacggtcaggttggacttcccactgggga

SEQ ID NO: 157923 - DNA, 1000 bp, Homo Sapiens
tagatttctattaatttatttaaggcaattaacatattagttctcaggccaaaggatttgtaaaacattacaccaaaaggagaaaaacaagcggtcatgaaacagccacgcaagcgcagctcagcccttgttgcctgggcgtacaactcttccccaggaagcctgggaagaggcaggtcctgggagcaagatcgtccatcatggagtcaccaggccacctggagccatgccgggggtggcatggacacgacagtgaggtctgcactggctacagcagatctgaggcacggagggagctgcacagccatgggcagggctgagcacagcacccttgaaataagttaaataacaaagccctaaaatcactagtaacagcataactgccacctcccccagaggccgcagccgccaaaatgtagtgcttggagttaaaggggtgaccccactcttaactacccacaaggaggactacaaagagttgtcagttattgctttaaggaacaaaggtctctaggtaggatttatcttctgctaaggcattaaggtaaactgagtcccagtgaactttcaagtctttttaagggctctaagcaggactgtcagctctgaggctccccctccatgctcttcaaagcctgggtgggtgtcagggtgtctggcagagtgggagtggaggctggccagctggctgggccacccaacccgagggagggggcagtgttcttcccagtcgcagtctccagtgatgagcatcccctgttggggccttcggtggctctcctcagcggctaatgcagttctggacatccacaaagcctaggcgttgcctgcgtttccgctgctccgtcatctgctccttgagctcgttgagctgggcagtgaggtgggacaccagcttcatggtggagttgagcttgtcctggagaatccgaatctcattctgctccccctcgccctcattgctgacaagggacatggcccgcatccgggggaaccagtc

SEQ ID NO: 157924 - DNA, 1000 bp, Homo Sapiens
tggtggcattattcaatcaaatatacagagtgcttcctttaatatgtacacatttacaaaaatgcactttcacgaggaggggcggccggggccggcaggtgggcagcgcctggtgccacggcacgcgtggacagttgcgaggggtctgtgtgaaggcacttgtcacgagcttcaatactgccgccgtcccaggatgggagaactgcgcagcaggaagggcacttctgaaagcacagtggagagatcgctggagcgggcgttctgggcaggaggaagcacagacggcaggcagggtggactggccagcaagcgcgaggttgacctgccggccttgggccacgccgatgacctcaggccccactaacaaccacaggtgcgtcaacagccacgggccgtgccggcagccagggccacatcaataaccagggtcccaccgaccaccgtaggtcccaccgacagccacaggtcccattgacagccacgagtcccaccgacagccacaggccacaccatcagccacgggtcccaccaacagccatgggccacaccaacacagccatgggtctcaccggcactttggcctggagccacagagaaacccgagtgaggaataaaaggaagattctgtaaacagtgcacaacctctggtaacaaacgctacgatttggtgacgacgcagacaccctttgctctctcctttcatacagcgagtgccacgcacggaaactttacaaaaatagcaactatccgagaatactccattgttttcagcctgacagttactgaataatttatacaaggttaaagaaacgtagaaaataaacatttggtttttgtttttggtggtttttttacacaaaataaagaaactatgcacatggcctcggcctccgggtccggcagacggcatggctcccaccgagggccctgggtcccggcccagctggcagccgcccctactccttgccggcgtagcgggcctcattgatgctcctgaccg

SEQ ID NO: 157925 - DNA, 1000 bp, Homo Sapiens
tttttttttttttttttggtatttgaatacatttattgtgacaagaatgctgttataaatattcataagcaaaggccatctttttatctaggaattgtcaaagagaagattccaaattggaaggatacatcttttgtaaaatctgccaccaattcctgctttgagaataagcacctattgtaaaatttctactaacattataaatggtcacagcacatgccacttgatacaatccaaactttgaaatgtttgacttctcagtgggctgtccctctccactgcaaccccccttcctccagcctcctgaaacatcgcactatcctttggtaagcaattccatatagatagctgggggaggaggagtataacctgaccatagcatcaggtacatcaggtacatttatttctaaagtctaatagagaacagtttttactgcttaatagtaagaagcactgagagtgattttaatcgacattcttaactctttcaactccacctagatagctagtatctacagatgatgcagaaaagaggttaggggagtactttccaatagtttattgtattttcttaaatatcctttctggaattttcagaaacaaaacataaaaaaattatatactttattacaaatggtaaactcagagtgctccaaatctcttatttacaaacaacactgggcaggatacccaaacaaacaaacaagaaataacttacaaaggcatgaagctgtttattgacagtaatcagctttcatcaaattaaaaaatatatatatgtacatacacagttaacgaaggcaggccagaaagagttcatctgtaggctcagcctcgctctcacaaacctccctcctgccgcccctccccaaccctccccccgctttgtgttcttaaggagtactacagaagcaatctacagtctctattgcagtttgtaaccccctccccctcccccctttaatactgaatgagatcgaatgttaggtccatgcagttc

SEQ ID NO: 157926 - DNA, 1000 bp, Homo Sapiens
atggttattcactctcaagtttattattccccttattttattgtagcaactctggattctttagtataaagagaaatcaaaagaaacaaaatatctatagtcttagtttcagaactacactaggatctggtgacctaaaccatatgtacagaatataaacatatttatactttatatgtacatagttaatggttacctatgcattataaatagtgagtttgacttagattctccaaaaataatcattttgggtgggtacatgcaaaccagtacacataaacctatttataaaacacatctctatgctttttttttttgcttctaaatataaattttgctatttagccatcagctaaatgatctaaatgcaaaccccaaagtttccagttaaaagtataaaatctgcttctaaccacagcagcatactgcttcaagtattctcctcctatgtaaggtcgagataattttgtcacatatgaattttaggtggacatctcatttcctcacatattagacatcctgctggggtcacagcttctttgttccatgtgtctttttttgttgttttttaataagacattgcaaacagtagctatttcttaaagtgacataattttcgcttttgcattctgataaaaatgaacatacttaagcctcttccttgcaccctgaccctggtgctctagcataatgcaacaaatcctacgctcaatggtttgcagggccatccacgcaggcagatgactgggtggccacaaaaggctcattttgcttctggtcctctttcatgccagctgcctggtctgtgatcgaggagaaggacagttggtcatgctctatgatgtgcacctgatcctcgtccttgtccttcttcacatagaacatttttctgaattttttcagctcatggagttcacagaaggtttccagaactaccaacatggcaataaggccaagtagcaggtaacacgtgatcccaatcttatagagctctctgaat

SEQ ID NO: 157927 - DNA, 1000 bp, Homo Sapiens
ttttttttttttttttttttttttttttttaaaaaaaaaaccaaactattctttatttgatagccctgggacatggtgccctccacccaataaagcaccctccagcaaccctcccacccctcacccgatacatagacatagggacacacacacacacacacacacacacacacacacacacacacacacacacacagatctggatccgtcttcacttcctgttggcctgagcagtaccaataacacactggttcaccttggaggcaaagcgtagagagttgagggactcggagacgttctcttccagtggagaaatgttcacaaacatgagcatcttagcactaccacccagagagttctgcagcaggtaggtcagtttgctgttccggtaaggcacgtgggactccttgttgctcagggccatgataaccagccccagcgtggacaggctgctgttaatggcctgtgtttcccgaaggcgttcccgctccccggggccgagggctaagccggggtcaagtcgctcactcccggccaggtccacaagactgaggggggccccacactgcaggcctcggctggagtgctccccagaaatctgtagctggaatacactgtggctgcgtgatgaccgttcattctgggctgtgcgggccacagcccgattctggcgggccagatgaagcagggcgtccacttctttctcacaggagacagggacatatcgagcattggtgacagtgagctcctcactccctggccctgcacggcgaatctcacactcgcccccttgacccttccgggttccagtggccagcaggtcccggacagtctcattgtagatctctacgtagcttgctacaaagctgtaggtccagccctgaccactcagctcctgagccacagagaagaggtgccgcagggcccgagggatcagcccctccaactgggggtctcccccaggcccaccctccattgtgaaggtcttgccactgcctgt

SEQ ID NO: 157928 - DNA, 1000 bp, Homo Sapiens
ttttcagtttccaaatggttattttatcagattgtttgaacatttaatttatcctgtttgcaatccaaaatagttacctgaagtttgctgttttgtgtgtatgtgtttacttttattgtatatttatttttctaaactctttggcacaattttctgggggcgttcagactgccacaatacaagtcaggagagggcgttttctttgtgctgccaattctgatcatttaaattttggtttgtttgggttgtgatttttttgtttttgaagtctgcgttatttgtaacaattgtacttatatttttctatatcctctaacgccagagttttctttttctcccccctcccccccacttctacattcacagttgaaccatattattaggaaaggcgccttgatgaaaagatcaggataggagctctgaccattcgtcagtgttttccctagagtaaaaaaaacaaaaaacaaaaccaaaaaaaaaaaacaaaacaaaacctaaagagcgtctttcctctgtgtgtgtgtttttttttttttttttttttttttttttacatctcttgtgctgcatcagtagacagaacttcggttagttttatgaaatgcaacatctaaccccttgttttctgggaaaaagaaactgcaatgacttgaagttgagaatgtggataccgcctcactcacacacactcattctcagactgtaaaaaatccctgaccctccttctagctggcaagcatacagtaccatgtggcaaaggtacagcgaaggtgggcttgagacccaggctccatctttctcctcagtagcaaaggccaggctgccttttacaacaaagcaccacagctgaacccagtccctcctcctcccccaaaccaggcattccactcggcactggccaaaagacagaaaagctacttctagcctctcctgggaagagataactttctttctttttttttaaataagtaactccattgtttttctcttttccaagatg

SEQ ID NO: 157929 - DNA, 1000 bp, Homo Sapiens
ttttttttttttttttttttttttttttttttgaagtcaagaaaagggtggacttgaatgtttatttacaggatgctgcaagataggaaattccacatagaaattagaaacctagtcagaggacaagcttcatacagtatgtatgtacagttggaactgttcaagtatagtttcagtgtaaaaagtgctacagtaacaaaccacatttaagaaagagttcttagtagagaaacaataagacaaaataccaaacgtagtacacaacaaatttatgtctcagctacatgatctaaaagttaaaggtcccaggagccccatcctgaacttggaaagtgtagccttcagaggtagtttctggtacaacgttttgatcttcctcttcctctacagagaaatacttctcaattaagcttaacgaagccttatacacagactcattttcatggttttgtagagcttcaattttgtctaagcctccacattcttcaatcattatactaagtttctcagtttcacctagtttctcagcagcctgaaagatatttgaaatggcatccaggataaccagaataatcttggtatcttttgcagttaagaggttcatcaacggttctattatgccacagtgaacaaggtacacaatctgttcaactgttccaccactggtatagttggtcacggcccacacagcttccttttgtgtcttaaaatctgccttagagagaacactgacaaggaatgggactaatccatgattcacaacttgctgtatctggtcctggcggccggctgtgatgtttgacattgtccacgtagcttccttctgaatgttagttttggggttggtgagcaggctgggaaagacggcgagtgctcctgcatcaatcacaacctgagtctgttcatctgtaccagtgacaatattccctatggctcttagggcaggagtcacaattggcaattcagaagctcctagaagcttcacaagttggggcacaac

SEQ ID NO: 157930 - DNA, 1000 bp, Homo Sapiens
ttttttttttttttttgctttaagttttaatgtttatttccccaagacagcctagcctgcactctacttggataaattttacaagctagttttctgctgcttctagttttaaactttaaccatgtttctgatgacaaggaatgctgcaaaaatactctagttcaacaaagagttatgatcacaaaataatttttatccattctacagtgtttcagaattaccagttgatttttaaacacaaagtagatatagatgctaatggtggctaatctggtatgtttcttatagcaaactgttgttcatgcaacacttgtgctcaaaggggaaggcacaggatttcctacaatgagccaccttataaagagttctttttgtacaaattaatttatgtcacatttaatttagtgtgcataacctcaaaactgaggtattattccaatttataaaaaccacttgcataacttttatgcaagttttaaaaatacaaagttttctccctaaagtggctcaaaatagattgttcatggctgcctacatctaagataaaaagattctaaaacaattgaacagattaggcatattattaaaggtgttcaaaccattacttgatttgtacatctactcaaacctcttcatcggtctttattcagcagtacatatgcaccaaattccattttagaagtttccatatcattttcatagaaaacaaagtttgaaaacaagtaacatttaaacacagcacggtattctaccacaactgaaacttttttcttcttcttctttacaggactcaacaaaatctaaaaatgaactatgctgtagatttacctcatgcaaagatctttatgttatctctgaaaatgaaaaggatggccttttaagcacattttactgttttatactattatggcaacttgtgtactgcaacacagtctattttgagggaaatttatgatttttttcatgcaaaaatctacacaaattagttttgatgatatgg

SEQ ID NO: 157931 - DNA, 1000 bp, Homo Sapiens
gaatgacaaaagcattttattgaagattcacctgcagatggataagagggaatgagaggagtagaatgggacactaagtggttctcatcctaagcttgcagggccaagtgctgccgggtgttggagaagtagtttggttctgatgtagatggataatacaggatctagtgggagatggcattggactgggaagggacatatgtgaccccaataattctggagatgacactcctggtcattttcttctctgcccatgggaggtgagaggtcagctgacatccttcccattccaggtgggtcaccaggcccaaatcaagaagtagctaccaaactccaagaggcagagtccctgtcccagcacagaagatcatcctggggcagagagagcccatgggatagtggaggggatactagtaagatgagccccagagacagaggatggaggtgaagtgaaggaagcacagagacaccagtgctgggcccagctggacacagtgagctgcagggacctcgtctcctctatcgtctcttgttcagggtggtggtagagatgatcttgctgctggaactgccagagacactgccaccaaacccaaagccacttccagagccggagccaaagccactactcaggccaaacccggagccacttcctaatcctccgctgatgcctccagtgctggtgctaccgctgaccacagagatgctcacggcactctggcattctccagacattctgtactcctcgccctccagcagtttgcggtaggtggcgatctcgatgtccaaggccagcttcacactcatgagctcctggtactcacgcagcattcgtgccagctcctccttggcctgctgcagggcagcctccagctctacgcgcttgctgtgggcatctttaagggcattctcacctcgctgctctgcatcagccacggatacctgaagagtctggcactgcttcttgatgttctcgatctctgcccgcagcctctggatc

SEQ ID NO: 157932 - DNA, 1000 bp, Homo Sapiens
gacattggcagagctagctgaggttttattttggaccaaaaaaaaaaagcaattgaattgttttgtagctggaggcatgggcaaggggggtccccaggtagtaaactccccaggtgggctgagggctagggctgagcctcaggtgggtctcctgttcccagtgctaccctgcatagcggcctccttcccaggctctggggcagcgcaggaggggtaggctgggaggggctgccgcagctgttcacttgggcaggacgtcagaggactcagacaccagcttcccatcacgtgtctcgatcttcttcacaaccacggccctggaggagctggtgcggctgaaggagctggagcccgcgccagagccaaagctggagcccaggctgtagctgaggccggggcttgtgaggcccccataggccgagctcagaccacctgcatagccgctggtggtcttcgtatgaatactcatgttctgcatcccagactccagccggctctcctcgccctccagcagcttcctgtaggtggcgatctcgatgtccagggccagcttgacgttcatcagctcctggtactcacgcagctgccgcgccatgtcctgcttggcccgctgcagggcggcctccagctcggacaacttggcgttggcatccttaatggccagctctccacgctgctcggcatctgcaatggcggcctccagggaagccctctggcctttgaggccctcaatctcagcctggagccggctgatgttccggttcatctcagagatctcagtctttgtgcgccgcaggtcatccccgtgcttcccagccaggctctgcagctcctcatacttgatctggtacatgctctcagcctcagcccggctgcggttggcaatatcctcgtactgtgccttgacctcagcaatgatgctgtccatgtccagggagcggctgttgtccatggacagcaccacagatgtgtccgagatctgggactgcagctcccggat

SEQ ID NO: 157933 - DNA, 1000 bp, Homo Sapiens
tttttatgtttgcagaaaggcaggaaactttattgaataatcttttctttggggtagagaagttgagaaaccaaagcgtatccaggtcagagaggagagagatccgaccggaagagaagagcacagagggcccaccatcaggagagagtcaggacagggggtcctgagagcagagggactgagccttgggtccagcagcccctcctctctcctgcagggaactgccggctctctcctcctctgggtgctgaagacagagggaggggacgccaggcagatttaaggcctacggacatcagaagtgcggcgaccagaggcattagaggtggtggtaacagaggcactagaagtcgtggtaacagaggtgctacgggggctgacgcttcttggcgtcctggccctcgagcaggctgcggtaggtggcgatctcctgctccagacgtgtcttgatgtccagcagcatcttgtactcttggttctggcactccatctcactgcggagctcgctcagctgggcctcgatgctgctgatgagtccctggatctgctgcagctgcagggcatagcggcactccgtctctgccaccgtgttctccagccccgctttcatgctcagctgggactgcagctcaatctccaggccttggagcgtgcgcctgagctccgtgatctctgtcttgctggtctgaatcatggcagtgttggtagacacctccttgttcagctctgcactcttggcgtggaaccattcctcagcatcccggcggttcctctctgccatggcctcgtactgctccctcatctctgccagcacgcgggtcaggtcaatgcctggggtggcatccatctccacgttgacctggccgaccacctggttgctaaattccttcatctcctcttcatggttcttcttcatgtaggctagctcttcattcaggctctcgatctgcatctccaggtcagtcttagacagagtgagctcatccagcacccggcgcag

SEQ ID NO: 157934 - DNA, 1000 bp, Homo Sapiens
agcatatctgatgggcatttataccacatcaatatttatttaatcaactttatgcaaaggcacattgatgagtttaaatcactatagtccttatacattgaaaacagaacaccagtagtgaaatgacatttattaattccattaagacacaactacatattttattcttataatggccatgttaataagttcaaggcatacttcaaggttaggatcaaaatttggccagggcttcttaagatagaccttaaaacattgcacgttgatgttcttttgaacaagtttgtctccaggaccagtaaatatgacactttggattttaagctgattaaagagaacaggttttattaataaagactgatctcaaaatgctgggattgataaaagaattaaagtttcaacatatcaattttaagaagcaaagtgtttcaacaactgagaggtaagaaaatcttgttatttgcatgtatttttatataatcaatcaggttgcagattctaaaattgctcatatccagcatgatggtgcttgagaccaataaaataagccagcaacactagaataagtactcctgccaaggcagctcccaccgctatgggcacaaggaagttgtcgtcatctgcactgcagtcttgagctgtagaatactttccttgtgtcacattgaaaggctgaacccttagatcaaaggtatttatctgaaatgctccagacactgaaacagtctgctctttgttgcacatataagaacttcccaggggggcatcccagtagctgagattgttatttgcaatgctgaaaacggagccattaaccaaatacatgctgatgttcacttccttcagataaaatcggttttcatttttcacagcaaagacaaagtctagatacttaatggtgctgctattgagtctaagtagagcagtgtgagaacggcagctgcctgtggagtgagttgtattggggttgatgttaataactgaagcaaccttatcctga

SEQ ID NO: 157935 - DNA, 1000 bp, Homo Sapiens
atagggaacattttatttggaaagattttgagcatcattctcttttcattttttattaaggcagtaacattctttcttcctgggaggcggaggggggaaatcatctgaggctacagtaagttcaatctgaagtcaaaaccaaccaatttgtattcagaagcagcaaaaatactggttatgggctgggaggagccacatgttggctttctgagtccactgccaaggaacagatccagagcaatgcatttcaattgctttgaaaaatggctaagttccattacataccaccactaaagaagatacctcattgatggagcttttcaccatgatagagggcgtcttgcattggttcacaatggcctgttgctttttagccttcagttggtttagggggaaattgctcaacctatgagacctgctcaaattcatactgttctggttttgctttggaattctttgtccagtaaattagctcttcataacgcagttccaccatttcttatccagcatagattcattctgcccttgacagctggctaggtgtgtgtgtatgtgagtaggggtgctattgattggcacatattgtcccccctggagtttaggggtggcagaaagcttttatagtaccaaaaaagtaaacattgataatatggcctgacaacaatcagatatgctaagctctagaagcaaaagcaaggtaggattgcctccaaatgttgacaggtattagccataccacagtaactagatctaatgtgagggctaatgcctggagaggcagaaccctaaggatgcttagttatagctccatgcctgccgagtggcttgattccgattccattacacctccttggatccaaccttccattaaggctgaaggctctagagggcagagtattcaagatgttagatctggtccaagcccaaattctagagttaaaagcagaggggttcttagtggctgaaaaaaaacaaaacctgatgacatttgggactccag

SEQ ID NO: 157936 - DNA, 1000 bp, Homo Sapiens
aagttctcttgtttatttatcttagatctttgggactgagaaatctaaaaaataaaaccactcagattccataggtgacagatcaaagagcccgaagcaaccagttcacatgaacatcagagtgacaatgagttaaaatcaaaatgttttctttcttgcatttatcatgtttctatttaaactcaaatttcctttttttaattaaaaaatttttgtgggtacataggtgtatatgtttatgaggtacgtgagatgttttgatacaggcatgcaatgtgtaataatcatgtcatggaaaatggggtatccatcccttcatgcatttttcctttgtgaacacaaatttcttgaagagaagggtatgcatccaggtttttaagatgactttttattttgaagatctgaccattggccttcgatttacaggtatgcagtagggtcactcgagtcacagttttcaatgtgcacatgcgattgtatgccaggataaactttctgcaagggcaatagagttccaagtttttctcccttcttaataggacctttatacttaattggcttaatgtagaacattttgacacaaaaacctcttccagatattcgaacaccattattgatagcattcttgttttgataaggtttctcctggcccacaatcattccagtgaatggtgcgtacacagtagatccagcagagcacaagatgtccacaccctggtgaggcctctgacttctttgagcagagtactgtccacagccatggcggtcacacgtccggatctcattggaagacttgccagcacatatattagcccatggccctgccagtgcggtagaaatcagaccagccaaaaggagggctttggtggaaaacatctggttttacttcctttagtttcttcctctgattagagttgcccccacactctctttgaagaatattcaagtttgaatgaatacttcctagctatttagccttagaattctgcatctctcattt

SEQ ID NO: 157937 - DNA, 1000 bp, Homo Sapiens
ttttttttttttctacgaataaagcacacaactttattcacgaagttgtgagtatgacagtgatgcagagtatatgacaaaggagtgcagtgagtgctgctggcaacaggagcggggagcaggtagggatcacaggcacagcagcgcggagccggcagggccacctcctcctctacacacaagcatgtggcacttagcgcgccaacacacacctgctcagtttcacagggaacacgacacagcttttcaaaaggaattcttctaaacatttgctttcatatttccaaaaggggagggagggcaggaagaaccacacaccttccaacatttgaaaaaattccataaacccaacttaaaatcaaagaactcagagagcttcaatgcggagtcatcagcaactcgcaggaaccacacacatgattggacaagtctgtacataaaaccccaaaagaacatcagttttgtggacaatggtttcctctgctgtaaagaaacgtatgcatatatgatcagtaagcagctcacatctttctgaatgtcaaggtctacaggattgtctctgtccacctttggtcaatgggttcaggaagtgactcatgggaactgcactcttaggagaaacacttttgggaataattttattgaataacaaccaccactcaattacactaagcttcagaaattgttggatttgtttaattttgctgtgtacctatacattgtttagaaagtttcttttggcttaaactgaccatttccccccttctttttgagttttccatgattaaacttgcccaaataaaaacataacaatccatatgcaaagcatatctgccaccacctcccactgcttcctgggccgcaaacagaaaaataaacagtgattaaaaaaaaatgccaaagtgaaggtttctctttcttctatcacaacatagttgggtagttcccttaaagtacatcattgctataagttggtatcactgcaaatctcaagtcccaa

SEQ ID NO: 157938 - DNA, 1000 bp, Homo Sapiens
caagtttcagtaaaaaccacaggagttcaagaaagattatgactcctgttccgttactttttgtgatctccttagattgcttctcccagatggtaggagctgccccttttggagtctattgaaggaggtgccctggtggccacactgggctggaggggatctgaggacccatgtccaccggagaaaaccacgaatgtacctgaagctctgcttctggccactgaacataggaagcctgctgctcagggcccaggtgctgtgggtcaaaggaaacacagacacgtttcataaatctttcttttattccaagtttcaagtatgtgtaagtgtctgtgatgacacatggtgctcagtgagcgccctgtcacccaggaccctggttatagcaccgttgaatcaaaaacccacagaattggaacaacaggaagatgagtcacttacacagtgggttggtttttccttagatttgtacttccaagggcccagatgtccaatattaaatgccaataaatttgtgcttcaaaagtctgtgaaaatataataatagtatcttgaaaaacaaggggtgggggctgtggatagggaagcaccaagtctgagctcaccaaatcagaaaacacgtggcaccattatctatgtgactataatagactggagggtttcattggaagagaggtctagatattcaagtttgctgaaaatgacctaagaggaggagaaatggggttcggcctgaccctctctgggggggctgatgagcccgcatttgtccacgtgtcactggagaagagcgcggctccactgtgtctgtggtgagctcggtggcttgaatgggacaagctgatgacaacctgtctgtgggcctcatcccggtcaagactggctcttggtgctgctccagcagctctgtggacaaaccccacccccgcaaggccttctcaggccccaagggtcaggtagcagccccccatgaatgatgggagggtccctttcctcctga

SEQ ID NO: 157939 - DNA, 1000 bp, Homo Sapiens
gcaaaccaacactgttttattgtcaacacaaccagcccactctgccctgagaaggctatggacaatgggtgtctggggtctgtgggagagagaggtcagcaccctgagaactgctggggctaccacaggggctgggtgggtcagaggtatggtctggggggccaaccgcggaggagctgggcctaggctccccctggctcatctgcagcaggccagtgagagcgatcagctccggcccgctgagccaggcagtggaggggccccgggagggtgatgggcgggggagcaccctggcagacatgatggggggcggcggcagcagtttcagggagcccatcatctgctggggggccttggacaggtacaggggaacacgctgcccccggggcagcagagggtccgagaggaagacatcttcacagcacaccaccgggaaccctgcatctgggggcgcctgctgtccattccagtgccctgtggcaggggccacgggcctgagacccctgcccgaggctgcttcatacagcggccagaatgaggggtgacacagcgtccggcctgagaacgaggctcctgagctacagttggccccccacaccggccgaggtcctgctttggcttcatacttggggtcccagggcgctagtggagtcatcctcgagggggccacctcccaggccacctggggggaacggggatctggggctccggggggctgctcagtggccgggcctggcaggtggtggggcagcagcagctgctctctccagatccaggaagggctacgggatgggggctgtgggctggaggggcagggactgaggctgcagccacaccgcccccacgcaccctcccctggagcccaagggtgcctggtgcaagggagaccgagggacccaatctccagcagggacaatggagaagcctccgtagagcgcgtggtgaaggcatggaggcccccagtcgctgtccccccacggctccgtccgagcccctcacc

SEQ ID NO: 157940 - DNA, 1000 bp, Homo Sapiens
tttttttttttacaattttatttataagaatatctgtgttatttagttgtaaagaattcagcaaaaattattaaaacgttcacgtccccaaaacggggctgcccgctttcccttcctgggtgtggcccacctccttggcgtccccaggggaggggaggctggaggaatgtttaccagaggaagtctccagccctgggaacctcggtgggggccctggagacagggagggcctgtctgggaggggggttgagcatggccatctcataggtgcccctggagttggggctggggtttggggtggcctcccccaagaactaaaacactccatcctttcccgcctacctcacccagagccacgtcttccagacaggggcagcaaagaactctcccttcccagaattagccctcaggaagctgtgggagcgggcaagcagggatggggcgagaggggagagccttggcaaagtgtcttatacagggaggggaaggctgcaccaccagctctcccagtggggtgcgttctggtgggagggtaggaggtgcagccccaagccctccctgcctgtctccctgaaggcagcatgggggtgccaaggagcaggcagggaggggatggagaaataatactgtgctcgcttgccggcttgctcgctcacatataaaatgtaattccttcatttttacatttatacatccggcggggccagggaagggctggctggggaggggctcactgaaggacttcaccggcagggggcaggaggctttctgggggcagtccgacggggcagggccctatgccaaggggtcccctatctcgtcctcagggccccggcccaggagttctcgcttctcgtccgtgctggccagggagtggcgactgccatggccccccatgtagagtgtggcatacacggggttggtgaagttggtgggcttgtcagggtccagggcaaagtcagcgtccagtaggcctcccacatcatcaggctctccgcct

SEQ ID NO: 157941 - DNA, 1000 bp, Homo Sapiens
ttttttttttttttttttttttttttttttttttttttttttttttttttttttttttgagaatacacagggagctttattatacaaaatggcggggtggggggcggcaagcagcgggggacgcagcatcaagcatcctgcatggccgttatcagcccttgacctgcagtttctccttggatctgggggggtgacccaccctctctgcacaggctgtgcctcaacctcctaacttcctagaaggcacttggcctctccaggggtaagtccctttggccaatgatcaggagtttctttcctcccccaagtaacaagaagcggagctgggtggggagggcgggggcggtggtcagagagtggaagggcagagaggctaaagggtccaggagcaaaaggaggtggcagcggatggcatcaaagaggcgagggtaggtcatgctggcaacaggaagcaacttcttagccagggccggggggcgggtgtctggctggaatctcccctgggtacatggagggtgccagccggctggacctgcagacccaggaagcgagatgggacgcctagggagccgggcccccttccacaagcaccttctcatacttcccatgcccggtggccacaaacttatacctcttcccagatggggtgctcttaattgttgatgaggtcttggagcctcccttctgctcccagaggcttttcttgctcatgtctccagccacaatatccttgcaggacggagtcttggccgcagactgagcctgtacctcacccgtctcccaccgactcttggtactggccacagccatgctgggcagctctatggaggcctggcgggctagcttgggggtccggccagcggtctcgatggcctgggtgtattgttccagccactgatcaatcttggagatgggcaagtctggctgggatttcttcacactgttactcttctctatggagcggtttagggactcggtcctgtcgatgagtttggtggta

SEQ ID NO: 157942 - DNA, 1000 bp, Homo Sapiens
tgcaggccagagatatcttttgatttctaatctattgttttatgtattttatatacaaagtacagaaatttcacaagaagtcaaacacagtgatgccatttgctatgttttattttgctagtagcttattaaacataacatgcaaataatcaaagagaaacatacatgacttagagtgaaaaataattctagaaaagtttcactaggtaagtatgcaaattcttattctaaaaatacttctttaagtgcatgaagcttcatgtattttgcaatattcttggcctcaatatctaccacctattttttaaccagacaaatttgaatgtatcaagataatttggtgcaagagagtaacatccatatgtatttaatccaagctttgaggaacattaagatttaaggattataaaacttggctgatttccatgcaaccagtaaaaggttttgcacatcatttgacagtagaaataaaaaaacactaaatttacaaataaagcattgagtttgatgtctattcgtgtatatgtgtgtgttcttgtgatgaaataggcctgcctttcatcttttctttaaaaaaaataaatgtttacaaaacatttccctcagattttaaaattcatggaagtaataaacagtaataaaatatggatactatgaaaactgacacacagaaaaacataaccataaaatattgttccaggatacagatattaattaagagtgacttcgttagcaacacgtagacattcatacatatccggtggaagactggtttctgagatgcgattgccatccaaacgcaaatgcttgatcttggagtaggataatggccccaggatcttgcagaagctctttatgtcaaacttctcaagttgattgacctccaggtaatagttttcaaggttttcattgacagttggtatgtttttaagcttgttataggacagatccagctcaaccagggatgacacattgaaagaatttccaggtattccactat

SEQ ID NO: 157943 - DNA, 1000 bp, Homo Sapiens
ggggacatctgtatttatttgaggcaccaaagcagcaggagggctccaatgtgggggtgggctggggcaggactggctggatttgggcagggcctagacccggaagtggcagaaaccccaacccccaaaggctgcccttgaagtgcatgcagctgtgccagggcagggggctacagggactgaggctctccaggctgctggcacacctccctccccaaacatggcccccagaagccgccacgtgctctcacgtgcactgcacacccacgtacacagccaggcacacatccctactgacacggtctccctggggaccctgtcagcatgtccatgggacttggtctgatgttggaccgtaagactccagggaaccctcgtcccttccgcagtcccccaaggaaggtcacatcatccaccccagaagtgagggcagctggcccacttgggcagaggcaggggctggggcaggtggaggtgcagggggtgggcctgacctgggaccaagggcacagatcaggcacgtgaggagtcaggggctcccatacactgtgggatccagaaagggctgggctttccttcctgagctgggggatcgggggacagggtctgggcggtcaggggccaaaccgcagcagggccggcagcaggctcagcagcagcccggcacccagcagggtgacgcttgcccgcagcccgccatcggccgcactgaaattgcacagaaagctctggcagcagctgatgcccatggaagccacaccaacattgacgccttctgggatggggcaggccggggaacaggtcttgctcaggctgtggccaaatgtcacgagattcccaatgccggcactagcagacacagtcacgcagtagttgtcctggtcggagcagatggtcggcttcaggcagtacagattgctcttctggttcaagcaggagaagcacatcagcgagctggctcgctccacacccagaagggcagccagcagcactggcaaga

SEQ ID NO: 157944 - DNA, 1000 bp, Homo Sapiens
aaacaagtaagccaaagcacaaagaaatgtcatgctatgtatatatccggttattttagctttataaatgagtttagttctgcaattattggggattcattgcaatggtctctgaaactttgagtcctatgtccatttgtaaacatagagctagttgggtgcatttttggagagaatagatgttttcttctcaaacggctgcactcagatgttgtcaagcagagcaagattaccagctgctgaggacaagtccaagttgcaactgagtggagaatccatctaagagtacagaatactttcccatttagagggtgttcttcctgagtaatttagcctctatttcaggatccaggcacggcagatgatccccgcacatgaaatcataagtgcaaccagtgatggttacttttcctctctaaatgaggcagccacccctgccaaatggacgggtctccctgtgctctaaggctgctgctggtattgcccttccgtggctgtgtagaaatcatccaggacgctctgtaagtagtcaaacgttggtctctcttctgccttttctttccagcacattttcataatgtcatagagctcatctgggcagttctccacacggggcatcctgtagccctgggacagggcggtcatcacgtcggcattagttctccctgggtagggaattttcccataggtgacaatttcgtataggaggattccaaaggaccacacatcagacttaatagtgaaacatccaaagttgattgcttctggagccgtccacttaatagggaacttagcaccttcccttgctgtgtactcattatcttcaattactctagcaaggccaaaatctgcaattttgcacattagtgactcggagaccagaacattagctgctcgcaggtcccggtgaatgtagttcttccgctcgatgtatgccattccctctgcaatctgagcagaaaagtcaatgagctttggaagcagcactttgccaccttca

SEQ ID NO: 157945 - DNA, 1000 bp, Homo Sapiens
aaagtcgtttaatcttagagccacaacgcctttgagttaagtgatttgctcaaaggctaaatggaaatagtaccacttatttcgagtagggctgggattcaaaggaggtacagctcttgaactagagttttctgtctccattggtgataagccttgtttagagatgaccaaagactggcactctttttcatcaaaagcagctagttttagcttctcgtgccctcagagctcgccctcctgcagtttgaaggaagtttccaaataatcttatttagaaagaatagcatttacactggccagttaggatatcttgggacacaccagagtagcaacatgaaacacccacttctgggggaaaaaaaagtgttataatttgaaataaaaaaaaaatacaagtcttgggaaattagagaccaaagtgatagaaatctggagggacttttcacaaatgccgacttctggtttgtgcctttcccatattttattaaattcgtgttttattttaaaaaattacagcaacattatcaaagacaacatatgtacaaacattttacaaaaaagaacattaccaatatcagtggcagtaagggcaagctgaagaataaatagactgagtttccgggcaatgtctgtcctcaaagacatccaaactgcgttcaggcagctgaaacaggcttctttcccagtgacaagcatatgtggtcagtaatacaaacgatggtaaatgaggctactacataggcccagttaacaaactcctcttctcctcgggtaggccatgatacaagtggaactcatcaaataatttaaacccaaggcgataacaacgctatttcccatctaaactcatttaagccttcacaatgtcgcaatggattcagttacttgcaaacgatcccgggttgtcatacagatacttgttttttacacataacgctgtgccatcccttccttcactgccccagtcaggtttcctgttgttggaccgaaaggggataca

SEQ ID NO: 157946 - DNA, 1000 bp, Homo Sapiens
tttctttaataatgaaataatttattatttgttaacagttgaacaatacagtttacatatacacagcaaagattctctaaaacatgtagtagtttctaaaaatgcatgtgctaactgtagtaaaaagcaccattctctatgatcttgacacaggatttacattggcgtcatatttacataaagaaacatctggaaacagaatagcataccctttcatctgctgctcccctgtcaggctgtgtgtagcattaggaagatggccccccaaaaatgatggtaacagcaatattccaagagcaccaattctagggatggggtaaaggcaagtttggttgtcaggtaaaagctaaaatgaagaatgctccctcaacttgccaccccacagagagaagaaatcaaaatgtaaaaatctggataaatcttaacattgggtgccttatgaattctcactttatgattttgagagaaggtcaaatactcaatctcttcagccattcaatagctgaatctagcagtgcctgtcaatttcttctttcagaagaatctgagaaaatcatccatgtaatattgataatgaaaaaaaccatgataaatcacctattgcacaccccaccctctaacccagttatctttgaaagcaaagcatcctacagtctatagagatcagaggatgtagaatgagaaaccacctcatcgaaaagggtctttgggttgtcttctaccaggaagagtttttaaataggagtagccagctactagacacgctaaacacactgcatcagagtcaaacatagaaaaagaatagattgacatgcaagaaattgcgtttagccttttactacctgatgttcaacactcagggaaggcaaagggggacagacaaacttggggaaacaaagaagaaacagaaaagaccaggatgttaaagtctcctgtgtggttcatgaaaaaatagaaaataaaaaaagaccaagacttgggggaagaaatagactgtaaa

SEQ ID NO: 157947 - DNA, 1000 bp, Homo Sapiens
atggtacctatggaattgcttctattttagtgaagatggaataaattgcacccatcccacattgtcaagtaatgaaaatatgcctctttttctactgttgaatgattcaaaatcaggtatttctggaaatacttagaaagggtaggaagggaaggagaaggtcaagaggtacatcagaaaaaggtataaaaatcatctacgttaatcataagggtggatggattgcacttttccacttatttcaacacataatttttctaactagtatgaatgattgcaaccattttggccattagcttttacccacaaacattttattccatttcagccaaataggtgtttttgtaaaactgatgatcaacacacagatacttttaagaatctcttcgcaacccccaacacagacataattagttagcatttaacctgagatacaatctgttgagaggctgtctttaaatatttcttcatttgttgcatcaattcatactgatggtggtagttcatgggagaaagtttaaaaaaaaagaatcttgattgatagcatggctttttttttttttttttttttcttactgtactggtaaaagaaaaaagaaaaaacccacagaatcacagaattcatgttctcacagtagccagaagctaaaataatgtgcttctttattgcacgtcaaaccaagaaaggtataaaagccaatgattctcaatccaaatgtgaaagtcaggttcacctcaactggattcggaatgtgctgatttccattggactcaagttgatctcacttatattctgagtgccgggaggtgaatgcatcaaggatagtgatgaaggtgtgagactttcgacaataaacttgtttaaaagtttctgtaccaatatctttccctgagtagtagaacaaaacagccctgtgcctttgctagagaaccgacaatcaaacccttttctgtggaggatcaaggctgcctcattggagtgcccattgcccacctttga

SEQ ID NO: 157948 - DNA, 1000 bp, Homo Sapiens
ttttttttttttttttttactgagaaaaagtgaatttttaattatcttgtgaatctacttagaaaaacacacacaagcaatgttcacaactataaatttaaaccttttgcactaaaaaaacacaaaacaacaaacacaaaaccacaggcatgaactgtaaacctgtattaactatgaactggtcttaaggttaattcttagcagtcattcagtattttcctccttggcaactgtaatgttttagcaccggatgatctcccgcagaggtactagtaatgactggctgccagtgtagggagatgcttccatatacaccacttcacacacataccgtccactctcacacccacccagacgggaggcacatggagatggggccacacaccgactctcagggtaacggaagtagggcagggggcgcataggttgcacatctttaatgtagtgcattcgtagaaaaaaggccagctttcgctcccaggcgtgctctcgtcctcagactttaatttcatgatttagaagatgcagacgttattgcctaaatattattctatacatttccatcagtgttcaggaaaacactttaattgctacttaatttacatcataatcactgggttacagctttagctcattggcaattttggaagcaatatttttgaaggctatggatgtccccgatatccgcttaaaccggaccccgttcagagacagtcttggcagcttgcacacttccatttcccactgcacgaggttctccgcgtgcccatctccgtggacgcagaagagcaagaagcgctccctctgctcatagtcgcagttattggcgtccaacactttgcggatttcccgcatcatgtccccgggatccattgaactagtggttttcatgctccaggtgaagcgtagggatcgaggctttgcttctttgttttcatctttttgctcagcagatacattgcgactccttgtgagttttgaagttaatttactaaagaga

SEQ ID NO: 157949 - DNA, 1000 bp, Homo Sapiens
aagtgggacaataaaaatttaaaaataattttaaaatagaacagcttagagatagaaactaaattatttccaattcctactgtgccccaaacaaggttcacaaaagggctgtcctcccaacaattttctgaattctatatattcagcattaaattccatgataaagttggaaatccattcaccatttgtaatacatattgatgcatttaataaaattgcatgggccgtatcttttgcatttctgtatcctagtattaagtacagtgcctaccacaggccaggttctcaatacttgaataaatgacacaaaaatagccaggaccagcaagttttttctgggtgggcttcatagaatctctgtacttgctggaatcaccatgaaatccatggtcttcagctttgcattttcagcaacatagttatattgagttatcctcaggtgagcagtgagacccttgggagcggattcatggtagggtggctttgtaatgtgtcaccttggtgaggctatgtttcccggaactctcttccagtaagatgggccacaagagacattttgcttgataaccggagggcggaagtgaagcagcagcacattgtttttacacttggaaggttggtgctggggcaccaggcgttgttgcagttcacacgttgccatgtatctgctagatcacctcgttggtgtgggcagtagtcaggcctgcagccaggcctgcagctgctccaccttccccaggatcatcctttcagcttctctaattcctgggccagatgcatatttaactctgtgaggaagggcaccagcttcttctgcaggacacccacatcatcgaagctggaggtggtgagagactgacatgggttccaggccatcctcgtgggttccagctcgtgctcgtgggctccactgtgtcctcggtctcccacactttacatccatcttcccttcccgagtgcctgccctgcagacttgaatcctacagtctgtagaagcctc

SEQ ID NO: 157950 - DNA, 1000 bp, Homo Sapiens
ttttttttttttttttttttttttttttttttaccatgtgtacgaaatggctaagtttattcaacatctcggatattcatctggatattgggtttgttttgtgatacaatacatattcaccttaactggtgctactgcaaagaaagctttcttgacctgcatgacgtgcctcagagcttctctccaccaattggaaccacccaaagcctagtctagaccaaagtgctctggagaaaaaaaacaaaacaaaaaaacagcaaacagaaaacagttgtgcccccaaaagtactcagaagtcatatgttatttacaattgggtttgtgtgggatgggaagtagggcggatgagccagtgcttttgcaatgaagatgcaatagtcattgtcctctcccactgtctcctctttcctcaccccatggcagctttcatgacccattcccaaagggtccaccgagtcctgaactcagcttcatcaccaacattcctcgccttcagttgaattcaacactgttaagggagtagaggcaaagacttgggtcagggagagggtgggaaacacagaacaaactctctcggcacaacccaagttcagagacgaggcctcctcagatgaggaagatgatgccctcagacaccatgacctgattgtcatcctgcatcttgctcagagcagcctggatctcaactgaagagaagggctcttcgctgtcccggttgatggattctgtgaggcgattcatgccgattgactgcgcatgagcttcccggaacacatccaagagggccaccttgaatgccttcaacctggattcactcaactccactttctgggattccttggtctcctgtgagtctgccgtctttggagtgtgtacttgaggcatttcctcctctgtgtcactgaagtcataggggtcgtatgaatccccatctttggcatctggctggcgagtcttccttctcttcctcttctgctcctggtcctcttggcttttctcc

SEQ ID NO: 157951 - DNA, 1000 bp, Homo Sapiens
aatatataaaacattagtacaaggcaggctagcatcctttatggatacaaccaaaggtgcattgtggtctaattgtggatttcagatcaagttaagaaaaatatagcctagttaataaggtctcttggcttctgccacccagcggcagccttttacaatgagaaacacatagcaactatgcaagtaaaagagaaaaaatggataagaaatgtcctacacatgatatagcagtgttgatattactgcctatatcttctttgctgtgtatgtcaatgcatatgattggagatgaatcgacagatcttcacattccaagagaaggaaaatctttcctagactgaaatatcttttaaacaatatatattgactttcttatggcactcacttattaaagggtctgaaaattaatcccttatagacgaatattagacaagagtcatttttttaaattaaaaaaagggacatagagaggttctttatgggatttcttgaaatggctattaaatctctttattgaagaaaaaatagatgacatacatgctttatgcagaagtgacatttgggggtcctgacacaccgggattgttcaacagtcctatattgctgacaagattgtcaagggtcagttaaaataattaaaaacggatgacaaagcaactatccctttacctgcttccttcttgtctagcacccagtctttcacatttttcttctgtgggaatttataacttattcaccaagtaaattccatatcacttgtttctagggccatatttgcaggacatgtgccccaacatagcttttctattctgggcatatttctaaaaagcgtatcaaattctaggctgaaaaccaaccagatgatttagaatatgggcaagttaggatatgcacttactgaattccaagatgcatggtgaaatggtgagatcagaaaggggccctgcatttgataaaaatgcaaaaaacaaaataaaaatagcatgaaagaaactagtat

SEQ ID NO: 157952 - DNA, 1000 bp, Homo Sapiens
ttttttttttttttttttgacaaaaataatcttgtttttattttagattcagatttcattactgcactcaaacgactacaactgggcttggcgttattatacaatccaaactgtttccatcagaaacgctaagactcagtgtgcaatgattgttattaataattagctccttggtttcttgatagaaaaaggctatcaacaagcatttgtttatccacaacaaaaagtataattagcttatcccacttagtaaatcttgtatgcatgccaactcataccaaactgctacttttacaaaaaaaaattgcaataatacagttcatttttccagtcctttttgcacaaaatttatttacaatgtctacataaatgctccaaggtgggactatgaaaaaatacacacatgaccgatgctttgctcagaaataaagtcaacatattaaaaataaatcttcagtctatgttttagagctgcttaaaacaggaagtgatgtataaggtggtggttgttgcatggggacaatgatgcttgatgtgacaattaggcttctaaacacacggccttttggtttccatgcctcctcctaccagtctccttaagacactgcctgcaacagctgattaatcattgttgatgactgcagtttttcccatccttcccgatttacatctgttcaggccaattcaaatatggtgagtaaatgaattagacatgcaaattcaagccccaggctagaaagagggagagagaggaaaagagagagaaagagagagagcgcgcgcatggctgaaatcctaggcgagaagaaagattcttctgcctgatagttattttaatgctctaaaaatcctgcaaatcagaccttcctgtcccttgcaggataactgtaaggctttttaatgtaaggaggcttctggaggaagtgaagagctatggaaacaacacacatagtgtggaaaaatttcacattttttttaaaaaatctataagaaacaacgt

SEQ ID NO: 157953 - DNA, 1000 bp, Homo Sapiens
tttttgtaaaaacttgtttttaattttgtataaaataaaggtggtccatgcccacgggggctgtaggaaatccaagcagaccagctggggtggggggatgtagcctacctcgggggactgtctgtcctcaaaacgggctgagaagggcccgtcaggcccaggtcccacagagaggcctgggatactcccccaacccgaggggcagactgggcagtggggagcccccatcgtgccccagaggtggccacaggctgaaggaggggcctgaggcaccgcagcctgcaacccccagggctgcagtccactaactttttcagaataaaaggaacatggggatggggaaaaaagcaccaggtcaggtagcccgagggccccagatcccaggagggccaggactcaggatgccagcaccaccctagcagctcccacagctcctggcacaggaggccgccacggattggcacaggccgctgctggccatcacgccacatttggagaacttgtcccgacagaggtcagctcggaggagctcctcgtgggcacacactgtacgaacacagatctccttgttaatgacgtacacacggcggaggctgtagaagcagacctcgttgagacactgtttgcaaggcctgtgtatggagtagaggcgggtgcacgggtactgttcctcacggcagtcaagaggcccaggctctgtgggctccagctctgcatttcctggttctggggttggggctgggatgacttcctgttggacttgctgctgggactggaactggaactgttcctcggagggccgaggagtcacctcttgataatcatagtagtctgggttgtcgatctggtcgctatagtgggtgtactggacgtggtcagggaacggcggcagcgggtccagatcatactggccctgagccagcaagcctgcaggcaggaatagcaggaagaggtaggcagctctcatggcaacaaagaggcaggccggggtggtgtcaga

SEQ ID NO: 157954 - DNA, 1000 bp, Homo Sapiens
ttttttgacttaaacaaataagcatttaatttttgtacagaaccagatgctggagggaatagctgtggatgattgtcttggcctttccttcatggtagcaaggtggctgccccagatccagccatcacacccacatttatagcaggaagatggggagtgggctgcaaaaccttccccagaaacatctctattggatttgcttagttccctctggccagagctggtcccatggtagcccctaacagcaagaaaggctgggaaatgagcaaaaaggatcatcacaattggctgggacccgttatgctccatcatctgggccccggcatgctgaggctccaaacaaaatctggtcctgttcgcaaggggtggggagcaaggagctttgggagactggttggcaacaacagcaggtgctgcagaccctggattctgccatcattccacccatgtcccttcaggaactcgggacacagatgagggaggcaggagtgggcggcccagcgcttgagccccaggggaatgactgagagacattagccagggccaacggccagaccccacccagaggccatgtcactgcctaaagggttaggacccctgagccccagcccagctcaagtgccccctgccctttttcaattcagcctcctgagggagtctagcccctggagcctctctggccaccacctggtccacctggtcccctgggctgtctaactcacctcccaggggcctggggtgccttcagtgccaattgccactcagatcctgggcttgccaaccacccgaaggccctgccagggactgcctatcacaagacacttgccagggacccacagtgccaccttgggagccaaggcacacccagaagtctctgcccaacctttgcccagcagttcaggattcatcgggcacccagctggggacaccagggtgtatctggatagagcagacaatggagggagcgaaatctggaggggtcctcctccggggagaaggg

SEQ ID NO: 157955 - DNA, 1000 bp, Homo Sapiens
tttttttttttttttttcagacaattcagcctttattttagaaaataattctgtagcttccactttctttcatgaaactgaggtcaggcaagaaacaaaaatccaccaagtcctctccatcctgccatggcgtcctggcctgtgaggacatggggcgcctgggagcgggcggggaggctgggcagcactgggccagaggcgtcctggtcactgctccacctggtcactgctccacctcatgctgagaggagcctgtgtgtcaaaccccaggggaaaaagggacaggcagatcgaattctgtcttctaccaagccagcaggagcctcctagagcaacagggagggcactgattttcagaaaggaggggtcagggcatagtccctctctgaggtaaggcaagagagaggttgtcccagcacaaggccttcctccctgcacctctctcctgacagctgggcatgggctgaggagaggtcttgcttgcccccttcaactttccatctcagaactataaactgctaggctgcaaggagagaagggctaagtgggggtcagacaggagagaagggcaggaggcagtgagccccgatgacccaccaactccaccaggccctgacaaggaagcccctttggttagtatcattttggccacaaatatgtccccttctcccataactcagtccccactgggggaaggggagcaggtatagaaggagggctcgtgccctggctggaagagccaggtcagggagaaggggtctggtcaagagagcgaacgttgccaaactctctgcacatgctccaggagaaagctcaggacgtggacatttctggccccaacaagcccagtgccccccaccacacagtggtttcctgcttaataccccgcaacataccctagaatagttcccctgatctgactcccttgagaacgggagaataatcctcttgttatcatttgtgcacttaaatgccactcggaaaaatcaaaaagataaat

SEQ ID NO: 157956 - DNA, 1000 bp, Homo Sapiens
ttttttttttttttttttgcattgtcataagctgggttttatttcaaactcaattatacaatgtagcaatagtaaatattaaaatgtaatgctaactcaaaacttgtagaatgccttcactgaattttggtataaagagtaaacaaaacttattctgcaaaaggattaggaacctttttatgcaaaaatgagtattttattttgtcagcactaaaagaaaaaaaaaaacaaaaccactgtatttctacattgaggtgaaaacaatgtttaaactttcttatcaatcaaatacattccaaaagaaagtgtgttctatgaaggttccaaaacacactcaaaacacaatagtacaggaatctaatactgaaaatgactgttctgacagggtgtttaacaaacataacttttaaattattaaaccagtgaagcaatcccttcctaataagtgtgtcaagagagtgaaactgggtttgttccattaataccctaacaatttcatcgtaatactttttactgctatgacagttttaaataaattttgctgtacttaaaataggttttgaaagtggaaaagtgtacaaagtttcagataaaaagattaataaatgcaatttaaataaaatttcccctcttctctcatatcaacaataatcaattttagcagataacagattgagctttaaaaccctactcccaaaatgaaaccttcagttttaaatcttaatcagacataactggaaaagattactatgtatttggacaccttttacaagattttgtttttgtattaaagcagaaaccagttcctaaactcttttattcaattgtatgtcctgtttggacaaatatcaaaaatagaagactgtcgcttttgtaactgtgattttcactgcagtcttctataacttttacagagttcatggtccctaatatctccccaccctccattttttctaggtggggaaatggctaccacagtaaacttttcactgatagttag

SEQ ID NO: 157957 - DNA, 1000 bp, Homo Sapiens
ttgtggggagacagcttttgagtttatttggcttctggcttcactggatcccgaggctaagactccaaccctggctggggcagcaggaaggcatccagagagccctggccccagatgacccccagggcaggaggtccatgctctaagccctagggcaggggccgcagtagcaggacttggtcaaaagtgctggtgacagctgaggccggcccctcttccctgcacctcccctcctccctgcatcaccccagcaggcaattccctgagacaggctctggtcctcccaaccagctgggtacagtgttgggccccagtagggcaggtgagctggggggacctacaggtttcagatgtgggggcgcaggtcccccttccagtgtgaaggcttcctgtgcagtgtagtgttcctgacccccaaaggggggtggggtccctggggaaactgaggcagctgcagaggctgacccagctcctgttccagtgtatgctgtgactcctcctaaggcagctggagctcgggggagtggcctggcccactcaaggccccgcttccggcacccacggggcctgggcacccatgtctttggtctgtgccctgcagtcctgggggcccccctggaaggggttggcaggtggggagtcccagaaggggtctgagtccgggaacaaggtccagggtgctcggcggggtgcaggctgtggtgatggcaggggagaaggccgtggcccagctgacacaaagctccagggatcaatgcggctgcgaaggggcgagggccgaggtcggctgatgaggcccaggggtggtgaacgtggggtgcctggggtgccaggagcagagcgtgatgtccccggtgggggtgagacagtgcctccgcggggctcctcctcacgtcgggggctcttggctgaccgctggcccacagggatacccaggtccagcaacaggggtgcaggagtgggcggggagtcgggcgtcttgagcgagaagcagatgagc

SEQ ID NO: 157958 - DNA, 1000 bp, Homo Sapiens
aaaacagtagaaacaaggttgactttattccaaacataaaacacttattttgtgttagaagagttatcccttgcctatccagggtgacaccagtgactgcacatgtgttcttgagctgcttttcctccggcaaagactcatgtctcctgtctctttctgtcttgaaaggatatgtttgtcactgaagctgctctctgggatcaacgtcagagttgcatactctggaaaagatctttgcaactctggcctatatgaatccataagccacaaacttgactttttgtacccaccatttgtggaactaaattatatcagtacaaaaagggctacattctaaatagtaaaaaaatatgcaaactgaggtataaataagattatattctgtgtatcagtgactctagaggttaaaaatgactgagaaaatagacagttcttcaggaaaacaccttctttggactcacaccatgtgttttccattcaaattagtaatgttcaatttttcctgcagttgaaccagctattagctttctggagagtcaaaattctcttcgttttaggatcaaatttgtattgtcttgttccatgaaagaaatagaaaaatccatctttcatgaaaactgcatcaactttgtggccaattccaggaaagtcatgtgctatcattttgggataacctggatccatagatcgtttatattcatcatacctccagtatttgttagcaacaaagaagtaggtttttccagtgttttcctcagaaagagcagcatcgatatgcttcacagttctagggaagccaaaggagctgtagatgtccttggggtatccgtgtagcacattctgtccctgaacagcccagtacttattccctttgaaaaaccggacttcatctctgtcggcaaattcgtaagcagcttcaagcccatttggcagttgtggccagaaaacagaaatgaaattgagctcaacttccgggtagaagggatttgtgcgcatgtag

SEQ ID NO: 157959 - DNA, 1000 bp, Homo Sapiens
tttttttttttttttttttttttttttttaaatttaccatggaataaacattttatttatttgtgtatgtaacatttattgacatctacccactgcaagtatagatgaataagacacagtcacaccataaaggagtttatccttaaaaggagtgaaagacattcaaaaaccaactgcaataaaaaagggtgacataattgctaaatggagtggaggaacagtgcttatcaattctgattgtgcaacaatgatatacaatccaatgaatgaatgaatggatgttctgcctgaagtttctatttctttcttgaattacttctctttccatatagtttctgaatgcctttaatatcatcctgggaaagtttaaaattttggggatctccatttccataggttggatacatcactgcattaggatcagaggaatgtcccatacccaaagaatggccaagttcatgagttgcagcatacaggaagttaatccctagactgctaccatccgtccagcgttcatcctcatcgaagtgagcatctcctccgagacctgtcccaggcgcaaaggcatgagccagcgtgtttcctggcccatcaaatgggtaggagtccccatgagctcctcgcgcaaagccaatcatgatgtcagcagttccccatacaactttcctgaaatgcagggggatctctttgccccacatgtttaaagcctttgacactaatcgatccactgtaatatgcggtaagtctcgagtatatgatacgatcctgtaggtgaccactttggaagtccattttgggctatttggaaatagtgagtattctgcaacatctggcactccacatctgggcttctgcattatttctatgacgcgggagtttaacattccagttataggtaggccaaagaatttttgcatctccttgagtttggcttctaaactgttggcattttttgtttctgagtcatagagataaaatctcttgagatagtcctgagcct

SEQ ID NO: 157960 - DNA, 1000 bp, Homo Sapiens
tttattttttttttttttaatataaattatagctttattttttaaaaagattttataagtctgtcacaacctcaaacacatataggtgaattatttattcctctcttccatcagatgaggcttatcgtgtcaaatcctctgaaaaatataagtaaaaattatttttcacaaatatatatcccctatattactcaacttagttctgaaattttctccttataaatactttaacacagctgctagtggaaggactgtgttgtgcagctgcacatagctataattttataagtctgctttacttttgctagctccctggttcagctccaaggtccaaatcttataaatggttaactgggctgccagaaaagcccactgaatgcatcctgtagtgctctgtgacaagcaagagaagaagtatagcctccagcaaggtcctgtggtgaggcagctctgacatggtttaaatacccaagtcttcctagcatctcaagctcaggaacatgtggtccatatgtctctatctgcagtggctggtattcatacagagcttcttcaagcttgtgaataggtgccagtgaaatatgttgacccattttgatgcctgtggaaaacgtcactggttttacaggtttgggtttctcaagttgcatttctaattgggtagatctatctttatgctgagccaaaagcagagcaacagggagatcagaactctccagctcatctaaaaaagcctgcttattcttcctttttagaatctgctgcagttgttcttctttttgtataaataatcttctttgttcattttcctgtcgttccacttctaaagcttcttccagttcttcctgttctcgagtcagctttaatttatttttctgaataacatctttgttttccttttggtatatctccattttctttttggtgttgtccaaatccacattgttggtcaagttgaaaacaatttcttccacttcttccaagaaatcattgtattctc

SEQ ID NO: 157961 - DNA, 1000 bp, Homo Sapiens
tttttttttttttttattaaaaatagaccttgtctttaatgtttatttcacattatctaagtacatccagttatgcaaatttacagttttatttcacatccttgtattcctgatatacatataacaggacaaagaacacatttgcaacactcagcctgtaaaactctcttgggggaaacaagattctcagctgccttattcttctgcacatgtacaaataaagttctaaataattggagtggaaataaaaactggtaaaagagaaaactgactacatttttatgccacttgaggaaatttgtacctgacttttcaaatggtcttctacttgctgagttacaatttaataggtaacacattttgggagctccttaaaatatgccaagaagcttcattgtttctagagtgcttaaaatccacatgaagctgacatcagctacccatcactaatgcttagatgtggtgctgtggtgctgtgcatttatctaaaatattttaaaaggtagtaatcagcattgttatccctcttttatgaaaatatcttgccaggctagaaaacaagcaattatttcttcaattaggcaaaggaaaaaaggacagaccagtacaattcagtactcattttaaagaaaacaatcacattgaactaaaaattttaaatttcagttacaattttatgaaattcaaatatctcagaatcgcattgaggtactagatgaccgagtgttcattctgttcaatattgcccacgagatctttcatatcactagttcctgggcttgactgactgttaaaatacagagtgttttcaaaggcgccctcttgaggtaggtgcacacgtcttttcttataaaagaaataggcggcaaggccagcacccgttaaaatcaggaggatcacaatgatgactactccggccacgttggaagacggtttagaagggtccatcttccttgtgtcagcttttgttgtaagtaattcatgagtaggtttagcatca

SEQ ID NO: 157962 - DNA, 572 bp, Homo Sapiens
tttttaaatgttttgtattctttataatgtgtattaaatcaatgcatacataaattataaattaaaaggacacacatattcaagtgtttgctcaaaaatctttttactgataggcatggctacacaatcattgactattagaggccagaggagaatgaggcctggcctgggagccctgtgcctactagaagcacattagattatccattcactgacagaacaggtcttttttgggtccttcttctccaccacgatatacttgcagtcctccttcttgaagattctttggcagttgtctttgtcataacccacaggtgtagaaacaagggtgcaacatgaaatttctgtttcgtagcaagtgcatgtctcacagttgtcagtctgccactccgagtttattgggtgtttgtttcctttgagatccatgcatttcctggttgaatctcctggaactccctcattaggtatgaaatagcatgatgcattgcataaagtcacgaaggtggcaaagatcacaacgctgcccaggagaacattcattgtgataagcaggactccttatagacaggtac

SEQ ID NO: 157963 - DNA, 1000 bp, Homo Sapiens
tcccttcaacctacctttgcaacacatctgtgttttccctgccccccagagcaaatgttttgttgttgaacttgtcttaaattttccaatggaagaagctaggattcatcttcctggctggctagtcttttttttctcttttcttttttttttttttttttttttttttttgagattgttctcatttccaaaatcgtcagacaccgatttctctgcgcttttcttgcctggtgtcaggacagggaaaagctatgcaggagacatggcctctagctctgttcaactgtcaattctgctggggaccctagataaatctgttaacctctctgccctcagtttccccatctttaactcgagagtgtagatctaaatgctagaagagtactaagggactcttccagccactttttggcagggatcagacttcggagagtgaactcagggagcaaagaggtgaaactggagcagtgtgagggttaaagggaaggcggctggcggtgccgagcaggggagcacgtcgggggtacagcaccagggctggaggaatcggctggcccacaggtggggacctgggaccctctatgtcaggtggtacatgctgtagcccacatgggccgtgtagagtcccacgggcgccacaggcagcgcggcgcgctggaaggggccagaggcaccgtagagcgaggcacccgccgcggccgctacagctgcggggccgccgagagggaaggagaggccgaaggcagccggtggcagcatgggcttggcggccatcttcagcttctccagctctgcctcttgtagtctctttgccttggcgcggcggttctggaaccatatcttcacctgcgtctcagtgaggctgagcgagctggagaactccgcgcgctcggcgatggacaggtactgcttctggcggaacttgcgctccagcgccagcagctgcgcggtggtgaagggcgtccgcggcttacggttcgtcttgtgtttgcggagggtg

SEQ ID NO: 157964 - DNA, 1000 bp, Homo Sapiens
ttttttttttttttttttcatgcttatagcagctttattcataaaattcctcaaatggaaaaaattcaaacattcatcaacaggtgaatagataatcaaattgtaagataggcatatgacagaatactactaggcaataaaaaaggcacaagctacagatgcatgcaacatgagtgaatcttcaaaacaaagaaataatgcatgccgagattgtctttctgaagaaattcccctcattctttgggatcccgaggttctcaaaggcatagctggcaacaggccctgaaacagcttcttctggactaccctactagtcttggtagatttcctcgatctttggcattccttcttttcttccatggtcttcatttactgctgtccttcttgcctatcttgaattattctatactattatgaggagaacacaggttcttccatcctggaacttcagttctttgccttgctgggccaatatatacattgagccagattgtgtgcacactggtagttccaaggtgcaacaatcttcaaaacatttgaggagtgtattagtccattctcatgctgctgtaaaggactgcccatgactgggtaatttataaaggaaagaggtttaattaactcacagttccacatagctgggaaggcctcaggaaacttacaatcgtggcagaaggggaaacaaacacgtccttcttcacatgatggcaggaagaagtgttgagcaaaagggggaaaagccccttataaaacaaacaggacttgtgagaactcagtatcatgagaacagcagtgtgggggtaaccacccccatgatttaattacctcccactgggtccctcccacaacatgtggggattatgggaactacaattcaacatgagatttgggtggggacaccgccaaaccttatcaaggagggactctgcaaatgtggcaagaactcctcatttcgtgacttcctaacccatcagatactccttgaaaccttatcaaattg

SEQ ID NO: 157965 - DNA, 1000 bp, Homo Sapiens
ttttttttttttggcgcagtgggagaccacgttttattcagtccagttcaggatccccgctatctcagggctctctgggccagtcctcctgggagcccccaccacaacacttcccaggcatgagccctcaggggcccacatgagcttccacacactgagaagtgtccgagaaattggtggggcctctgaaggaggctgtgagcagcccacctgaactcccagctcaccagcccaaacagggtgcaggggctctggccctgaagaacctgagtggagtggaatggcactggctggccactcagctcagcgggcgacgtgcccctacaagttggcagaagtggctgccactgctgggtttgtgtaagagaggctgctgccaccattacctgcagaaaccttctcataggggctacgatcggtactgctagggggcacatagcgcccatgggtgtggtaggtggggtactcgctcataggatggtaggtatcccgggctggaaagatgtccagctgcccgtagttctttcggcggcactgacagacagccaaggcaatgagatagacaatggccagcgcaaccagaacacagaccagcaccagcagcgcgatgccccagcctggcaccccagccccagactgggcagagaaaggaaatggcacatcactcacgctgacgtctgagatcgtcaggttatatcgagaggctgcttccgttttatactgattgaactgtgtctccacgtcgtggacattgatggtaccttctcggaaggccagagtcaattgtaccaccacagatcctggcctgaacttaatattggagaggcccagaaaacccccttgtttataaatctgcaaaaacatttcagaaatgtctctctgcagctcttggtagtagtcggtgctgggatcttccagagaggaattaaactggaggtttgaaatgtgaaaagacaggaaaaagaaagagaccccagtagacaaagcattcttctcagta

SEQ ID NO: 157966 - DNA, 1000 bp, Homo Sapiens
tttttttttttttttttggcagcaatgctggtttattccccatggccaccggggccgcactggtgcccactcctgccaccattccagccacacccaggccgtgggcagccaccctccgagacacctgggccgggggcagggtctcagcagaagcgccgtgggcagccaccatccgaggcacttggtggtttcctgaggcccaaggaggctgctcccagcacagtgaccccttccctggtccgctggagggaccacctccccactgagctcctttctcagagaactgggcatagccagagctggggtgagaaagcccttcagccctgctgcaccgaggctctgccagttctcataccccctccccatcccatcttggcaaagcgctggtgcagcttagggcagctgaagcactcggcggggacctctcctgacacctgggcggccgcaggactccctgcactgccccacagcaagctgcccatgggcccggggtcaagccaccacccacatgtcccaggagtccggccagcccaccacatccgctccctagctccggcgaggccaccccttctccaagcggcatgcggtccctgctgaggcagtcaggcagctggcttcggcaggccgtcaggacccaggaggtgggcgcaggggtcatccaggatttgaggccctggccccacctgagtgacaatgatgtatttgaccccaccgggggtcggctccatggccagcgcagcctgaagctcagctgagagaggggccggcctcacctgcagccccttcagaaacgtgtctccattcgagcctgggggaaagccgtgccacacagcagccacaaactcagccacagtgtcgtccagggtgaagatcacggcattggggcccgcgtcaaaggtgtacgccaccttggtgtccccgtggtgggcgttgaagcggtgcaccaggtggatgatgcgccaggagatggcattgaggtaagagatgggcgggaaggtgt

SEQ ID NO: 157967 - DNA, 1000 bp, Homo Sapiens
ctgctagaaatgagtttattacagagagaggagacagggctccgacaggacgcacacacacggcactcatgctcctaaaacactgggtttgtgaagggacattataaaaatgaggaaataagctgtgatgttcagcatgtgtcagtttctaggaatacagagaaggggagagctgcaaggtggagcgattctgagggctgaaaatccctttcccagtacgaagacagcatccttcaatcccgccagctcatgtgcatctgagggtggggctctgtcttcatgctagaaaccaaactgctctcacagcttcctgctaaatcaccacggctaacggataagcagagacggactatccagtctgactactgagcactcaagtcgtcagtccagtggctacccgggaacgggggcagacagtgtgcgtgcacgtctacggggctggacagagtgtggttaaccggggaactgggcaagccggcgccgagcctgcgtcagccgtgcaagccgctccttcaggaacttccgcttgtcgctggtgtcgctccgctccttcaggagccagctgtaggtgtccttgtcctgcaggagctgcagcatggccttctgaagctgctggccgtacgtctggagcatgaagaactggatgatcaaagggatgtggctggagatgcgcttgctggcctcctggtgataggccatcaggtgctgaaagatctcctccatggaagagtctgttgccgagctggactggaaagccccaaaatcccaggatttcttcttcttttcttcttccagctccttctctctgaccttctgcaatgcacccctgtatacctggtcctggcagtagacaatctgttccatctggaagtggaggcggatcagcttctcaccttctctctcttgttctgctctaatgtcttcaattttggacttggcggttctgtggaggttaaaaaactcttcaaaattttttatcgaaacatctgtgaaagcaagc

SEQ ID NO: 157968 - DNA, 1000 bp, Homo Sapiens
tttttttttttttttccaaggtagaatattatttattattataaactcaggatgcaagatatattccaggatataggaagaatggcaaatatcggcttttctcagatatctttgaaattattttaatgcgtacaaaacatgtagaagatgcctcttgagatggctttaaaatgcccagtattaaagggggacaggtgcatggcagctaaatgcctcaacaagatcatgcagagaggggcatccattccctcccaagatcctaagaaaaggtaccttgctccagcctggctgaaagtggagcaaagatatgcattttctattggatttagggtcctagggtctgtcctggggcacagacacctaagaccatggcaccttctccccagaggacagcctgagggtaaagtataaattgctctgggaaggagagagggagagaacagctgtgtctgcagttcattgttgtgtgagtttaagcagctctcttcctctctctgtgcttcattagaggtataaatactggtacattgggtcctttccagagtttggtttcaatgagtagggacacaagagaaaaggaatagatgagtgcccaatttttgttcagggacatggttaggctccctcagtgatgggactttcccacctagctgttcctgggagctgtacctagaaaaacgtgtgtatgctggtgcctgtgtgtgtgagagtacatgtctgtacatatatgtgtgtgtctgtatgtgagtctgtatgtgcccatgtgcccacaagctttggggcaggaggcttttatatggtcgctgtttgtaaacaaataactttgtaaggcaatcaaggtacaaagttggtgggaaagctctctgcaggtggcccagggaggaaggctccctgctcacatcattacagtgactcatccccagaactcatacttgatgaatatgccagaggccaggatcccttctcatgccaggtggagctgagagcatgaccacaggca

SEQ ID NO: 157969 - DNA, 1000 bp, Homo Sapiens
acaaattcacatttaatatagtatacaatacaatcaataatacaatcagctactataagctttacaatgtacaatttattcaaatggctgaactgttccagtggttaaggagacagttatgtgccagaaagatgtagtattttttgcatggtttaatgaaaatataaaagctatttgtccaaataaaagccatcgtcactatgtacttggttttgcgcttttttttccttaaaaaaaaaaaggccactgaaatgtataaaatggtctgaacatgatggtggtatcaaagtcgatgcctcttcacatggcaataacagtgcatttaacattaactcacgggttaattctgcaaatgatttcatagcattactttggctagcacaacagttttagacagcactcagataaatataggtatgtgaaatgtaaagcaattatcttatgcaactttaattatggttgagtactatcaaatgaaaactgaaaataaaagcactttacagtaggaaacttttgtaaagatagggctccacataatgtgtaacttttaaagtctttatatcacattgttagcaaattttgttttttaacactatcatggagtagcctactctgcattagcagacatttgaaataagaaatagtcaagcatgccatgtggtggtctaaaaatcaaaacaatacacttatttgtatatacagcatcactcagtacctgctaaaatgaatgtgaagattacagaatctaacatcttatactacaataaaaaaaaagtgaccaatgaagcagaaaataggaattaaaagatctaacctcaaatgactttaaagcattcatataagaaataaatgcatattgcacaaacagtgaaagcatatgttccaccaagcaattcagttccaggtgggagacaacacagcattagcctaatacatgacaataatcacagaagagcaagtgttcttttctgtaatgaaaaagccgtgaaaacatagaaga

SEQ ID NO: 157970 - DNA, 1000 bp, Homo Sapiens
agttatagagctaattggcttttatttgtgatttatgaattaaagcagcaccactctacaagtacagtgatagctcccccctggcaatacaatacaagaacagtgggttttgtcaaattggaacaaggaaacagaaccacagaaataaatacattggttaacatcagattagttcaggttacttttttgtaaaagttaaagtagaggggacttctgtattatgctaactcaagtagactggaatctcctgtgttctttttttttttaaattggttttaattttttttaattggatctatcttcttccttaacatttcagttggagtatgtagcatttagcaccactggctcaatgcgctcacctaggtgagagagtgtgaccaaatcttaagcattagtgctattatcagttaccaccatttggggcttttatccttcatgggttatgatgttctcctgatgacacatttctctgagttttgtaattccagccaaagagagaccattcactatttgatggctggctgcatgcagacatttaaagcttttagagaatacactacaccagggagtatgactactagtatgactattaggagggtaataccaagagttggactacgcaccttaggcaagatacaaaccaactaaaatagaataaagaatgagtcagatgagtgtagccattttaccagcagcacatttgttaatttctacaacttagtctcagcgatacccattgtatttagccatgttcaacaacaagtgtcagaaactgcacagactcctccctgttcagctggtagggagcaattctattatttggcattgcatggctgggttgaaattaaaacagggagtgagaacaggtgagtctagaagtccaactctgaaaaggaccactgtacatttgaacacacggctgtgttaaagatgctgctaatgtcagtcactgggtgcactaaaggatctcttattttatgtaaaacgttgggattga

SEQ ID NO: 157971 - DNA, 1000 bp, Homo Sapiens
aaaaaccatacttttagttttatttcagccatgttaattcatccccgagctgtgaaaagttatgctactgggtagctgggtaaacccatcagttctatatactatgtaaggttgacctctagtgtttcacatacctcaaaccaattattttgtgccttaaggagaaaaaaaataacaaactgatcacagagaatttgtatctgtcacatatataatatatcatggtcatagtcacattactgccgttaggaagtatttgcttttcagggcaattaaaagtaatgccatgttcattcactgtcctcttcccctttgtttcctttaacaagtgaaaggatactacaagaaagcaagcattcaaaccatcaaaaaataagacaaattattttaagatatcaaaaaaaccttgacatgaggaaaaaatgacccttaggcctgcagggcacagaactgctggaacacggccaagatatgagggtctaattcagcagtgaagagaaggttctccagggtcaccatgtactgctggattatttggtgatgctgtaggaagatctgctgcagcctctctatacagttcttataccatggtgttaatacactggtcccatcagtttcgcatcgtactaggtgctcggtcaagatcatgataaaccgctgaaatataacgaggaaaagattcttttgttcactctgagcagattccactttttcctgaagtcgttctatttgttcctcaagaaccccgtctttcctgtcactgcttctgtcgtcatcatcacttcgccgtttgtgttgcctagcaagtttctctttagcttcttccagctctttctggatcttcaggacatgtttgttcatcttacgaattgtagagtgcaaaatttcccaaacaaacaatctggtaaagtcacgagatagttctgaagagaagatccaatttgctacggcagcacaatcaactatttgtgtacgaatcatcttatccactagtacagca

SEQ ID NO: 157972 - DNA, 1000 bp, Homo Sapiens
tttttttttttttttttttcagttcttgaacctgtgttgatgtttattctgccactgagaggtacaccagggtttccaaagacagtaggaatatttctgttctctgtgtatattgaacagctgtgcacctaagcagggtgcctgagtaggaagttaatttcattttaagggctggagcttgttacaagtagcggagccaagcctttgcacatccattttcttcagaacccaaggaaaactagcccatcttgacagctctacttttgcgcctgttagtgctgccctgatccctgacaggaagagctggctaattttagataatctgtgccctgacactgaagtgtctaatcataggggctatagaaacaactacattaacaagtcgtccagcctcatgcccaatgtcacaatttttgaacagatggcctccttccttcctgtttactgacatgcaaggctctgagaaaaataattcaatccaatttacagcaaacaccacatttcaagaaaagggaaagaacaggtgatgtgtataccaaggtcccacttgctcaggcaaaaagaggctgcagaaaattggttcatcaatggaattctatcacaaagtgaccattgtatagtgagtttatttgtgctctaaaatagtatcaacgtgcatctttccactgaatgacttcatggatcgtggccaacatagaacttggataggaaatcctttggccttggcgcttctgtttcatggaagaaccgcataacatgtgtccgctgcttccatactttaattgtttcttccagttcgatctttcccttaatgaccagaagatcaaccaccctggggtctgtgacatgggcattcttcataaacatttctcggactttatcccgtcccattttcacagtgatgtccagctggaattggtgcacagtgttcggcacctcccgataccaggcgcggtagagctcgcgcaccctccgcttggcctcgttcatgtcccgactg

SEQ ID NO: 157973 - DNA, 1000 bp, Homo Sapiens
ttttttttttttttttttttttttttttttaaactttaaaatttgtttactgagaatctgtttattaaggagttaacattttagagttggttcaatactttatggaacttaaaatcctgagttgcccctcaataatacagacatctacagtacaggcatttgtacaaaatactataattactggtgcttaacattattagacttctataacttccatttgtcaggtaaataaaacactaacctttcaaagttgctacaattttaggagttcacaaattcctatttctccagtttttattagtacattttaaaccttctttggggactggaagccaaactcctcaaacaaaagcctcaatctgaaccaacactgagagacagtaatgtcagaggctcttttgtttttcacggagagcaaaaatacagaatatatttattaatttattttccaataaagagaatatactttgtatttggagaaaaaaatgcttaattgtcaggagttgctttcggagaatgatcaataagttccttgtcaattgtctcatagtaataccagggtccatctcctctcacatgcatcaattttcgcacttccagctcctttacccgtaattcagccttttcagcttcaatctgaaggacggccattgttctttcatatatcttttcaggactatcatagaaattacgggcaatccatcttgatatgggatgcttataatattcccagtgttctgggacatagccttctggaatttctgctagttcagcttgaccaatgaatacattcaccagagttatgaaaattgctactggaatcccagtcaatgcaatgtagaatctcaataacttcaaaaaacgcctgtcatagaatctagaaggtctgatgacaaatagtcttttcccatggtctccactgtgtcgaacaggagcagcagccttcggaaagccacgagtgaggaagcccccaaatccgaggcgagtgccaaggggccgg

SEQ ID NO: 157974 - DNA, 1000 bp, Homo Sapiens
tttttttttttttttttttttttttttttcaatgttacatttcattcaattcaaatagatctgtaatctcacagtgatgagaggaaagagtcaggcctttaataattataataaaaaaataataaaaaaagcttacaaacagcaatgcaacatttcctccccctcagagtgatggattaacagctggtagaggatgcaatgactcagaattaaaaaataaaaatgaaaccaaaaaacaagccaaccccaggaacgacccacactgtcaaagactttccatacataattggaacaagcagtcaaatgtcaaccacttgtggagaacaccaaggacttccttggttttggatggcgtttttgtttttgaaggtaaaataaaataagacacaaataaaattgtacataaatgccaatgtctacactccataaaggtgatgcagtcacagcacaaagacacggcctgaccacaaagtgaaatgcaggttgcacttctcgcctcttccctggacacaaaattttggcccatggtgcccagtcctgcagaatatcagcaggcaaagggaagctgcctcgacacaggcttcttccaggctgaccaggggaaggcaggtggccatgcctggagccagccctacacagaggcgctggccagtctgctggctcattctgtgttctcaagtgctgtcctctcgtactctgtacaattccttgttttcaagggttaagttccaagacttccagactcaggtttgaagtcaggtcctggtgaaggtcgtcatgctgttgtgatagcgtttaggtccttcattagtccttccaggtgggccatctctttggtcagctcatctggttcatagctactctcggagtcttccaacatccttgtggtctcctgcacttcaggggcactgggaacaaccactggcataggaggccggctccttcctagagtcccgatggaggctgtcttcactgagtgaatgtgatggttcagagcttg

SEQ ID NO: 157975 - DNA, 1000 bp, Homo Sapiens
aggaattcggggtcctccccttcccatgagaatcctttatttgtcccaactgaggggtgggtgtggggtgttaaataagatttgaaataggtggggacgctgtacagggggtccgggaagggggctgggggcaggcagcaggtcagtcacctgaggctgggggtgcccgtgcgagagccctcctggtggctcagggggtgggcccagcttctctgcctcctgctccactgactggctcccgtacgcactgtcttccttcacctctgtgctgggcagcttgtctcgggtttctggacccctcagcagcctcactccctcctctaggcccatgtcagacagggcctccagtagacctgccaggtccccgccagccagctcgtagctgcgcaggaggctgccactgggtgaggttgtctgtcggtacgtgtctaccaggctgcgcagccccagacgctctgccagctctgcccagctgccctgggcttctggcccgtctagcagctgctccaggttctgcagagctgtatcaccaagtgacagtcccggccctgctgggctgggcggggtcaggggtggctccatggtgttctgagcagcatttagcagcaaggtcttcaccaaggtgctgcaagtgaggtcaagaggcgtgtggccccggaagctgcttcgggtgtccttctcaggcccttcagagtccgagtcgctatcagaggtagggggtgaaggcagtgggcacaggggctcctcgttttcagcatggatgtcagcaccagccttcagaaggaggcgggtgagggtcgggtaccccagtccagctgccaggtgcaggggtgtgtttcccgcaaaggtgcgagcgttcacgttggcccggagcttggtgaccagatgggtgaccaaccccagctcctccatctctgtggctagatgcaaggctgttcgtcccccctgccgctctgtggcctccacttcagccccactgtccaccagcagatccaggcac

SEQ ID NO: 157976 - DNA, 1000 bp, Homo Sapiens
ttttttttctggttgtcagaactagggttttgtttattaaactggaaattatattaacaatgaaacaaatcacacggggcgggggtcgtcaggaagaggttttgaggctggggtgggaggcagccgggtttggctgcggctgctgtgaaccacaatgtcgtcgtattcatcgccctcgtctccgctgtcgctgtcgctactgctgctgcaggggccggatttctcgtcctcgccctcgggctcaggggctccgtgtgcacggaggaggcgggcgaggatggggttgggccggagcatggcactgccgagtggggtgcggccaccgtacatgcgggcagcagggttcgcgcctgccctcaggagaagctccagcacatcggctgcctgggcctccactgccaaatgaagggggctccggccgcacgtgggctccggtttgtcaaggtcagctccagcatctcggagcagccggaccatctccacatctttgtggataacggccacgtggagtggggtgtggccctcgtagttttcagcctccagctgcagcttccagtcctcctcactctcctcttcttccttctccaagtcggaatcggggtacaaggcgacaggggtatggttggtgtcgggagtacggtcagggccctgagcgaggtaggtgtcgggggcttccctggggcgccgggggcggggctgaagcagggcacgggcacaggcgtgtgcccccacacggcaggccaggtgcagcgccgtgtggcccctacgctccgccacacacagcccggcgcctgctgcgtacagcttctccaccgtggatgtctcccccaggatggctgccaggtgcagggctgtctggcctaggtcattctgcaggtccatgtactcagtgccggccgagaagcctagaagaaaatccaggaagggttcatgctgatgaatcacagccaagtgcagtgccgtgtccccatcctcagtgacgtagccgaagacgagggga

SEQ ID NO: 157977 - DNA, 822 bp, Homo Sapiens
ccggcttccaaaagctttattggcaaatatgctctataaaagaatgatcaatcctgttgcctctaagtcaatggaatgaagagctgtgtccagggacacaccacgccgtgctgaaggagactgctgttgtgtccacctcttattcatagacccagtcatgagcacaagacttgtagtcaaccagttcttcaggcttaaaccataggctgatttctttttcagcactttttactgaatcactgccatgaatgatgttcctgccaacctgaatgcagaagtccccacgaatggtgcctggctttgaatctgctggattggtctccccaagcatcactcggcctgtcttcaccacgttcagcccctcccagaccatggccacaaccggccctgagttcatgtacttcaccagcccagggaagaatggtcggtctttcaggtcaatgtagtgctgcttcaggtgttcttcagaggcccggaggaacttcatggccacgaggcggaatcccttctgctcgaagcgcttgatgatctcgcccaccaggccgcgctgcacgccgtccggcttgatggcgatgaaggtgcgctccaggttggccatggtccgggaagctggaggggccgggcggcggcgctgcgctgggagagcagagagctggtgcgaccaccacacccgggagccggcggcggaggaggggcgcagggcggagcgcggggtggccacaccccggagggcccagccgcccaacccgcaggaacgccccacccgcccggcccgacgcggccggagaacagtgtccacgcccagccggggcgcgccctcgc

SEQ ID NO: 157978 - DNA, 1000 bp, Homo Sapiens
gtacaaatttgttaatttattacaaaattttcactcacagaaaaacacaagaaaacttttatacttttatatttgggaaaaggaactggtatctcagatacaaaataatttacacataagccatacaattttattttatatagaaataggtcattattacaacagctgtacaattcactacgcttcatcttataattacataaaatcttttctttagaaacatctcaacataacaaaacatacaaaaaaagcaaagtgcattttgaaaaggaaaatccaattctcagtattctcatgaagatatgtagaaagatgcagcattctcactcaaagggccagcatgtggcagggtctccttggggactgcagtcccccaggcctgtctggcttgtaaaacctctcccctcacagacttggagttctcagcagaattctggaatgttggctggcatgattgtgctttgctttgagtccacctttgtagttgcaatcaatgaagtaaacaggaaatagtccagtgttttatttaggggctaaaaaatcaccaccagcatggcctggggtgaaaagcctcatcccattagggtttaggccagaaagtgtgaatctgtagcttggttaataacaaccagcttctctgattggtgggctgctgttgttactgtggtctctaaatgaagccatgagaccttattatttttttaaaaaaaacagaaagtgcctaagttatttcctctgtgtagctgtgcaaattaaaacaaaaacaaccatttaaaaataatgaaaaataatctctttattctctctctccaacagatctctgacccagtccttctccaatacaaaggaaagacgatcaagagcgtgaaggccagctagcgcagatgggcgggccgcaggtggctagagcaaccggtgtactctcgggggatgcagcgagatgcgccatctctgacggcaaaccgaccgacgatgcctacacggggcacctggttcctgt

SEQ ID NO: 157979 - DNA, 1000 bp, Homo Sapiens
ttttttttttttttttttttttttttttttttcaggccaacgtgactgcagtttatttatttgactattttatggtaggggagaaggttgagtgttgttgtgaaagccctgatatcagtaatggggatgatacaatctgccagcagaggagaggttggcaggtaggtcagctgcatcacttcacaagaagaatttgaatcctcactagaaggggatccatcctcttccagttcatacttcccatacccaacaacatgaacgctgagcattttacttcctggccctctatgagccttgaaccagttgaccaggtctgattttgagaatgacttcagtgcttcaatctcgtgggcaaggcggtcaaagaggtactgctgtgtaaccacttcattccagttcctatccacctcctccccaaggtgggtatcctcacactccttcagcttgatgagagctgtgacctgggtgttgaatgcctcttcagtgaggttctcaatcttctcctcaaagctagaaagaaactcttctatcttcttatcaacaacttcagaattgtatttggttgcctgagtccccacagtgacagaaaatcctagaatcccggatgtgttcctacaggtagggtagacatggtacccaagggtctgcttggttcgaaggaagtcaaaacaaggttcttccatgtgcatcacaagcagctccataagcgtatattctcttagactcctggtacctgactggtagtacacagtgacttcagagttggcatcacccttgttcagagctttcactttgcatagatggtggccactgggcagctctaccacctggaactgcacaggcatctcctgctccagaggcttgaagtttagtttgtcaacaacatatttcaggaaatccatagattctgtgcttgtgacattcccttgtaccaggccctccacaaagagctgggatttgaattctttgacgaagctcagcagagactcaagggaaaggc

SEQ ID NO: 157980 - DNA, 1000 bp, Homo Sapiens
atcttcaattttattgttgggaatctacaattgcaaagtggttcaaagtcatttcttataccacttcacaatacacacacagatttaggaaacttaaaaaaagttctttaaaaaatttctaataggatttaccctattttactggccaagtgtaaaaaataaaccctaaatgtgactttctctaattttccttgtacaatcttattgacattttttatagcaatccatatatgcatagaaccgaggctattattttgctgcaacaacttttataaaaaggttatgaagtttaaaagtatattttgtatcaagagtacttaatatttgtaaacactaagaaacaaacatacttcctatcaaaacctctagctgccatttgcacactgtttttaaggtgaagcctcccatttcttgaattacttatgcagagctgagcaggctcatgtggttccactcccacgttaagtatttgttctttgggcataggtcatttcatcagcatgggtattttctgaccacccactcagagggtcccactttccagcagaagttctcatatctgggcttaagaatgatttacagtgactgttcagatttggaggcagagcgacttaaaaaatgtatacctcttcctaaagtcatttattttcttcgagaactctggacattccataactgggtgtgtagtatgagtagaatgaattcagtgctagcctcttgctggagagggacaagtgcaggtttagaattacagcttatgttagaaggttctcttctcatgataccttcatgttagaagaaagaggacagaggcagagctgatggaatctcataaaataacagctaatgccgtgtgtcaggcactatgcttaacaagtatctgtttaacatgtgtaaatgctctttagctcttgcttttctataatataaaacagtcctggagtcctgttcttccccttcctttctctcgtgtcctttgactgtctttgcagcctctggc

SEQ ID NO: 157981 - DNA, 1000 bp, Homo Sapiens
ttttttttttttttttttttttttttttttccatctgcaaacacaccaaagctttattcaacaggcgtggcttcctgaagcgtaaagccacttcacagacggtggccacagcggcacctcggccagagccatgcggccatcagagaccctgggcggccgggcagagggcttggttgaggcaggcgtggcagcgagggtgcacaggcagacaggtctgctggccgaagcccaccaagagtccattgatctcgtgccacagctccctaggcagccactcctccagggcggcgcgggtctcctctggggacttggttgccttcttggtccacctcagcctgttggcgattctgtgcacatgcgtgtccactgcaatgcctgacacagtgccccaggccacagccatagccaggtgtgccatcttgggcccaacacccggcagcgccaccagctcggccacagaggctgggatgtccccaccgtagtgctgctgcaggatggcgctggtctgcttgatgtatttcaccttgctcctccagaaaccgacggggtagatgagcttgcccagcgtggcatcatctgtctgcaggatgctgtccaccgtcaggccccgcgcccgcagtcgctgcatggcgcccgccgtcacctggtctttggtttggctggagagcatcagtgacagcagcacctggtacctgcgtacctttgggggggcactggagtcatagcagtgctcagtccccagatggtccacaggtgcatcctttttgttcctcatggcacggatgttgaccagctgttgctgccagtcctggggctcccagactggcaccttgaggggctcagccccctcacctttctcactgtccgagccctcataggccacacgcagtctctgtgctttccgcggacgcttcacggggctgtggcttttcctcgcttctgctgcagcctctcttctccggagaggcccgggctcctccctacacccccgcggcccagc

SEQ ID NO: 157982 - DNA, 1000 bp, Homo Sapiens
tttttttttttttttttttttttgtcatcaaaacacctttttataaattagataattctacctgttttacaatatgggtttaagccttcaatggtgttcagttcaggtgtgagtcagctcctggtggtgtcagaagtttacatgattgcggatatcattgatttgcttcaccatttcccttatatgttcaccctcctctttcaggatggactgaatgcactttcgctggtaggcactgagaataatggtgggttttggaagactcaacaccttctccatcttttgctgttgataatcctttttcatagtaacctgtttgatggcattgcccaaatgtcgaagttgatcaggtatcagctgtaattctttcttcatgtctcgctcactatcagagagaactgggagctcagagtgaaaactgtgaagtagttttttcatcctgttcatgatatcctcttgtttttctttagcttcctcatatttgtcagctaaacgctcagccatttcccgcagacttttcctctcttctcgacaataactgagatcttctagttgtttctttttttggtcacataataatttgaccctccgctgaatctcctcctttgccaagtcctgtttgagaatgtactgctctctgaacacctgggtggctctgctgaggagctgaaggcattcttcaggaggaggggctatgtccttttcagaagctttcaaaaatgctggattggcaacactacgttgcaaaatgcttctaatatgcttttcaaaggaatctggggtttcagccagaacacggaggggagactctgccacttcaacatcttctcgagtacaaagcaggggaggagacgctggatggactgtacttaataacggccatatgaggcattcataggtactggtgatgcagatcatcgtgggtcccagaatgtcaggtacaatccaaaatcctcgaattggagctggctgcctgcagggcaatggcttcgtacaaagg

SEQ ID NO: 157983 - DNA, 1000 bp, Homo Sapiens
aactttaaatcagtttattgacacagtaacacaacacacttgcctccctgacatccccgtccccctcacccaatctagatctctcccccttgctctccccttagaaaaagctgtttagtgaaaacagttaagggcaggccacttctacactcccagcgctaccctaggccctgcagagcagagtctcagacactactcggaacctggtggggaggcagctagtactatactcagccagccagaagtatccagtccctaagaacggattgccccacaattcccaggccctgagttgctatatattcctcttccttactgctgtttgtgaccccaagaaggagaccttggggcctgggcctgcagccaggagcaagaactcctggcagtgatttgagaattaattagagtttggctagtgttttaaaggcccaggcatcccccaaaaaagccctggtggtgggagtaaatttcaatgcccctatttaaaatgtactgataacattaaacaagattaagccagcttaaccaaatgccagaataacactaagctgtaaagaacgaggggtcggacctgcttactccaggccagacgcaaatgcacacagagaagcccaggtaagagtgtcaaaaaacaactcaaggacactgcccagggactgaaaagcctatactcaggagcccctggggtgacaggaagcaaagaaagaaaatacacaagtcttaataaccaaaacagaaagccaacagcagggaaacctgagcctgacagtgctgcccaccagccctccaggccatgcccctgaacccagacagtccctccccctctaggcaatgtcctcccctaggctagatagaacacatcacacagcgcagtttagaaagcttctaatgccagttcataaacatcttcatttactattggtgattacatgtgaataatatgtttatactgttctttatggaaaacaatttcaacgagtcaactccgagaacacaatag

SEQ ID NO: 157984 - DNA, 1000 bp, Homo Sapiens
tttttttttttttttttttttttttttttttttttttttttttttttttttttttttttttttttaactgattacaaaagctttttgtaaaatcacacaaatatttcaagaataaatgcattccagagatacaaatcaggccaaaagaaacaaaaatcaatgaaattggcattacacttgtaaaaggccaaatggacacaagccctcgagggtctattgtgaagtgcttgggggcaagtggcctcaaagaaacttgggagtgagaggtttgcactgagcttgggaagggagccttgggaaaacaccacacttgtgaaatcagaaaaaaaaaaaaagcaagtgatggtgcttacagcccaggacgacttcctgctggtttaggtcagaaaaaacctgagagagattcctaaaacaatgagggctgtaaggggactggtggaaaaaatccagtggaaatattttctcaggaaaggaaggagcaaagtcatggtaagttaaaatgtggtaccctaatgtagtagtaaatttaaggcctgtcgaggaaattttaacacttccaacaggtgactatatcaggaaggagaaaaccaagtgcttcctgcttcaccttctgctgcttttgggacttttctagagctagtagctaaggacaagaccctgaacccattttttcactgggagaggaaaaccaccaggcttctcagctatggcttggcaactctggagttcctatggcttccatcagggctccaggccctgataagtggcctcaggcaggaggagatcgggagcggatgggagagctagtcaggaaggtggaatagggaccatccccaaacacgttggcgtatgatgatttgaggaactggacgtagttctgcatgctgcggttggtgctctcggactgctccaggcgatctttcaggtcttgcagccggctctggtagcggcggtccgcatcatcacggctccgccgcagctggctcaattccgttttggt

SEQ ID NO: 157985 - DNA, 1000 bp, Homo Sapiens
ttttttgcccacggatataacttagtttatgggtcaagccaatgcaatgcaaagttgtttctgttccttttttttttttttaaccaaaataaataaatcagatctgtccctgtgaaggtcagagtgataaatgaggggcagctggccccttggccatggcctggcccctcacccccagcccctcctctccctcttctgacctgctttggcacagcaaagaaaacgatgcatcagaaagtctccattgggttaaaggagaaagaaagagtggttggggtggggagggagtccaagagaggaggtggagggttaacaggaccaagacagagcagccagtgccccggtggtggctacctgagcggggcttcctggctacacacagactctgtgggctccaggtgctgcctgggcccaggaggggtgggtggggcatgcttgggccccacacacagcctggaaccctcgaaggaacagcagataatggacactgcagagactgaagctgccctttctgtgccaggtcaggccaaggctctctcctgccagctgccccgggtcatcctcagttcacgccacggctggggcccaccctagaaacctctgccagccatggctagatccgactccaggctcctctacagattctaaggctcaggctcaagatgaagctatcctagtctcaaatacaggagcctgtgccttgctgggtgacagcggaagccagcacacaaggcccagttcctatcctagtgggtgagactggtggggaggattgtggccagagctgacccctccccaaggacatccctcgggggctacctttcctcctcctgctccccccggcctcctggaaaactgctcagaagtcagcagagcctgggcagcgtgtggcctgtggggcagccaagcactggagggggacgacagcctaactcctatgagagcagagggaggggtggtggcacagcgaggagggcggtggtgtgggcagcgctgaggc

SEQ ID NO: 157986 - DNA, 1000 bp, Homo Sapiens
ttttttttttttttttgtacacaaatgttcacagcagctttatttgtaatatcccaaaactaaaacaacccaaatgtcatcaacaagtaaatgggtaaatgaattgtggtatatccatacaagggaatattcaacatttaaaagaatgaattcatacgagcatcaagatggagacatatgaatctcaaaataattatgcaaagtgaaagaagccagacaaaaaaaaaagacatactatatgattccattcacataaaactacaaaatgcaaaatgaaagccgattggtggttttctggggaggagtcatcaggaggagcattgtgacactttgagggatgatggatatgttcactctcttaattgtagtatgcatgttctccacaaggtgtgaaaacttatcaaatagtacactttaaatatgttcagtttattttatgttaattatatctcaataaagcttttaacaaaagcaaacatctcttgcctacataaggatgacacagctcttaaaaaaaaaaaaagattcctgctagattgtgtgcagcaaaataaaaaggcttcctttaaagtagaatagcctgtgaagagtgggtggaaaggaaatagaagcctaaaaatagaagatatatttctaattccatctgtttctattcagcgatatttgcatacctggcttagtttgttctagattgagtgtcttcattttttttgtcttgtatgtttcggaattatagcatagcaaaacagagttgagaagagttcatctacaaaaggtatgttctttagggaaagaaattctattcttacctctgggccacacatcccatgattctaacaagaactgttgtgaagggttaaatctattaatctgtcctctggtagaaaaaaaaatgaagaaataataactgattcaggaagtggtaacaggttgtggattagcttacagaaaagaccactcacttactaattactttcttgggctccccacttgtcccaaa

SEQ ID NO: 157987 - DNA, 1000 bp, Homo Sapiens
tcatctgtaaataactgcctacatctcacagggcctctaatagttaaatagattgtaagctgcacaagcatagggacagtctgtcttttgtaaacctcccatgcacacaataggaaatcaaatattcttgaacaaatgaagtcactaagtgctcattaaatttcattttaaatatatgcctctgttaattcatggatcttggaacttacttaaaagacaatgctttgacggacatttccacattcctcatagggatttactttttaatacaaacaggttcagttaacattgccatacacatctcattacttttgggagtgcttttccagaaatctctggtagtcacgtcacttcatgatggggctacgttctgagaaatgtgtctttgggtgatttcatcactgtatgaacatcacagagtatacttacacagaccctgatgatatgtatatagcctgttacacacttaggctatacagatagcctagcctattactcttcagctatagcactgtacagaatgttactgtaatcatactgtaggcaactgtaacacaatggtaaaacatttgtatatttagacatagaaaaggtacagtaaaaatatggtataatcttatgagaccaccctttatacaatgtcattgaccaaaatgttacgtggtgccatgactatacttgttaagaaggaaaattccagtccttttgacctatggtaggctcaacaatctgtaattttagaaaatcctacaagggattctgatgtggatggtatgagtaccacattttgagatgtctagaagaaaaatcttcaaactccttggcctttttcttccatggaaccatcttctgactaagctggttagtcttctgaactagaaaacctgggtctgggatagaatccaaaatttgcatgtggacagaaaaaaacactgcagcaaacctgctgtaccaaaggttacttattatacttcagtgcttaccattgttttttttactc

SEQ ID NO: 157988 - DNA, 1000 bp, Homo Sapiens
tgacttttaaaaaattatttaatttagtagttttttttttttggaaaaaaatcaataaggcaaaaaaactgaaaatatatatagttgtgttttgttttcatgtgactttattccacctgaaagattctaaacttcttccattagcgggaatctgattgggatcagccagaaatgtagtgcagatggtgaaggaagagaaggggataaagcagagaagtccaatttagttggggaattctcactctatccaaagccccggatgaggtcactgcttttatgagcctccttgaaagaagccttgacataatccctggcttattttgggaataaggttcttaggaggaaattccccagcagtcaaagtcactcctctcccatgtttatcacaactaggaaggaagggataggggaagaaataaaagtattaatttacccagtaaaaccaatttccccatagggatggcttcctttggaatggtatttcccccaggacccacgctggctgaggctcagcagttaaggaacaaaaacaaaaaatactaacaaaaagcatacaaggaaggcacctcaatttgtgatcctcaaccaagggtgggttgcacaggggatatttctcaacaagacaacaaaaacaaatactgcacaaacagagaaggaagccagggccccacaggagcaattatctgatccaccccacatgacggtgctttaagccccacatcctaggaagaaagttcttttggaattcagcctatgcgccggacagagcagaattaaattggaagttgccctccggactttctacccacactcttcctgaaaagagaaagaaaagaggcaggaaagaggttaggatttcattttcaagagtcagctaattaggagagcagagtttagacagcagtaggcaccccatgatacaaaccatggacaaagtccctgtttagtaactgccagacatgatcctgctcaggttttgaaatctctctgcccataaaag

SEQ ID NO: 157989 - DNA, 1000 bp, Homo Sapiens
tttttttttttttttttaagaaaatcacgctttaatgtctggtcctcgatcaccttagcacagcgcttctctgaggagaaatgccagctctgccgcatggctgcagggaatggtcggggggaagcctgcagcccaggcctgctacaagtctagtgactgcagccaggcggcctcccctgccgcataaagtgcttgaacagagccgccgtgcctcagaggactgggcctgtcctggagagagctggagacaggaggcttctgagcaaagccagctccagccctgaaagccacagcagtgccactgcgtcgggccagcgctcccccgacaaccccaggttgcgggaaaagcagagttgacccagccaagaacagactgctgacctcctgggccgagtgggcaaacagatcctgcacacaacacacaggagctgctggggaaccctgagtgcttgtggagtggagactcaatcagattccagaaatttctctggggtgatgtggtggccatttctccctcctcctcctctctgttctttgatggggctgtggagagcccaggtgtggggtaggcctcactggtccagctcactagcaagaccctgctcgtaatcttccacatatttatatttcttctcccgatagtagagtcttttcttcatgcagtagaggactatgatgtcacacagcacggtcgccatgcctagcagtgccaggccagagccgatgttgatcatagtggggatgatgtcaaatttccctgccttcccaaacacaatgatgtcgaagcggatgccataggccttgatgagcgtgcgctgctcgttgccagccaggtctctgtagtacttggcaaacctgaaattgtagccaggagatacgttgtgctcaacgtcccgtgtatcgaggcggcggaaggagtacctgggcaagcagagggaggcggctctgtccaggttgcagtcccagttgacctggatgcccatgatgcctccctccacgg

SEQ ID NO: 157990 - DNA, 1000 bp, Homo Sapiens
ttttttttttttttttcatatcgcattttgtgttttcaaacacttggaggaagcaagagtcttctccaccatgactttaatttaaactaaagccctcattctaaaatgtcttctgcccaccccagttgcttcatacatttgagagtatacttggaggctatgccttgtggatgactgtcaacctctccttttctgaaatactgtcctcctgtccaatatccttcaacttactaacagttatttgactttactcaatctttggtctgtaatttatttgcaattcttaaaattgtttttacagatgtgagtgaacacttgtcctggaacacaaacaaagtcctaaggcattgcacagcagtggggcaagtaaatgctctttatcacaagatgtctaagagagctcatggtgtttacaaggaaaatacatgcactttaattattttgaatgcattttaccagtacgataatatatgcaggctttccccatcaaacatttagcacccaatatataatgagaccttttccagaaataactggaaaacaatcacttttcaggcttttaaattcattagctttacttgtctattcaatgccctaaagaaactcagtcaactatcatctatgcttataagacactgaaaaaaacaccccgctcagagatccattgatctgatgccggatgaactgatgagtttagtgttttgttatataccatgctagatatttctgagaatatagattttttattcctactgtggattttaaaaaaacaataaaggctagataaaccacaaactcaagttgcagggggctagttttcttagagaaattactaatatcaaaaacagccccagtactcatgtgcacacacactttaaacagaaaagcctgcacattttaaaggcaaaagagaaagtaaatgtttaactaggtagtattgttttattatacatacttctagtcagaaggaagagagactgtgaaagcaaacccaaacaag

SEQ ID NO: 157991 - DNA, 1000 bp, Homo Sapiens
ttttttgccatgggatgttaactcttttattaatttagggttaacattgtacttgcttcattgatttctctttcagagttgtagattcaataaacaacatctgggttctctccagctcacaggtgacaaggcaaatgcactgtcgtcaaacaggggagcaggacaatatggagaaagacgaggtcgaaaaaatttaaggcaaatgttacttccctattcaagggaattgatcaagcagatctgtgcatttcaatgaaaatatatgaaatatttgtcaaaataattaacatcggtaaaaattagaacatgtagcttataaaatgcctacacaggtttggcagaataaatccaactgtgtcatgtaggcttgtaatatacacagacacaggagtttccaccttaaaaacgagtcttctgaagggcagaggccaaatgtattttaaaagcaattccataaaatgggaagtgatggatgattaacaatgcatggctggctttacattttgttcagaggaattgcttggccatcggggtaccttttggctggccacagaatgcctcctgttgcctctcctcagaaggctctgcatcaggtcgaggtggtcgttcaggccatgagactcctgaagacacagacagaacacggtaacaaggagagctcggcttgctcaaaggagagcgctgcgggggatagaatcttctggtctggctttggaattggactttctaagccactgctgcagtttcagaagtagctgactatgtagaaatagatactccggccccagtggtcatacattttatgccctcaaacctatcttatttatagtctgaccaaaccgtccccagactgctcagtggcaggcaacgagcaggtagactgctggccctttgtcacatgtgaggatggcccagggttcgccagctgggccggggagatttactacacagccgcagaaaagcacggggagaagagtgatgtgtgatgccaagcgccttt

SEQ ID NO: 157992 - DNA, 1000 bp, Homo Sapiens
tttttttttttttttttttttttttttttaaagactcatcaaggtctcagttcaagtttaatacaaactacaaaagattaatgggttgctctactaatacatcatacaaaccagtagcctgcccacaacgccaactcaggccattcctaccaaaggaagaaaggctggtctctccaccccctgtaggaaaggcctgccttgtaagacaccacaattcggctgaatctgaagtcttgtgttttactaatggaaaaaaaaaatacagaagaggttttgttctcatggctgcccaccgcagcctggcactaaaacagcccagcgctcacttctgcttggagaaatattctttgctcttttggacatcaggcttgatggtatcactgccaggtttccagccagctgggcacacttccccatgtttgtcagtgaactggaaggcctgaactagtctcaaagtctcatccacagagcggccaacagggaggtcatttacagtgatctgccgaagaatacccttatcatcaatgataaaaaggcccctgaacgagatgccttcatcagcctttaagaccccataatcctgagcaatggtgcgcttcgggtctgataccaaaggaatgttcatgggtcccagtcctccttgtttcttaggtgtattgacccatgctagatgacagaagtgagaatccacagaagcaccaatcacttggcagttgagtttcttaaattcttctgccctatcactgaaagcaatgatctccgtggggcacacaaaggtgaagtcaagagggtaaaagaagaacacaacatattttcctttgtagtcagacaggctgatatctttaaactgaccatctggcataacagctgtggctttgaagttgggggcagggtgcccaattttagcatttcctgaagacatcttcctatcagcttggggttcaaccaggttcccgcacctacgtggggggcccacgagaggggtgtgcgcagcgctcaa

SEQ ID NO: 157993 - DNA, 1000 bp, Homo Sapiens
ttttttttttttttttttcaaacacaaaatagtaaatttttatttactatagcacaattcaagtattctcttaaatttatatttagtcaactaaaacatgacagtgactttataagagctttccttttaaaaggttgctgttataaaaaagtatgactctattactctaaatgcttagaataagtggaaagaacaaatgacagtagacaaaaacctttatgagtgagtcatcaacacataaaaggttgcacacatcagtaataggacatgtgaaggtaacatcccaaaagtatttgaactcatgtaaacaaagactatgtatattcctaagggagaaaatgtactaccaagataaaatatattcaaacggctgtgactttaaaccatgtattagttgaataccacacaaaaccaaaaaggcattatctatcatttaataactgaaagatattacttatttgtgagataaaaggataatgcttttttaaaaccaataatgaaaaagaagtattttgaaaacaaacatctgtttgctagaaataaatatacttgcttagttattttaatgtattgcagcataggaatattgtgctagcattgaccattaacattcaatcagtagtttaaaatattttttccacattgagtcttgaatcctctacctggtcagctgacccacaactttcaaaagagttttattttcctgctttagctgttcattttcatcttctatgtcatctaggtctctatttaataaatcaatttcttctttgagttttccaatcatttcctctttatcttgcatcagtctcacaagtcttaggttttcttgtctttctcttactacttccttttcaagatcttcaattttcttttccagtgtgctacttgaaaccagagtacctgaaacatttgcatccctgttatatctagggaacccacttctatctgttcgagaatatctacttgagacatcttcttcagagacactggttgtgct

SEQ ID NO: 157994 - DNA, 1000 bp, Homo Sapiens
ttttttttaaaaagaaatttctttatttaaaactgcattttgttttttttctgtgaaactacacaagtttacaagtgaggagagaactgcccccggcccatgcctcccacccccccacccatcacacttccaacctgtccccagtcctgcccggatctttaatgggaggggttccccactctgacagtcttgtaaaatcctgagaatgtctgaggggatcagatggtagctagttcagggctgaggatgggacagtgttgatgttacttttcccccacatctggctttttgcaacctcctccctctccctaccccttgattttggtgtgacaaaaagatacctcatttatggggaaattgaggaagatacatatacaagcaccccaacccatatttaacatatttggcaataactcccttcccattcttccccctccaattttcaaatagtagttttttaaaaaattaaagacatgtcactcacaggggaagatggcatcttcaatttcctcaaaattactgagtccagccctgcccaagggttgtgggaagaagggggatgagaggccagcagggcaagcccttcactgcctccacatcaaatgcggcagaaacctgcctgcatgaacaaagaacacctaagggattttagggggcaaagcttggtgccctgtaaaatttacttcctgatggacaggcctggagccaggggggcctctttaccagttctgtttgtccccctttctcttaccagaacccctttggctatcacccctaatatgggaaagtaagaaataaaaaaaaaagacaagaaatcaacatatttataaaaaaaaaaacaagctacttccccaaactaaattaaaaattaagaaccaccaccaccaccaccaccaacaacaacaaaaacaacaacaacaacaaaaaaaacagatggatcccagggtttctttttctttctttaaaaaaaaaaaagttcaaccccaaagcccagtcaata

SEQ ID NO: 157995 - DNA, 1000 bp, Homo Sapiens
ttttttttttttttttttttttttttgagatggagtgatggagtttcattctgtcacccaggctggaatgcagtggcacgatattggctcactgcaacctctgcctcccaggttcaagcgattctcctatctcagcctcccaagtggccatcacacccagctaatttttgtatttttagtagaaacgtgagtttcactattttggccaggctggtctcgaactcctgacctcaagcgatcagcccgcctcggcttcccaaagtgctgggttacaagtatgagctaccgctcctggccacttttgtccatttctaatgtattcttttgcatttgaagattattctacttgagaatcaagacaaagcatatctggttctaaattgttttactatcctcccaaaagaaaagcatctgctactctcagcattcctggccagtgtgagctctctgggagattcagcatccctcacactcctaaagtatggccacagttctacacgctcttcccttctctacctgtcactctgaaggcaaatcggccactacccactttctttcatgagtatccattgcaatcacaatgtaagaattacgtttctgaatttctggccccatggcatggtcttcctttctgagtatgatgccacatattgtgctaccttcttagtttctggaaacttcatctttctgaactttgggcacatatttcactgtgttcagtctgattctcaaaggccctattcaacaccagctaccaaaattacactcctccctctattccttgttgagctactgcccccgtagaatccccctcctttatacccaaagcccaacacactcaatcctagtcaactttcctgtgactcctgcaacaagctacacatacttcagtcacaggacattttcattatgctttctataatacagttattagttcactcaacacacagttctcaagggcctcgtgcttctggtgtggtgctaggctccaggaatccac

SEQ ID NO: 157996 - DNA, 1000 bp, Homo Sapiens
ttttttttttttttttttttttttttttttctcattcagtctcctctttactgtgggtgtgggtgtcactgtcactgccacagccactgggagggacacacagctttaacccctgtgtgcttaggggaagggtgggggcattcagggttataaaactaactatatacacagaaggtcctagggagaaagccaccctgagcacacatgtctgggcacagtgggggctgggggctggagctcaggcaggatggactaggcttgtggaggagcgggtgggcatgagcatgtgaggacatgctgggagggctcaggaggtggcacagacattgccaaggccactgcagggcctcgagcagcttggctggatggcaagctctcggtctaacaaggttcttccactttagagttgggccctgtgagagccaccccctccgccaccgaccttcaagccctgagcggagggagaggctgcaggaccagcctcattccccactcacgggtgtaactcctttccccactcagtccccaggtctggagggcacccaccctcttcctaacacttcagcagaccaaggccagggtgcctttgtgggctgggggaataaggcaacgggacatccacttggaaggcctgtgctgtggagggtgctgagggggacccagtacccctggcagaaaagtgacagccctggtctcagagaggaggactgccatgggaaaatgtctctgggacaccccatcagggtggagacatccctaaccctcaggcatcgcccacagagatagggaggccaccgaggggtctccacagagatggactggcacttagggaccatcacagacctatcaccgcagtgacttccatagagacagaacctggtcatcagggagaacccaccccctgctcccccaggaggatggtgaggggcaccacggtggggggacccagaggcggcagtccgtcctctcaggtgcagatgcacggcggcccttagctgac

SEQ ID NO: 157997 - DNA, 1000 bp, Homo Sapiens
taacagaagttagggataaagctcttttattgtatgcattgaaaccttacaggggcagccttcgtgtcctgtggaatctgctgtccctcgggttttcttctagggtattggaatattaaactgggatattaggggcccctggggtccagaatcttgccaatgaagagaagggcccctgtgtctgtgtccctcagtacgaagatgaaaggctggttaaggtgatagtccagcgggaaggtgaggtgggcaggctgcagccctgggctgggggtggttcccgccccatcctcgttccactcaaagccagcccggtgttccacctgagtcagcttgatgggtttgcctgtgatcttgctaaagtctggtgaatcaaacaaggattgcagcttcatctcctgcagggacttggtgacttcgccttcataactcagcttcagcttggggacagtgaggaccgcctgcacggtcttcagttctcggtctatgtcatgaatgaactcggaggtgaggctctcctctatcaaggtcaaattctgggtcactttcaggggcaggaagaagatgatactcatgcttccggtcaagggcagctgggcaatcttgcagctgagatctgaatccaagccatagcgtaaaacagccttagggtccgacatcatggggaccctcacggtcctctcttcatccaagtagaaatcctcgagggaagtctttctggagtcaaactttgttacccactgccccttgaagtgcgccacaccgagaaggagaatgctgatctcatcgggaatttcctttgtggacctggcgagcttccctttcatctgcgcctgcacccagttgttgatctcttgcaggtccaagcgagggttgcccgtcaggactctgggcctggtcccatatgacttttccagaggtgccacaaagctggattttatgcgcagcttcttctcaaagacgatccgggaggcactcttgaggttcttctggggggcagtga

SEQ ID NO: 157998 - DNA, 1000 bp, Homo Sapiens
tttttttttttagaagaactatttattattagagaaagtccagagtccagaaaaagaaggctgaatccagagtggaaagacagatacaatgccctaggagggtgcagggtcaagaggaagaggggagcccacgtgtcgaggcagcaagtctaggcggcagtggcaaagcctactctgttgttgcccaagtcgtagacggaatagtaggacctgaggaagacatccccgaggatccacaggggctggccgttctgggaggacaggtaggtgggctcgactcccacggtgcagtagccgttgttactgaggatataggaggaaggtggcagagggaactccacaccattgatgatgaaggtcaagctgggcagattctgaatgctgttacagttcacgagaaactgtccatactcatcctcctgggcccctgtggcctgcagaagagcactcatgtactgctggggcacagttagcagagaggtgcctgtgtccacgatggcctggcaaccctcagaacaccagccggaggcctggccgccgatgaggaactcttcaatgccaatctgccagtagagttcctgggtgacaggcgcccagtagatctgccccgtgtacaggctgctatccacacccccaaagacaaccgctcccccgctggagccctgctggttgctgaggtagacgctgaagacggggctggtgagggcgccctcctgcaccatgccctgcatagctgtggtggcctcatccacggacagagcagggtaggccaggcccatgatgccatcaaactgcgcatagacgaagttggtaccaggctcattctcactcaagccgaactcctggttggggacctggatgctctggacagtcagggtgtcatagccaaagaagccggtgaggctgccactgccatactgcagggagaaggtctgcccattggtggagtaggtggacgactcgctggggttgaagcgggagtgactggtgcaggcctggc

SEQ ID NO: 157999 - DNA, 1000 bp, Homo Sapiens
tttttttttttttttttgtagcttattttcctttattatcccaaaatatctgtgtgaatgggacaatgtcgcaaaacaaggcagaaatctgtagccaagtacgtctcactcagaggaaagaactgattggacagaaggcactagaaattgcattttgttgggttacatgtaaacaggaaatggggggaaagattcacaaaagagaaaggaacttgcaccatcatttcattgccacatcctaaggatgaagaatggcctcactcactgctgatgctccacctatagcttacattgtagtgtaaactgtacctgatggctaaggagacaaatacccacgcagcagcaatgcaggagggcatgaaaaggaattgagattgatctaagcccgcaggtcctctttccctcacagctcccaagggcatcttgtttggcagtgccttgtaaatgcactgctcgtcaactggttagtgaaaaagtcaaatcctaaaatgcttggtgaatacattttgtttctgtcatgctcttcaatcagatgacttggatgggtccgggggtggagggacgtaccacatcaggcctgtcttcttaggtgatgacagtgggtgcagtgcgtcccgtcctctcctgcagctgggacactttcagagcaatggaaataaggggggccaacatgacctgggggtcctggttaatcttggcaacgtccttctcatagctatcgatgtacagccgaatggtggccccggcactcccagtgccgctcagtcggaagacgattcgagaaccatctgtgaaaatgaggcgcaagccctgatttcttgaaatgcttccatccactgggtcgctgtattcaaagttatcggccttctccacagtgtaaactttgtcatttgctgagaactgcttccccacaaaggagcgatcaaacatcagggcctccaagtccttcatcattttgtttgcgccctcagcttccacctcctcgtaatcatacctggtg

SEQ ID NO: 158000 - DNA, 1000 bp, Homo Sapiens
ttttttttttttttttttttttttttttttttttttttggatgtgttatttttttaatagaaaccacatcacttcatatgttacagcatgtaattcaagaggtccccagaaagttttttcatctacaaaataacagaaaggataagcaccctcaccacccaagcctttggttcattttttttggttttgatctctattctcttaccacaatgacatgctgcttccagaatggaactctgtctttaagttctatactagttaggaggctaatctatcagcttgctttaataatgtaatggatgtcctaatttaactgaggaacctggacaagtcttccttgatttcagcttcatcccaaggcccatgaatgttttctttaaaaagctgcaagcgaatgaggtagaatggacacagacatgagatagacatcagcagaagggcaaagagtacggctcccacagcactaatggacagtaggcctcccacggctgaaaatgcaaaaagcagtgtgacccccacatagctccggggagtacatgcctttagtttcttctgcaacatgggccacagggcaaaaatctgaatggcaaatgtcaccatgatgaaggcatgcagggaccggggaagacgtgatgccaagcatacagaagcaaagatggccatgttcaaggatagtgtgctggatacaatggcagcattggcaccatagtcaaaaaagatgagatggcctaacagcatgaagactgacatggcatagatggtgtcagtgctgacagactctgtaagggtcttcagcactggtgaaaacccataagtgaaagtaatgaagactagggcactcttcaggtcagcccaccgggtctgcccactcttcttccgcccttcacctccatcaatgagatcaaacaaaacatacccaatcagtgaagaagccagaccagtccctaaaagccaatggggggccagaagaccctcatccatataccaccagataaccaca

SEQ ID NO: 158001 - DNA, 1000 bp, Homo Sapiens
tttttttttttttttttttttttttttttttagccacaatctattataaatactttatttcaactagaaggtacaatctctcaggggtttcatagtttaaaaagctacaatcacatcatgttgtaactacgtaaaaaacagagctgtaaatggaactgcttggctttgaccatacacatttctgcccagcccttacagaatctgcacaaagaaatatctccctttgctccagttaattgttcttgtatgtaagttgctttctattccagtatatccagagtggtgaaataacaaggccagccacgtagccaaaggtcgctccaagcgtacaggagatgggccatacctgccatggtctttcccaatccagtggaataggaagtgctccaagccatgctcctacaaagctagaaattgtagtgatctggagactattctcccatatggatgtaactccatttctactgaacactcttagccatgctttgaggtttggtcctaacaaacataagcaaggcacagtagtaaaagtagacaaaataactgcaaataaaaatgtttccaatgccaactctatcagtggtgctccatacagaacaaaaattacatgaaaggagaaacaagacataagaaagtagatacagcatttcaaaaatccagttaccttgtgtgataatgaacttcttttagaggatgtatttggtttcactactaaatatagtactagattgacagcagttacaaaaccagaacagatgcacaaccatgtcaagtgtgtttccaatattgagaagttctccaagaagagtgatggaatgaagacacttaggataattgaaaatatgcataaaagatgggtatacagtagtctcttgatatcgttatctttcatggtgttttcttggatggctagctaactctccctcccgcggaagggaagcggggaactactgcctcctaccatcaggtacgacgggcggcccaggcccacgcgcaggcg

SEQ ID NO: 158002 - DNA, 1000 bp, Homo Sapiens
ggcaatcacagtctttaatcattaattgtcatatttctgatttgttagcaagtgccagcttgtaggctggttgaagtacagaactcagaggaaaaaagaaattaaattttagctttctggagagcagcccctctctggcaccatcaaacacttctttgtttcccttcaacttggaactcttcaaacatcaggggttgtgagggtttggccattcttttatcttgggtccatgtgagtgacagaaatggtgcggcctgggaaagatctccctcctttacattttctcttctccctcctcctccttattctaaaactgtgcctccaacagaggggcaggggctcttgtagagagatccctggcccaggacaggagatgccaaatctaatttatctcactgagggcctttgagaaaaacgcttcagggccaggctcagtggctcatgcctatataatcccagtactttgagaagctgaggcggcagatcacttgaggccaggagttcgagaccagtctcgtcaacatggcgaaaccctgtctctacaaaaaaaaaaaaaaaaaaaaaaaattagccagacatggtggcccacatctgtagtcccagctacttgagaggctgaggcatgagaatagcttgaacctggaaggcagaggtttcagtgagccgagattgtgtcactgcattccagtctgggtgacacagtgagactttgtctcaaaaaaaagaaaagaaaaaaagaggccggacgcggtggctcacgcctgtaatcccagcactttgggaggcagaggcaggcggatcacgaggtcaggagatcgagaccatcctggctaacacggtgaaaccctgtctctactaaaaatacaaaaaattagccaggcgtgctggcaggcgcctgtagtcccagctacttgggagggtgaggcaggagaatggtgtcaacctgggaggcggaggttgcagtgagccgagattgcgccactgcactccagcctgggcg

SEQ ID NO: 158003 - DNA, 1000 bp, Homo Sapiens
atgtggagttgaagcgggtgagagaacatggaaggcccgcccttctcagggaagaggtggtagtgaccaagacaggcagggaaaaagcaaacttctatgtggtgccttttgtatcttggacactgaggcatccgttcatacctcatcacccatctccccctgcactcccccagaaaacctggaaatgacacaagtggctaactaaggactttatttcaaacaaaaattaaaaataaaaaattgagagctcttttccctgggtttggggaaggagtcagggtagggaattccacatggctaggccagtaccctcagtacactggagggctgtgggaattcccttccttgcccatgatggggaacctcagcaagtgcagggcccacgcagcgcccgccagcaaggggagcttgggccaggggtcggtccctgggaggggtaggtccctgggaggggtagagctgggcagcagcatggccagtggccaaccacaggatcaagtcctaagtaccgagaacctactcttccccacttcctgggccccagaacggaataagaggatggcctgtggaaagaacctctgagagacccctacaaggagaagaaaggccccagtgtccctcacatttgtcacctctgttttctggagggcagtgagtcctggagtcagtctggtggtaatactgacacagaccaggaggggcagggaagccccaacaagtctggaccccacagctggctctcccacccctcagcaagctctcgcagttaccacatgatccttcgtgtttcttgccttccatttcccttgggtggatggttgggtaggtggggtttcctggtttggggtttctcagacaagggccctctagggagggtgccccggaccccccaccactcctgggctgaggagcgtgtcacatgatgccgttggtgaggtactggaagccgtcatagagtttggtggtgatagaccgcatactgccatccaccatctgctcc

SEQ ID NO: 158004 - DNA, 591 bp, Homo Sapiens
tttttttttttttttaagcatgttaagaagtttattttatagaccacagcagaaattccagccaagtttctttagaggaaatcacctgggtgtggcaaacagacagggcttccattattctacctttaggatttcaatagtataaaaccggttgtttttgatggggattacagcagcatcatcagggcagatgcctaattcccgaataacatcaacgacggctgcaatttgcacagttctgttggtgtaaaagtcccagtagaaggtttttggattgtcgtcacataggcaggcagtatacttatagttaaatgcaccttgtagagggatgctgctaatgaggtaagttttaaccaccatgcattctttcaattctgtttgaactgcaagcactgcagtgacttcgtcatttggacgtactgacttgggaatgtcaaaattctttattatgatcttccgagtgttgtcctgagctttgttggcccccaactgcaggcagagaaccaggagcagggtggcagggctggccctgaacaggagctggagcaagcgcatgctggagaaaacagaaggcaatgtgtcccagagaag

SEQ ID NO: 158005 - DNA, 1000 bp, Homo Sapiens
gaacacatcattcagaagtttttaataaacaacttcattataaaaacctttttttgaaaatgtaattctgtaaaacattgaaaaatctactttaacaaagatatgccctgtgcattttctaatggcacttatactttacaattaaaaaccttgttttatataaagccaaaaatactccaagaggttattcactgtgtttacaaagtgctagaagatttctgtcttgtacttttctctttaaataatctggagttacaaaagagtggctccaaagccttgaccgctggtagggagggagaagcatgagaagtggtgtctcaggagttctagtgccaaaggtggagaggtgcaagtgggaacaatcagctaaggaagtcagctgacacacaaagaaatcggactggaatttttccaaacccctctatggaggcactaggttatcatggtgaacacccttttccctcgccatagaccctactctccagaggtgaaggtcatggccaattccttccacagcaggttcagagttccaggagaggccagggtgggatcccagaggaatctggacttttctggccaacacctgcctaaggcaaagtttcttattacataaatatccttgttaaaaagcaaaatattgatcctgtacaatataacctgttaaaaaaatcgtgcttacaaacagctcctagataagagggcaggtggagagaggacggagaaacagctaccaaaaagggaggggggagtttaaaggactactagggaaagttttagggcagtgggagaattccaacttaggacaatatctacgagcaaaaaagtaatcacacctgcttcccggattttcaattaagaaaatgccatttgtaaaaggctgggcggtgggctggagggcgggggttgcagggaacctcattggcgctcctttccctgcctcccacctcaagatgatgcagagatcctttgagctgacacctgggcatgtcatccccttacc

SEQ ID NO: 158006 - DNA, 1000 bp, Homo Sapiens
tttttttttttttttcatcagaaaaatcacattttattgatcacttttatttaaaattacaaaaatataaataaaaatagtgaaatataaatattcagtgtacaggagtggtcctcaccccacccagtgaggattggatgaactaggctaaaaggaagggataactggccaagaaagggacatctatgtgaaagtgaaactgagacagtgctggtcacaggtcatgctgcagaataatacattcccaggcactgtcacgtgggggacccaagaggccccaggagtgacctataacctctccagaaagaccactctgtgtggcatcacagtccacacagtttaaggaaatatttagacttaacaatcagacaccagctcttactcacacttacactcacagcccacacacaagtgtgcaaacatacacacacatatatatttcctgatacattcatggaatatcagagccctgccctgaagtcgttagtgtctctgctccccaaaccgctgctcccacattggctaagctccctcaagagacctcagctgttacacttcctaattgggaaattattcatttctcaaccatgggcctcacaaatgcccaccgtcgggggagctggctctcccttcacccatgcacaggagatgccctgccctttttaactcctgcaggcttcagtccagaaaaagacaagttgctggtcagtaacatgttgagtcaggaccacccctccatcctggccagaggggtctgggcagccagcacccaggcctatgcctgagggtaaagctattgtcgttcgccctggtgggtggcacaggcaaatccatctgtgcagagcctatcttcccagtctcttcttacagctgatggagatgactctactgcaaaaatgacaaccagcaagaaagcgggtggtgcccgtttcctccctggggaccctcagagggccaggccattctcttccttggtgtgactgcggatccagggtaagaa

SEQ ID NO: 158007 - DNA, 1000 bp, Homo Sapiens
aaggacatgaggatgatttatttggcagtcagatcttaagagggcagcagaactagcaaatggccaaccctgagcccaaatgtgggcagtaggtttgtgtgtgctgaatgctggctatgctatgaggcacctttgcgcccacgggcctggaccccggcctctgtcctcagaggtgagggctgcctttctaaccttcccatctccatccctggatctttttaccagttagaagctgcagcaaggatggcagcttcattcagcacctaactgcctgtaccccacccacccaggagtcaggcaactcctcaatccctttttcattcctcagggaaagcatactgagtcttctttgacttaaaaacaaaaaacctcaccaaaataggctctgctatttcttctcttcccaccctggcccgccccccattcctgacagtgccttacatcacaaactaagtcctcttaacacagcaggcagcccacctgccactctcctctccaaggtttccctacaggggtgaggagcaggaggagtaaataacttagttacaataccattgagacgaaaaataatactgctatttttaacatgatcccctgtatctttcaggctgggtcatgttcccagccatgggcaatgtgcccttgtgctgtgtcctcctcctcaggcagggcagaacccttctccatgcaggccctacattcctctgccctggctccagggccaaactgcaggggcatctagcttctcaccctgcccagctgtggttttaaagctacaggacaatgtaaactttgtttccctggcccagcaaggctcctcctcctcctccactcttaggaatgtcagtagctccttggagtctcctgtgccactggctgaggcagcctctctctccaaggggcttcggccatggtcctggccccacaagatggaaggatccatctccagaagtcagggccagatgtgtgtgcttaatgcgaaacacagtacagtttttgc

SEQ ID NO: 158008 - DNA, 1000 bp, Homo Sapiens
attaaacagagtcatatatttatttcaaaacattaagttgacttcccattaataaatactttaacactgagtgtagaaaaacttgtgcatattctataaagataatttattaaagaatcagagaaaaagacagttctttacctctaggctattgataaaaccatctgggagtgggaacagcttcaggaatgttacaggggaattgagggagggcaagagaggatttgataaaatgaggaaaaatgttctactctcctttctttcctggagccttaaaattaaaaatctggaattgaaaaatatactttcacacacatatctgtttcaatgggtgctgtctttctcaattttggagaagaatcactagttagtggtcagggtcaaaaattgcaaataagttcccaattttagtctaggttagatcactctggttaatcatagggccatgatgccctcagaactcaagcaggagctgctgctacttgtgcttaaagctgaggcacgaacgcaatatcatttactggagaactgaagatgctgcgcaatgctaacagcccctctcagaagttctgtgtggctctgagtccttacagtgcagttgttgtattaacccatcatccagtgagctggccagtagttcagcccctccacttgctgcagctgccgcaagacacattcaccaggcagttgcccaggcctctcacccatggggggaacacatctggccacttttttttttctgtaaacctcaaatgaaacagaatctcacagatgtggggtccccctcctaattgtaataaacgttagagaaatgctccagaaaggaacaaagggagaccctctcagatcagcctaaaaccagagtggaatagggctcctctgggcggtttaagggcacagaaaggaccctcagctactcctggcctccccgggtctctttcccagaagacacaactttccaggctgccaaaagtaatagaagtcaaaaccctcaaaacca

SEQ ID NO: 158009 - DNA, 1000 bp, Homo Sapiens
tcattaaaatctctttctcttgataatttctggtttccagctgactggatgagtttcttctgtggctgtgtcatcctctctgtatactttaatggttttatcagcttcagctgttagtaatcgactttcagactgatcaaaagcacaagcaaatattcctgattcactgtccaaagacccaggttgcacagctgcgtgaactctctgaaaattgtagccagttctccagtcccaaagatgcatggtgccattgtcagctccagatacaagcactccatcagaatttaccgtcaatgtgttaataatagcattatgaccggaaagattttgaatgaaacttccatcagggaatttccactgctttatgttatctggagaaccagatgcaaatgtgtaatgtcttggatgtaaaaccacagccctaactgattttttgtgatttgttaatgtcactcttgtttttccagccaccagatcccataatcgaattgtagtatcatggcttcctgtaataatttgtggttctgcagcctgacatctcactgtagcaactgcatttgtatgtccagataatgtgtgtacactggctttagttctcacatcccaaatccgtgcagttgaatctcgactacaggttaccaacacatcgattgtcgggtgcaaatccaaaccatacactgcacttaaatgtccatgataatgccgtataaccttattgtattcgagatcccagcatttcacttgtttgtcttctccacaagagaacagatatgggctccttgtgcttactatcacgccccgcacagtactaatatgcccagtcaatgacagttttaatttgccactagccaagtcccagatctttatagttctgtcagcagatccagtaacaaaccactgatttccaggttccacagcaatacatcgaacccagccaagatgcccactgataaccctgtagagtttccacggtgggtgccactggggttttggcattgta

SEQ ID NO: 158010 - DNA, 1000 bp, Homo Sapiens
cagtgtgttatcctttaatgaaaagctgggtcaatggagtcaccactctccccaagacccccctgcagcagatagccctcaccatggctacctatgaggcagggcagccctgtggcagccagccctgctgaggggtcagtttgtagtggcctaggagaggcgttcaactcttagacctaggatgtggcagcagcaacaaggccagaggcagctcaactgaggtcagggatggtggaggaggcagacaggaagcatggggctctcctccttcctctccgaatcccagtgtggccaaggccagtgttcaggaacagtacagtctccccaggggcctggagtctcttccagccactctctggaagcccttagtccccaactccctgcagaccggtgtcacagggtcgctggactcggggagcaggctgggtactaccccatgagccttgaggccccgggtctaggaggtggatccagcagggccgaggccagagccaccaggagactgggagtcaccttccactaactctgcttgtcagtcactacaggcacctaagaaggtggcctctcctccgagcttccagggctgcccaggccaggctgaagcaacagcaggccgtggctcctgggttcctatagatctgtgaccttgttttccacagcagctgcaatctgctggagccgatagcccagctgcatcttctgggccgtgccatcctcctccagggcagtgatgatctggtcatagtacttgttgatgtacttgtagagttcatgcagggccactcgcgccccgaggtctccggagtagttccaggacagttcagccaggacagagttcatctcttggtcgctggctgggacagtctgtctgatgtctgcatagtacctttccaccatccgcttgtaccggggaatgtcccgtgcatacagaagtttgttgatcggggagtcccggcccagcttgtggtcggccagggtgcaggcgtccatgaaggtctgt

SEQ ID NO: 158011 - DNA, 1000 bp, Homo Sapiens
attttttttttttttttttttttttttttttcttttttttccttctttttatttccactgccttggagcaggtttatcacgttagagcattaattctttccccttctagggcactgcatcagagcatgggggacagaacaaagaaccagccaagaagaaaaggaaaaaataaatgaaatgcctgagttaatgtgaactttggggcttctgcttcatttttacccaacaagcaacaatgccccttgtcctgtagtccacaccgatgttggcatcttggttctgaacccactgaattcaactgcaccttcagttagaaggaatcttcttggcaggtcctgctactgaaaaatggctggccttaggcaagcccttttgcaaaaagcacagctgaaagcctgagtttgggagcctgcaccaccccgatgaagctccacgggagcaaatacagagcctccaggcagtgctatggtccaggctggcttcgtttttccaaggagcctttggtgagttcaattatctggtaaatatccagcgcttcaccctggggaatcccgtatctcctttccatcccagttgggttggaaggggttttacaatccatggtcacttccttcctgaggcaccggtcaatatcgactgcactgaaaaaggcgactgactggggcaagtcattcagacccagcttgtaggcaaacatgcacctggtcaagaggttggtgatctgcaaggccagggcagcgcggtagcggtcctcctcccgcaccaggtagcgaacctcgtcatggatgctgatgcagaagcgcccatctatggcaaactcttcaaacagccacttcatggccacaagcatgaggtgtaagtagtcaacagcagagctctgtaccacccaattcacacggctggtcataaactcttcctggacagccgagggctccagggctcggctgatgcagcagcccagcaccggggtacgtggtatgtcagacgtagcaatgctctc

SEQ ID NO: 158012 - DNA, 1000 bp, Homo Sapiens
tttttttttttttaaacatacttattacacatatttatcaacaaggcatcacaaataagtcacaaaaagtaggcttagtttagttcacaatataaatcccgtgaaaacacatttttcatctctgcagtttataatactctacgtatatgaatttaaagcagttaaacaacatttgagattaaattggtaaaaaaaaattgtaattgaattcagacttcagaaaattgtgaagtaaaaggccatgatggagaaatattaagaatctgtagaattactaaactgtcacagtattattttcctttacaaaagcatctcagtaaaacaaaaactacagaaaacgcaaagtaaaatcagagattttggtttagtactttccctgagtctcttgttttaaaaatcaaagtaaggccagttcaaaattgacccacaggtcttgcctcctccatgctgccatggggagtacatttaagacaagaggctacgcatgttgaggtggtcccagggctttattcaaatgccaatttgcccgtgtcactgccacagggttatctgacccactgctgcatgtgggcttaaagagctgtcaaaattttatcttggcctgctataatataatatgcgagactatataccaaaggaagacaaacagtttcagttattaataaatattaaatttctaaatggatctggacactatatacatcaaattatggtaacataacagaaacaaacacttttatgtttaaaaattcttacataaacaaaggtttggggtcaagtcatcttaaacttctaatctcagatgttacaagaaaaaacttcaaaaaagaaatcaaattcattagatcttaatatagtagaaaaaagtgattataagatgatacttggacttggattgtaagttgatactaattccccaaagtggttgtctctttgatccttaaacaaaactggcccctattgtgtctgtacttgatcacttaattgcaataatatttat

SEQ ID NO: 158013 - DNA, 1000 bp, Homo Sapiens
gacagtgtggcaagatttaattgcaacggcatctgaaaatggtgtgtggcgtcgcgcgcgccagctatcgtcagtgcctttattgccattgggtttgtgactgttgatatagtgacgacctcaggagcaacaggtgggttaaaaacccgtggctgggcagttcttccgaggagagggaccacatgaggagccaagaaggactcagaacctgacgaacgtggcatcgatctgccgcacggaggggagggcgagcatgaccttccgccggtactgggggtccttctgcaaggggttccgctccaggtacactgtctccaggctcctggctcccttcagctcgtcgaggtcgctccagctctcaaggagattgtcgttcatccagaactcttgcagctctgttagatggctgatattttcaatctttttgattctatttgatgcaatgtccaacatcgtgagtttgttattgttctccaggccctcgatgacctcgatgccattgtggctaaggtacagctcccgcaggttcaccaggttctgcagaccctcgatcttggtcagccggttgctctgcatactgaggactgtcaggttggtgagcgcatccaggttctgaagtttagtaattttgtttttccccaaaaacaaactctccaggttggttaaggtgtcgatattttcgattgcccggatgcggttagatcccagctctagcatctgtagttgatgtaagttgcttaagttctcaattttactgattttattgttgaccaagaagagttttttcagtcgtgtcaacttgtcaaccccttcgatgtttctcagcagattaaaagaaatatctagaatctccagctctgttagcgcctccagattctcaatcttcttgatctggttgtcgtaaagatccagctctcgaagactctgtagctcctccagattctcaatgcatttaattaaattttggcggaggcagagagtcttcactttcttcagtacc

SEQ ID NO: 158014 - DNA, 1000 bp, Homo Sapiens
ttttttttttttttttttttttaagctgcttctctttccactgtttattattaatgtacaaaatatacaaaaccaaaaaaaaaaatactcatcctcaaatccattttggctctaacccaagaccctgcacaaaacccaaccaatccactgttttcatagaaaacaactgatgccaaagtgaaggagagaactgggaaagggcaaaatcatcttgttgaatccacccaggaaggcgcctggtggggattcagaggtggttgacagggtgaagtacctggaagcctccttcacgctggcaaggttccaggtgggagcagggagtgagctgactcccaaaggcagtgcatgtagtgtgactttcaggcccagcacgccgggcccaagttgatgagaagctggtctcactgaagtattttatcaagtctccagactggctatagttggcaaaggcagaccagcaccaccggtctcacctctgccagctaaaacttgcaccggatgcagatacgagttcgccatcatcgaacctagcagacccaggacgcagactgggtgttcacagaaagttgaaggtcccacttgagaaaggactaagaatggtgagcccacgctgggggaggggtggggatgatgtgtgttccagaactcaaatccagctgattgagccctctcagtgcagtgggatatacaatacccctttcagcatctccccaccccatgaggaataatgaacttagctgggatgatttcttaagtgcagctgatcctgtgtcagagttctgtgtgcatgtggggacccgcaatagaagggtaggggtgttcgccaggataaccagctttaggttctcaagcattaagggtaatactggaaaggggtttggggtacagggcgaatcttctcaaaaagtgaagccaactgggtctcctcttcagcagtccaggaacgtttccagtctctctcctccccagactggaggaaaatatgtacatcaatgcgcac

SEQ ID NO: 158015 - DNA, 1000 bp, Homo Sapiens
agaactcatatcagtttaagagaacaactctggagacagaaatggcttggctttccgacgcaatgagtaattaaactctattcgtcctccggaagatttccatcccaactgaacgttatgtaatttcctggaaacagcaggctcgtggaggcaaacgggggacagtgagactattctaggtacagaggactggagggagacatgcgagggaagaggaaagaggagagtaaggaactggatggaaacaggaatactggagaatcaaagggaaacagttacatcacatcagactgcagtcacctcagctgctaaaccaggagaacactgggcaacagggcctctccctctacagtttcatatccaagcagtggagaaaaataagaagctttacgataagagtgtcaccatttttaaaagtcagaggaatttaagtaaaaggcaagaggacagaacaagcacctgacctgtttggccaccctgccctgccatcgccacagggacagagccaatgtgacgtctaagggcaagccccagcctttcagtttagtgacaacacaacagttaacaaaggaacaaaagtgcaccaggttaaccgccgggtcaggaaggacaggcttgcttccctggaagtctacgcaagcaacctgaatgcctggacaagccagctcaaaggtcaggctgccgtctctgttgagtcaggacaagttgtctggcaaagacccctggggctctgcatcacagtggctgagctgtggtatttctgtgagctgagggcagcccgttatttcaacaagacctcgttagaaaccacatattcacctgccttccttcttatgaaacaagatgcatcctcaggttcacatcttcttggtagcacagagagagaaacaagacctggtctcttaaacctgtgaggggtaaaccccacacaaattacagagagaaacaccaaggtgaattccactgttgctgagacatttttattggcataggttatatg

SEQ ID NO: 158016 - DNA, 1000 bp, Homo Sapiens
tttttttttttttttttttttttccattctttgtcacttttattcagtagtaggttttttttccttattttcagtgccagacacggcgaggagtgattacagccaactgttactaaaacatttgtttgcaacatataccccctttataccactgaccccaaactgactcattttgtgtgctttcattctttctttttttaatataccaccaccaagaccgggtggagggggcaagggtaagagatgaaggggagcagtccaggaggccagaagaggaggaatgctacaagccacagtaagaatgagctgtatttaatttaaaaaaagggggaaggggtgtaccccacaaatgatacagtaatgaggatacacaattaaatcccatagcatgactgaaggctttcactgtgtttgacgtcatcacaatggaaggcataaaaagtggagtaaatcaatgttgatacagtccaatctagtccattaggcaagatggtgcaagaagtcatttaaattaaaagtgccctacccttacctaaatggctagcagacatggagaacaccacagtgatgaatccacagagctttctccatgtagctataacaatgtgttgtcgaatggcacactgtcaaacactggaaaggggcgccacaatggacctctctcttttataggaacgaatgctagattcaactatctcaactaagcaggaagtgggttcttctgctaggaatgccaaccctaattcactttgtcttgaaatatatacagattgtttgtagtagctacggcaatgatattttccttggggtgccaggctgtgtgaaggattttcttattgaagtctaggctgtcaacacttatttcatctttctttcgcttgccacttgcacagactttgcgaggcttcagaactgtgcgaggcttattgttttcccgcgatgcttctagggttatgtctcgctttgtgtttctgtcaaacattctgaagaaattattgta

SEQ ID NO: 158017 - DNA, 1000 bp, Homo Sapiens
tttttttttttttttttttttttttttttttttttttttttttttttttttttttttttttttttttttttttttttttttttttttttcatttttcttcttttattagaattttttcattttttttctcaaaatttttatctaaaaacaaacagaaaaaagaaggaaaaaaagaaaaaaaaattattggaaacttcatggttcaagtggggagagaggaggaggaacatggagctaggtctccaggcctctccagagaagtcctcaccctcgaagcaccctcttgggggacagcagagccaggacagccccccccacgcccagcctccgtctgaggaagatggcagagtcacagtggtgcgagggccagaagggttggagggggcaggggccgggcggggtcacaggaagtagtcggccacgggcttcttggaggggatgccccgtgtctcttggggagcagcctcaaagatgatgaaatctttctggagatgctcgtccagctccaagatggctgccacattcccacagcggtagcagtagttgggtgccgaccacacagtgagcaccgtctcattgaagtgccacttgtaaccttccatcaccagttggtgggcacggcagatcatgtcaatgtcattggctgcgttgaactgggccaccacgtcactgccaaataggtagccggctcctcgggggctcacgccccagcctgtggtgtcttctgggtcagaccagaggaggtcacacatgggcccatcatgaggcacctcttgctttcggtcgattgtccgaatctgatccagggtctggatggagggggagaggcccccgtgcacgcagaagatcttgccatcgatgatggctgacaggctgaggtagtcaaagatctcagtgcagtagcgccacacagtcaccgagccgtacttgcgcaggcactcatcgtagaagccatagacctgcgtgatctggcgactctcatggttgccccggatcagtg

SEQ ID NO: 158018 - DNA, 1000 bp, Homo Sapiens
ttttttttttttttttttttttttttttttgtcctttagaccaatttattttatatccatttaaaatatcatccaacaaaggacaatgaagtttacatctgggacaggtatacataacttgaggcatttggagtccatcgtgcccactgaataacaactttgctgctgaaatttcttaaaacttaccaaactaaaacaaaaggctgaatgatacaaaaggaggagtatttaggtgtaatctgtcaattggcttttaaaaaaaaggaaacacatcctgtttcccagaccagtaaataagcaagagctacatgcagcagtgtgagtattaagacatttctcaagtcttctcaaatgagtccagggtggggatgggatgggggaaaattgatagaaaaactttgctatagacaccacaacaaacaataaatttagataatttaaaatttaaaaaaaaaaaaggcaagaggcagcatttcagcagcaaagtgctcaataaaaagtatattgtagagggtaatacaagaaaattggggtaagaagagggcagaaaaatgggtcagcaggatgggcgaaggcctcaaaggaaatatggcgttgtcgttctgggaggaataacacgttctgaatctggaactgcccggaataactttggttctcttgtatttacatctttgaagaccatgatcgaagcaatatttccacaacgatagcagtaattaggagcagaccatactgtcaccagcttctcatcaaacataaatttatagccttcgtgcactagttgatgtgctctgcagatgagttttaagttgttgatatgaacaaactcatttgtgacctttgctccaaaaagccaacctgctcctcggggactgatagcccaggtatccacatcttcaggatctgaccaaaccagatcacaaaatgctcctttatgaggaatttcctgattccgttcgatggttcgaatttgatccagtgttttgatatcaggagataa

SEQ ID NO: 158019 - DNA, 944 bp, Homo Sapiens
tttttttttttttttttttttttttttttttgcaagctgattattttattggtatattaaagttagagctatgatgaccttgttccaatgtcacggcatttgtagcaattgaattatttgaattcactgatatcttcttattcacttcctgtcattgaatcctagattactggggaggctgttgtccctgggcaggtctgggtggcctgcccccttgaggaggtggaggtggcccctggggctttccagcaggaggtgcctgaggctgctggggattgcctcctgctgggggtgggccttgtggctttccaggaggtgggggaccttgaggcttgttgccttcttgttggggtggtccttgtggctttcctggaggagatcgggcacttcgggacttgtttccttcctgtgggggtggtccttctggctttcctggatgaggtgggggaccttgggactggttacctccttgtgggggtggtctttctggctttcctggaggaggtgggggacggtgggactggttgcctccttgtgggggtggtctttctggctttcctggaggaggtggggtaccttgggactggtttcctccttgtgggggtggtctttctggctttcctggatgaggtgggggaccttgggactggttgcctccttgtgggggtcgtccttctggctttcctggaggaggtgggggaccttgggactggtttcctccttgtgggggtggtccttgtggctttcctggaggaggtgggggacgttggggctggtttcctccttgtgggcgtcgtccttctggctttcctgatattaggaagagagattcttcctggctgacatcttcacttgaactctcagctgagctcagggccagcagggccactgacagcagaatcagcagcatctcgctggaggctctggagtcactcccaactctg

SEQ ID NO: 158020 - DNA, 1000 bp, Homo Sapiens
ttgcagaaaggtgaaatgctttattctcacagaaaactccacttctggagttgcccctcaatatgaagaaaccggaagtaaaagcctgtcattcttaaataacatttattattgttgcaaagaagtcttctccatgagaacagttctcacatttatttaaagatatagaggttatggatatagataagtatgcccgactatgatccttaattcagcaatctaatattcacaatgtgtttgttgccatttagctatttatcccaacatgcccttaaaaaaaacaccaaaaaaccacatgtgcctagacagggtggaaaaagaaacaccaaggccttgctaaaaaggagaagcctaaaaaagataaaattcccacggcagttctgttcaactgtagcctgtgagtgcaggaataatgttcccgtggggaagcattatgcccagtggtttcttggtgtcaacgtgggaaagcccttgaggttttctgtcgctgtcaggaggaagcacgaaaactgtttatggaatccagtcgacgttcaggcaccgcgcgatgaacgcaaacatgtctgagacttcctctatcactttggctgtgggcttccccgccccgtggcccgccttggtgtccacgtggataagcagggggttgctttgcttcctgctgcggcccacgatgtactgaagggtggcaatgaacttcagggagtgaagcgggaccacgcggtcatcatggtcagcagtgaggagcagcatggacgggtactggatgtcatctgcttctggtaacttcacattatgcaatggagagtatttgacaagccattcaaagtgttgtttgctgtccgagcacccataatcagtggtccaagcatggccgatggtatatttatgaaacttcagcatgtccattactccaacttgggcaataacacaaccaaagaggtcaggtctctgatttgcacaagcagccactaagaggcctccatttgaacctccattaata

SEQ ID NO: 158021 - DNA, 1000 bp, Homo Sapiens
gttttaattttttattctagcaaacagcccactgaacatggcactaaacctctctccttcccaggcaggattactccaaagggtaggtgtgcttttcattcatcctctcttagtaagtggtgcctgttcagggctggagttaagtttgagcccctctttccacaccgtgtcccttgatacaacagcaagacctggcctgaatagagctgagaaactcgtttaaaacaggcagaagggggctggggcaagggggaccctgtgggaggagaaagagagaagcacagagggaccaggaaggcatggggcggggggtgagggagcagctggtgtttctgttcctccaaatatctgggcttcctgctcccccaaccctggagggtggggtgaggatgaaattagatacaaggaactctggggccctctggctgttcaatccaaccctcccatcccccaaaccaccaaaaacaaaaaggaaagaaaacccacaggggcacaagcacacccctaaaactcagaaaactccttggcacacttctcattgatggagatccggagctcttcctcctcgtagtcgtcaaagttactggcatccccagggcctgtgtacttcgggatgaagggagcttccaccttcttctcatagatggcgatccagctggttgtggcgaaccacttgtggttcttgatgtcgccaaccccgttcctgaggtttccgaagcgcttggtgaggtccacctgcagcaggctccgcagcagatgcttgaggtcagagctgagtttggagggaaaccgcaccctcccagagacgatcttctcgtagatctggatgggctggtcggcgtagaagggtgggaagcccacggccatctcatagatgagcacccctagggcccaccagtccacggccttgttgtagcctttgctcaggatgatctcgggggccaggtactctggggtcccgcacaaggtccaagtgcggcccttcacgcgcttggcgaaa

SEQ ID NO: 158022 - DNA, 1000 bp, Homo Sapiens
tttttttttaagaatttaaattatttcatctctttttattacttgacctaccattaagacaatctataacaaaaaaagtatattagcacacatggtataatcagactggtaatcaggaagcaatacaaaacggtcctttggccatctatactttctagagcagtaaatctcataaattcacttaccaagcccaggaataatgacttttaaagccttgaatatcaactaagacaaattatgccaattctgatttctcacatatacttagattacacaaagataaagctttagatgtgatcattgtttaatgtagacttatctttaaagtttttaattaaaaactacagaagggagtaaacagcaagccaaatgatttaaccaaatgatttaagagtaaaactcactcagaaagcattatacgtaactaaatatacatgagcatgattatatacatacatgaaactgcaattttatggcattctaagtaactcatttaagtacattttggcatttaaacaaagatcaaatcaagctttaagcttgtaagaacgtaattttcatttttaattttttaaatataaaaaggtagctaaacacaaagtacagatcagaaaccctcatttaatatagattattttggaaattaaaaaatttgtaacaaggtggctttcttacccaccctaaaatgtaaataaaacctcttccccagatttatacttcatacttggtaacaacctaaaagtttttcaaatctatgaaaaaaatctaccatgaccaatttaaattacctgggaaagggcaggagaagggatcaataacagagtcagttagttgcacacagatggaaaaatgcttgcagtcactcccaaatataaccctacattaccttatatataaatcacaatgaaaataaaagtgcctacattacagaactgtgaaattttgtttaaaaaaataataaaaataaactgttgggtatcattggaataatgtaacacat

SEQ ID NO: 158023 - DNA, 1000 bp, Homo Sapiens
tttttttttttttttttggaatgatcattatctttattcatacacacttgcttccaaactacaattaatgtttctaacaaagcgtatcatgcaaacggagattagaggttatacaaactgaaaaaaaaagcaatgcagtaatttacacatccgtctcctctgcgatataaccaaatggtgtttgacggttgaatggcctctacattttgtcagtaggtgcttatacagaaggaaaaacctcaacctccgtctcttcctccaaacaaagttggggcttatatgatgtttttcaattaatgatttaaacgtggtatgtccttcacacacacaaatcatgtagcaaaagcaatgacttcaaatgcttctgtttataaaagatattctgaaagaccctaacagaagggatgtgaggttaatttttagaaaacctttagactcaaaatagtaactgccttcatgattgattttgaatattctagtaaaccaacccttcaagaaaagaatgatattcttccaggaagaatatcaacaaaagtctacaatcacaggaatggatactcctaaagttaagcagaggtgacaaagacacagtcgtttaatcagaaaatgcaaagccaccttttatcttattttagaaaaaaaggttcttataaagtggacttgacacctattttctgaaaagccgagttctgtctactcgcgtaagtggtaactatgaaacagacgtcaataggcacgtttgctgctgcctcttatatcttgggagatcgaagtatttctgagttgcccagtgggcaaaatccttacagggcatctctgaatcttcacccaaggtgagagacctggggaccaggcgggtctgggcacagagccaaggaagcatcctcctcctgccaaaagatggccacagagcctcacggagcaaggaaaggggtcccagaaacccctgggaatcctattccagggctgcctctggatgggggacactaaaaatgtcttt

SEQ ID NO: 158024 - DNA, 1000 bp, Homo Sapiens
tttttgggtattatacattttatttaaagacttcaaagtaaaaaaaaaaaaaaaaggtacagaaatagattacattatgatgaccacagtagtattctacatgacaaaaataaaaacagatttaagtaaatgtaccggcactgaacaagcatttacttaacatccaatccaggctgcatatgcacaaaatgatctgaccacatgcttatgcaaaataaagtttttcttagaaagccaaaattccaaccattctgactgtccgctgcctattcccctgttgagtattttgagcgaacttctatagaatataagaacaattggcatggcacttaaagactgcaaaaaacagaacacaattaaaaacatttataatgcatttctgtataaaatacacaccgtaaatcttattagttaaaaaaagatttaaaaacaaaagaccaccctgaataatggttaaaacctcatcatagaaaaatgctcatcattttgtacactgaaagaaactactgagaggttttttggggggctggtgggaaggtagatacctaacttaaagattcattcaaaatttgctttaaattgtgggtaataactcactgcttaccccttctcaaaatgttttatcatgaatactctaatatttaaccacaggacaaacataaagaataacctgaagaaggtatttctcaaagtgaggtcgaaggccccaaaagaagtctaaggtgggctcactagtgtgcattttaaaccaacttcctaggtgattatttcacattccaaaatctgagaactaatgccctatgggaaacagcaccacttaaaagcaaggccataaacatatttctgacatgagatacagaattctaagtttatgatttgaagtgaatactgctttttgttttaaaacaagtttcaggtgttaagagaaacatattaaataaacatgtggatgtatataaacattttcctttgacgttttcattgctttcagacttatgtt

SEQ ID NO: 158025 - DNA, 1000 bp, Homo Sapiens
tttaaaaagacttgctatttactgagtacttgctttgaagtactatgctgaacagttgaaatgtatttttataatctttaccatatacaaggcaagtaatattgcttccactttacagctgacagtctgaagcagaggaagaaagcagagacgcagaatgactggcccacagccagccgcagttataagcagggggtagttctgaacccagctggatgggtccaaggcctgtgctctttccataacaccacatccaaaacattttccagtatctttgttttgtaaataagtcattacataatgcccaatattgataagaaccaaatgtccaagaaatcctatctttatgacttcttgctctgaaaaaaggggttgcccaggatgtctgcccagcagtggggttgcagaagttcaggaggatgaggagatgggcgtgggcaccgcctacccccccccccacaggtgaaggtctgaagaaccacctggagaaccctaggagcactgacatccccattcaactcgaggaacagctcacagccctaacacaagttaccacatgcagagcaaatctggaagacatctggggaacataacgaaggactagacaatttcacgttttcacagatgaaactgcaattaaactatacatgcacggtgctgtgttattttggtaatacagggacacaatttaatgattctaaggatttttttgtagttttttttttttacaagtcaggtgccataaacattcaaataatccatcttttaaaaagtacgtttacaacatcaaaagaattaagatgaaatataaacctttctacttacaatttttatacagattaaccaaatcacaaataccacaaataaatgttaatgttaaattgtaacaatataatgaataaacattcagattcttaataaaatcttcctttaacattttttaacttaccattatactaaataatctatgcagaattttggggtacaataccaagaaggc

SEQ ID NO: 158026 - DNA, 1000 bp, Homo Sapiens
ttttttttttttttttcagccatagacacatctctatatttatatattagacgggtcagggaggtggcaggggcgccgggctctccacgccccccagctccacttctgctcaccacacacagaagcagcgagggcacgcgaagtgacagctttgacagggaggggattcggcccggcctggctcctcagggatgctagcccttgagactaaggaatgttccttcagggaaactagggtggggtttgaatgagatgaggggggcaggcatggccctgagtccctactcagcgccccccaccctccacctctgcccttcagcaggttggggcagccagaacccttccattccagaactgccagagactgggacgctggggaaggtaagggcgcagcagcagcagcagcgggagattgaactggggccacctgagctcccgaggccccgtggggagggcgggtggggaggagaaggccttggcctgcctgaagctggaggcctcagcaaaggagagaggtggccaggcccatgctccaccccggcctgggctgccaaggtccgggctgggcacagtgtccattttctaacagtctggcgggagaggggcaggcaggaggcaggtccaggccccagggtgcagagatgtctgtctgggctagggggcctccagcactccgggctggaagcgtgctgtctcctggaagatgagctccttcagccgctccttaggtaggtcatccagctccatggcgaaggtgaagggctcctcggccactggctcatccgtcgggtcatagtactgctccaggtaggggtgagccagcgcttcctccactgtgatccgtttattggggttaaaggttaacatccggtccagcaggtcaagggctttggagtctgacttggggaaaagcttggcccaagccaccttggtcttggagggcagagactgtaggtagtttcgggccttcatgttgatgatacaattcaggtcctcctgg

SEQ ID NO: 158027 - DNA, 1000 bp, Homo Sapiens
gttccaataaaactttatttggcctgacctgatcaagtttaataatgtttaataaattttttaaaaacattagtagttataacaattcctctgtaataacagttatatatgaactcctggtcaaggcagcagcttgttctttaccaaaaagtaagcgccctctgaggacaaaatggcacatgaggagtggtgtacatttctttttcttaaagaaaaaacaaaacccaaacacttcctatttacatattttccatttaaaagttggtcatgtgagttaattctgtttttaaatataagtttctaatgtgttgcaggtttaacgacaaattatagtttgctgattagatttaaggcgtgtggtgtgagggtgaacgcagcccaagaccaatggtggatctctacctggaaactggctggacttctgtgggtatctttgggagtgttgggggaagagaaggagctgaacaccagtggcagaaatggtagaatgtcctgggaccagatagggctgtcagtgtccccaccccacgcttctgcagaggcctgtgtctacacaccattaccccatgctctgtgggtgacacacagtttgcatgcaccaaactcaccttagcctacactatgaggggcattgctgctttgagtccctcctttgtcatgaggtctccatgctggtgcctgacccctaagagcccttgctgttgacacctctcttttcatatcttcctacctttctggattccttgcccccaaggtcacgacgtgctctccaacacatctctgtagggtctgctgtttgtcaaggctaaatggatgatcaaactcaggaaagtattgatgaaggatgttgggtcccatgtgaaaccttctctcctaacacatttgctctatggcaggacctcactgctgtcctccaaatgagcagttcatgtagagaacatttggtccgaggtaggtctggagaggcgctgtggttagggtgggggggccgggtgtgggg

SEQ ID NO: 158028 - DNA, 1000 bp, Homo Sapiens
tcatgtccacctggaacctgagaatgtgactttatttggaactagagtatttgcaggtttaattaataaggatcaagataagatcacacaggattagggtgggccctaaatccaatgactgttgttaaaagaggagagaacagaagagacagagactggagtgatgcagcaataagctggggaatgccacggactgcccactgccgccacaagctaaaaagagccaaggaaggattcttccccagagccttcaaagggaccacagccctgccaacacctccatcccagatttccagcctccagaactgtaagggaatcaagttctgctgtttcaatccaccaggtttgtggtaattcgttagagcatccctaggaaaccaacacagcatcactgccataggcccccggcctggctcagcgcccactcagccccactctggcgggaaggaaagggccccacctgcaggcgattctccagatgggcagtttaacgtggcctgttaggatcagagctagtttctcccaaccgacatctttgaattctgcatctactaggcccatttcccacataaggagaaggacccttctgtcctctgcttgaaaggctgtattccaagaagggctgagtttggtagtgacaaatactggtccttgggcagtgtctggccggtggtgccatgcaagatgagtccctacagcttcatgccactccggcgccgtgagtccttccgggcaatggggctgaagttcacaatctccttgtagatgtgctgcttccattcatccactgtgagtttctcgtgttctaaggaatcatcaaacggctgctgggcctccgtctcttcctcagggtcccggaagggttcaaagaagggatgggtgagggcctgcgcggccgtcaggcgcttgtccacgtctagctccagcatcttctccagcaggtccgcagcctgggggctggcccgtgggaacagctgagtgaaatccttcctgggggtct

SEQ ID NO: 158029 - DNA, 1000 bp, Homo Sapiens
ggttgtacatcactttttttttttttttaatgagtaccatatttctccagctggcttgtaagctatgtgaggcagagaacgatcttacatttttttggcctaaaagcggtagaaatttaataaatagatatgaattgattgattcattaatagtataaaaagaaaatttgggggtggtttttccatctttagaacaaagagatgaggctgggcgcggtggctcatccctgtaatcccagcactttgggaggccgaggcaggtggattacttgaggtcaggagtttgagaccagcctggccaacatggtgaaaccctgtctttattaaaaacacaaaaattagttgggtgggtggcacatgcctgtaatccagctactcaggaggctgaggcaggagaatcacttgaacccaagaggcagaagttgcagtgagccaagactgtgtcattgcactccagcctgggcaacagagcgagactctgtctttaaaaaaaaaaaaaagaataaagagatgagccaggaaaaagtaaaatgtaagaatgtttttgaagcaaaaagaagaaaacctttctgtttctgcagaaagattagtaaaaatagtaaaaaattaaaggaaacattaaaataaaaggtaaatatctattgatattccctagcagattttagataatttaaggaaaactgcatatcagaagcaggatactttttcagaagggctctaacatgtgtgtcgttcatttttctctgggcttttcttccacacagtcaaggtccttagtatttcagatgtgttaggtcgatcctcaggtttctttgagagtaatttctgtagaagagttttttcttttttatcaaatatatctgagatgatgccatcccgtaggtctgtgaaaaactttgatgtttcaaaagcagtgtcacatacatgaagaagttcagcaagaattagccccaaagcgtagaggtccacttcctttccatagtcttgcgaagaaatctgt

SEQ ID NO: 158030 - DNA, 1000 bp, Homo Sapiens
agatttagctttcattttattttagttataaaacgattgccaaaacacaaagttttagaaaaacacacaaacacaagtttttattccttttttagttgcagaaaataaatacaatcacatattccatatgcttgtctacaaaagcatctctaaaaatgtcatttactggacttgacagtataatcttttcggcttttcaattgcaggtatcatacagatcattttattttattaactttttaagcacttggctcaagcaactttggaagaaggctttgtgagcttacaaatcttattccaagtgttattttttaaacagttacaactaaaacgaggtcttaccttttcaaaagaggagaataaagtttttcttttataaaaattgctccccaaactcacaaacacccaaaccgacataaaaagttggtctatcttcttaggaatcaataagaagtgaggttacaggggagagggaggaacaagcatgacggttcctgtgaaatccatcccaccgagcagtcactcttatgtttccagtttggccctcgggagttttcctaaaggaaaactcagtcatctaagcctatgtttctgaaaaggtaggacatggactccccattgtggatccgacggatcgcctctgaaaggatcatgctgatatccacagttttaatcttggggcactggagcttctggacttcatgtggaattgtattggtgaccaccacctcatcaatggcagactcttcaatccgccggggggcgtcagaagacaacaagccatgagttgccatcacaaagatcttatatgcacctctttccttcagggtctctgctgcagcaagaaagctgtcaacatcatcaatgatgtcatccacgatgatggcaatccttcctccaacatcacccacaaccgtgattgggggcttttctttaggaatcagcatggggatctccaggctggggtggatggcagccacacttctgaccatgggtgggg

SEQ ID NO: 158031 - DNA, 807 bp, Homo Sapiens
gagagcagggccactttattggtatagagactgcagagggaccgggggctttagctgttggcagcgatggtgtccttaatccagtccacatagttgtagaccttggtgtagactccaggcctgttcttccaggcacagccatggccccaggagacaactccttggagctgtccgttgcagaccacagggccaccagagtcacgctggcaggaatccttgcctccctcaaggaagcccacacagaacatgctgttggtaatctttccagggtaggaggctttacactcagcctgggtcagcaccggagcatccaggcacttcagctcgtctgggtagtcagcaccaaagctcagagtgttgccccagccggagatgaggcactcagtgccagcagctggaggggcggtgggcagagagatggtggacacgcgggcattgatgacggcaggtgaggagagtttgatcagcatgatgtcattgtccagagtgtccctgttgtatttagggtggcggatgatcttggccgcattgatgaactgctcattcccctccaggactttgatgttgtgctctcccagtctcacctggatgcgggtcttgtagcagtgagctgctgataccacccactgttcgctgatgagggagccaccgcagaagtgggagccagaattcagggacacctggtaggggagagaattctcctcacaggtgtagcccccaacaatcttgtcatcatcgtcaaaggggacagcaacagcagctcccacaaaggcaaggatcaggaatggattcatggtggtagagtgt

SEQ ID NO: 158032 - DNA, 1000 bp, Homo Sapiens
gtgctcaaacattttaatcatttctgccctgttactcccaccccagatccaagcgccagcccagttccggtgggggctcagtcctccggagtccaggagtcagggctcgggggcgctcagcggccagtgggcaagattggggcctttcctgtcctcgaagctgcacaaaggtggccccagcccagaacacagggagagggcagagagatgtgctcatcagtctgggcaggcgggccgggagcagtcttccagaaacaggtgggagccagggctcattttcatagccaagggtcccaggagctccccaggagctcggccaatgggctggtccatggtgggtgaggggccagaggctctggccattgctacaggcagtaaaactcctgactctcagtgatggtcccaaaaagcacacccagaagaatgggctcaaagatcaagatggggccccagcctcccgcagagtcctgaaggaaggagtggctcaagtcaggccctgggtccaaaggccatcagggaaggaccaggctcctgtccttgagtgtgatgcatccatcctggaagtagggccagctcagtgctcgctgagccatggggagaggaggcccagagccaggcccagaggcaggaaaaggatgggcctcagcaagccctgggctggggcagagctgaaggccaggtggctgccacagaggttgctgtcgggctgggactcctgggtttggggcaccacacgaggctggagttctgtcaccttgctttggatccaggaggcatagctggaggccagagtgtacacaccaggcctgttgcgggccccacaggcatctccccagctcacaatgcccgtcaggtaccagagaccctccacagggcaggagagtgggcccccagagtcaccctggcaggcgtccttgcccccctccacatagccagcacacaccatgtcctcttggacaaagtgcggctcctcaggcttggcgtcgatgttgtacaggca

SEQ ID NO: 158033 - DNA, 1000 bp, Homo Sapiens
ttttttttttttttttcataataaaattcattctttattgagtgcatggtggcccaggtgctattccatgtatgtcataggtgtgaaaccttaaatctttccaacagccactgccttatggagactgtatcatccttatcttcatcttacaggtgagaaatctgcagtgaagaaaggtacatcccaaggggacaccgacagtaagcagcggagctgggattccagacacgtggctgggcctctgcaggaagaaatcaaacgtgtggaagggttggggagaggagatgcctagaagggattttcctgtattctcttagtggtgggggtaagaccgaggacccaagtcctcactcatcacgtcctccccagtgatgcaaggatggagctggggtaaaaccagggagaatcaggaccctcacgtcgctgcgtttattaagcatcagggtcagagctgggcaggagaggaggggaggcaaggtctaggtgagagacgttctggaaccagccagtggggtggtaggtcgggaggtagatgtcacatgtcagggtcacttggcctgaatggttttttggatccagttcgtgtatctgcagacgttggtgtagactcctggcttctcctttgatccacaggggatgttaccccatgacacaaggcctcggaggtggtctccacataccagcggacccccagaatcaccctggcaggaatccttcccgtacttctcatccccagcacacaacatgttctgggtgatctggccagggtaggcatgctcacactcctcacgggacaccaggtggatgtatgcacactggatggtgtcagggaaatcaccatctgctgtcttgccccagcccaggatgtggcagctggtggtgttggctgagcagtccctctccaggggaaggggctggatgagttcagagagtttggctgggcgtgccaggcgcaacagcatgatgtcctggtcatggctggcggcatcatagtcagggt

SEQ ID NO: 158034 - DNA, 1000 bp, Homo Sapiens
ttttttttttttttttttttttttttttttcaatgtgtaagaagtactttaatagctcaaactcagagtcatcgtgctcccaattccaaagagattcctaaaagaggcaacttcggccgtttgagaagccagcgctcacccacccggggtctctgtgcattgacctttgggtgctgacttggagaaaagcacaaacacgaccagtcccatcctggctcccgtggggcttcttctatctacgcattgtatcgactgcattagttggactaagatgatgactcagttaaaggaggagacaaatgctgactgtctaagcaagaatggcccaagctggcaagaaaaagcacactgcatacataggatacagaagggcagagcttctgcctgcggatctgcaacattacatttgttttgcctgcaaactatcaagaaggattctgttggccagggagtctccactgaacaaacaaaatggcagtcaaaagtcttgagtgtcctattccagcagcccagagtcctcatccgtcatccacgggagagtctttgagggaaacatgaagtccagctcatgcctctgcctatgggtcaatttcttcgggaatcactgtgatcatgatatcttcattacccctgcggaccaccatgttcagggtgctttcccttttaatgacgtcgctgacatcattggcggagaccacggactgtccattgatgctgattatgacgtcgttttccttgagaccaccagcttctgctggggtatcaggaattacttcaattatatacgctcctgagatcacgtctgggaagtcccggtgccggtccttcagctctttggctttgctggacgtgagtgacatcattcggataccaatatacttcttcttggtgatggcttttcctttggcctgtcggtcatgggactccgtgaggaactttttaatcttatcagatgggattgcaaaggagattccagctgtcactttcaaagtgttaattc

SEQ ID NO: 158035 - DNA, 1000 bp, Homo Sapiens
tcacgacaacaggtaacctttagtcagaactcaccacccactgtgttaagccttacatgacaatcaccatgaagatttacatacacatgttatatcatagtctcctcacaacatgtctaagaggtaggcacgtcattgttcccattttgcagatgaggaaactgaggttcagagagggcacttggcttgcccaaagtcacacagcagggagtggcagaggaagtcaggttgggtgaccccagtaactgctctcagaggctgggtgatgaccggcttcctggcttctctggaataaacctttgccaccacttcctgcatttcagcttcagtacaggcagagaatggggataggtgggggaatgaggtgagaggggagatgtttagaggtgtggagggcggcagaggtttgaacagtgcagacaaggggagagttcagccgactggggaggaagaggatggacgatggagcctctgggcatctggatcagcaggagcataacatctggatcagctggagcgtagcatctggatcagttggagcgtatgactttattgatccaggacatgtatttgcagatctgggtgtagacagctggatgctgggcagagccacaggggtaaacaccccacgagaggatgccttggagggtctcgtcacagaccagggggcctccagagtcactctggcaagggtcctggccccggtccagtccagcacatatcatgttgttggtgaccacgccagggtagaagacctcacactctttagggctcaggatagtgatgctggagcaggtcaggcccttgttgtacttcactctccgggcggccgtggtgccccagccagcaacctggcactggtctccgggctgagcacagcggtagggaagctgcagggcccggacgcggggccccagcactacgggcctggccagcttcagcaacatgagatcgtgctcatccgttcgccttggcaggatggggcctgagccctggtggt

SEQ ID NO: 158036 - DNA, 1000 bp, Homo Sapiens
ttttttttttttttttttttttttttttttggaacatgtgcaaataactttattaccataaacctatgaatactcatgaatagtttcacaattctggggcattcagatagacagcaaaagcaaatatttcaatttttgtttataaaagtatactttaccaattgctgaagaaaaaaagttcataaatctggagaataaaacattcaaagaatcagcacattttccaataaaaaattatgaaaacattatccttttgattatttagtccaataacattgagtttttttcttctttgtcttgaatttcatgaaggtatcagcctgttctttttctcagtgtctcagttgttgcagtcatgactgagactctgtcaggtctccatggcagggaccagagactttgactgtcatggatttggagatttccttgccagtggctgagttatgaacagagcaagcatagagcccgctatgatttctagtaatttgggggataaagagcttttgtcctgattgctgaaacttcccattaattgtccaaaaatactctgccggtgggttagattccgtgaagcaggacaagtcgaggttttctcctgaacggtaataggtgaatgaagggtaaattctggggaggtctggaccatagaggacatttaggatgactgggttactgcggaggccaccatatcggtcctgtatttcacattgatagggtcctgtttcatttctcgtgacactgggtagaatgagtatcctgttttcaatgggtcgctttaccccgggactgacggggaggctctgaccgtttagccaccaaatgtaggtgtagttctcactcttaggttcacaggtgaaggctaagacatccttattctccctggggtttaagttgttgatggtgatgtaggggatgggcagcttcgggaggagattcagggtgactgggtcactgcgactggcactcactgggttccgtatttcacattcatagggtcctg

SEQ ID NO: 158037 - DNA, 1000 bp, Homo Sapiens
ttttttttttttttttttttttttttttttttttttttttttttttttttattttaaaattttctttatttcagaactgcctttatgtacagacatcatttaaaaaatgcacatacaatggagattttccaaggaacaggagctggaaataaaatttaaggacattattagaactgaaattgtcccagagaagttctgaggatcaggattccttaaatgtccttgataacctcttcaagttcttcctttgtgaacatgtggaaattctggccaggctgcactgtggctagctcaatgtttgttgcattcagcttctcctccattacttgtttgaggatgatgagtgaagacttgatggcttctttcaaagtcatagacttgtggtaaacttcttgcaaggagctctgggcaccctctgaagcagagccaattgctcgagcatcacactgtacaaaggtcccagatgggtccatatgaaacagctggggtcctttctcatcaactcctccaaataataatgctactccaaagggacgagacatggcacctggatctgcatcttcttctccaaactgcaaagccagattggacacagcttgggtcacactctccactgtcattgtctcattgtaggtgaaccagtggttctgtgtctccactctggctttatcaattaaagtcttagcatcagcaattagcccactcatggcacaacctatgtgagcatcaatctctacaattttctcaatgctgctgggctccatcagtggggaagtaattctcttctccacagctaggcacacaccctctgatgtctggatcccaatggctgtagaaccaagcttgatagcctcaatggcatattccacttgaaataatcttccttcgggagaaaaagtattcacgcccctgtcgtactcagaccgggtaagaaacatggcgagggtaggaggaggcagcggctacgcggggattctgaggaccaacacgactccaccgg

SEQ ID NO: 158038 - DNA, 925 bp, Homo Sapiens
cattttgaagaatttatttactttacaaaagaagagtctatctttgaactagccaagttcaaagttaaaagtagggcaacttcagttctggataatgcatctgtatttcattcaaagccactgatcatgtgggcaatatcccagttggtctctgtagacaatggtccctctatttcaacacctttttcggtgacagtggcgatttgaaaccggttgtaagaacgggcatctcggtagtacagcactcgcatgcagcgttctactaagtcgcgggcctcggtctggcttagcactggctgcttctccagaacttctcgcagcagaggctgagccaagtatgcaccataaccagtggccagcgaaggggcttcataggctacaccaagcatgtccacataaccgaggaagctctctccatcagcatagcctccgatgaccatggtgttccacaaagggttcatcttcgagcgccggctgtacatggccctggtcagccatgaatgaatagctctaggactatagctgtgtccatctcccagaagctcctcatcaatcaccatctggccgagaacttgcttcaaatactggaaatcagcgtagtcgccagaggcacccagcatggtactgttgttgactcgcataatgcgagagatgttgcggaaacgagccaaggagccgtaggatcccagcatgtctgcggcaatcaccactccgccctcgaacttaacgccgaggactgaggtcccggtcaccatggggttctgggtccgcgtgattggacctctgtaaagtgcagacgccggatccatgaaggaatcgggagtggacggaatgcggtaaaactgtcctggggccggaccccccgcccaaagtccggaccgcgaccccaaaaacgcttccatcttagtcacggtagcagaaaaaa

SEQ ID NO: 158039 - DNA, 849 bp, Homo Sapiens
tttttttttttttttttttttttttctctgtgacaaactttattaaattttgcatcagtacagggcatctcttattgcatactagaatcccaggattcaggcgggtggtaaagtggcaacggcgaatttgggtatctggtctcccaaaagtacttgccgctctacccctgactctgcaatggctgccaggcggatcactcctccactggagccatcccgctccatggccaaagcgagagcattggcagtgaattgcagacactcttccttggtcatgccttcccggtaggtagcatcaacatagccatagatgtaggagctcccggagcctccaatggcaaaggactgccttaccatcataccccccataggcactgagtacacctgccctccttcttgagggtcccagcctgcgatgatgattcccgccatcaggtcttcccggtatcggtaacacatctccttaaagaggctggctgctgtgtggaccagtggaggctcattcagttcaatgctgtggaaaccgagctggtaggtgacagcatcagctactgcctgggtatcagcagctgagcctgagcgacagcagaaaatgcggtcgtgaataggtgtcagcttgtcagtcactcgattggcgatgtaggacccagtggttgttctggagtccgcccccagaaccacgcccccgtcaaactgcacggccatgatagtggtcccagtggaaacttctcggctttcccagtctggagtgaacgcctccggcccccaagccggtgctggcccggctccccgagcagctagtaaggtagccgccatctttctcctccggtactgcctcaaagcaactgt

SEQ ID NO: 158040 - DNA, 1000 bp, Homo Sapiens
tttttttttttttttttttttttttttttttgtttaactgtattttctgggtttattcccccttgttccaagctctaagcctcagcttactccacctccatagcctgcacagtttcctccactagctccagggttagtggcttcactgtctgggtcaggacagctgtggttccaggcacaaagtggtagcggccagacctcttcacgggctctgtgggtgagctcagtgtccgcagcagcttggcgccagtctttgtgatcacacatgcgtccacattgcccccggagcccaggtcacccaagatcccggcggtgacggcttccaccagcagcccctgagcagcctccagcgtcatgttcggctggaaccggtcttctagcaccgccagggccgcgtcctgaccagagcccagggctgtgaagggcagacggctgtaggagccatggggatgcacgccgtagagctgcggtccagtcaggtctacgccgcccacgatcagcgatgcacccacgtggccctggtacctgaagagcgtctggcgcaggatgcgagtgaccgtggccacgcggggctcgcggcccgtagataacgcgtgtagctccatcttggacgccaccatccgtgtggtcatctcggcgtccgcggctactccagccccacagcagtagattttgggggcgatgaagtggatcttctcgcagctcttgtccgccacgaccgaatcgttagtggctcgcgtatcggcgcccagaatgaccccgtcttggaacaccaggcccgcgatggtggtcccggtcttgcgtgcgtgagggaccttgagccccgggaggacgcgttccaatgatgcatttctttggcagttctcgaaggagaagccccctcggggctccagggctggcttcagcatcttggggcaggcagaggggattaggggtcgcgggcggatgagtcggccagacaagcggggccagtgagcagctaaaaagtcctctgctaggc

SEQ ID NO: 158041 - DNA, 1000 bp, Homo Sapiens
ttgtgaaagagcacgctttattgggaagcagactgctgcacagtgaccaacaggccacccaatgggcacttacacatcgtactccaaaagacacaggatgttttgctaataaaaatcagtgggaacagggattcctctgggcaactcccccaacctcatccctttcagggattgagaaatctcccaaccattttcctgatgacagccatggttcattagagatacagcccctcaggggtgccttcctgtttcttataaagaacattttctttagattttttgaagtcttcatttgttactttcattctacgttctcttaaggccatcagaccagcttctgtacagattgccttgatgtcagcaccagagaggtcatctttagccatgatcaggtcgtccagggttacatcatcagccagcgtcatcctgcttgtgtgaatctgaaagatgcgcttcttcgtcttttcatcaggcagggggaactcaatcttcctgtcaatgcggcctggtctgataagtgctggatccaaagtttctattcggtttgtggccatgataactttcacatctcccctagaatcaaatccatccaactggttcagcagttccaacattgttcgctgaatttctctctcaccaccagaattggagtcatatctttttgtcccaatggcgtcaatttcatcaataaacacgatggacggtgcatgttcttcagcaactcggaacaattcccgtacgagtttgggcccatcacctaggtacttctgaataagttcagagccaaccactctcaagaaagtggctgaggtttggtttgctactgctttggctaacaaggttttacctgtgccaggtggaccatagagaatgacccccttaggaggctttatacccatctcttcataatattcaggatgggtgagaggaagctccacagattccttaatttcctgaatttggttgtccaaccccccaatatctgcataggtctcctggg

SEQ ID NO: 158042 - DNA, 1000 bp, Homo Sapiens
tttttttttttttttttttaacattagaaatcaccttttattatattacaagaagagatatggaaaaaagcatacaattttgaagccatttatttgtttatgaattggttattaacaagtctatataaggttaggattccaatttaaagttttcacttgaaagccttcagggttcagttgtatgtcatgtaacgaggagtagcactgaatttggcataagacttaatgaccttatttacagcttccaagaaatccttctcggtagcaatttttcgccgtgctctgatggcaaacataccagcctctgtgcagacgcttctaatctcagcaccagtgctatttggacacagtcgtgctaacagttcaaatctgatatctctttcaacactcattgaacgagcgtgaatcttaaatatgtgggtccgaccctctagatcgggcaagctaaattcaatttttctatccaatctccctggcctcatcagtgctggatccaaagtatcaggtctgttagtggccatcagcactttaatattgcctcgaggatcaaaaccatcaagctgattgatcagttccaacattgttctctgcacttcattgtcacctccagcaccatcatcaaaacgagcccctccaatagcatcaatttcatcaaagaagataaggcaggctttttttgttctggccatttcaaagagttcacgaaccattcgagccccctcaccgacgtatttctgtacaagctcagatccaataactcgaatgaagcacgcatcagtccgattagcaactgcccgcgcacagagtgtcttgcctgtaccgggtggaccaaagagcagcacgcccttgggaggctcaatgccaaggttcacaaacctctctggatgaagtaatggggtttcaactacttctcgcagtttctcaatctgttccttacagccaccaacatcactgtatgtgacatcaggtttctcttccacctgcatcatggtaactgttg

SEQ ID NO: 158043 - DNA, 1000 bp, Homo Sapiens
ttttttttttttttttttaaactgggcaagctgtgtttattatagtctgagactttataaaagagactggaaaatacgtggaattagaacatgcaatttaaacagcaaacattggtaaacacagcatgtctgtggctaccagaggggaatacgtatggctgtcaggtcaaatagagtttgagggaattcgcccaataggaaggctttggaattgagtgtgagaacctgtggctggaagcacacagcaataccaatcccatcaaggcaagctggtatctgtatccaaccacagcaaaaccagtcccaaggaacacagggcttgcctggcagaactgccaaaacagaaagcggtgtgcaagaactggggaaatgaacactgataccatggagaggaaaaaataattcaaagtattggcaggaatccctgagaaccattttaccatcttaaaagagacaaaaaataaaagggaggaagaataagcattttcaagaggtctgatctactcgttcctatccatacctcagcggtttacaaaatagcgctgatctcagggcatagccaggaggttcaattataaaaagtcaaactagcagtgggctgggcgcagtggctcacgcctgtgatcccagcactttaggaggccaaggcaggaggactgcttgagcccaggagttcgagaccaacctggtcaacacagggagaccctgtctctacaaaaaataaattagctatgcatggtggtgcacgcctgtggtcccagatacttgggcggctgaggcagtgcccacagcgtcaaggcttcagtgaaccttgatcacgacactgcactccagcctgggtgacaaagcaagaccttgtctccagaaaacaaaaacaaaaacacacaaaaacggaggggttcttactagcgaagtgaaaggagcttgctgccctctggtgggttcctaaagaggaagctgacaggacaccacgctgggccacctgggaagcctccaggct

SEQ ID NO: 158044 - DNA, 829 bp, Homo Sapiens
tccacacaacatatagatcatttattttccttctagtcccgggttcagtacatagatggcttttcttcaccctttgggttgacaattttctccaggttgctgctgatgatatgataaagctcagcatagaaggccctcaggtccagcaccatggccctgagctccccataggctgcctcatctcgctcatgcaccaaggcccggtaatccattacatgagtctccttggaggccttggccacagcatccccacgttctgagaagtacttggaaatggttgtctggaaagcttccactttggtcttgacggcattcaccctctccagcaccttctcctggattgctaccccaaaatcatttccatcttcaatcttggggatcaggtgttggatccatgtaatcaccagaatgcatttctctttgagagtccagacttctggcttaaccagggcaagcagggacaggactttctcattcccagggagaaatccacacttatggacttctttcttctcctgcttatctgtttccatctcatcatccttgggtggagggtctgggatggggatgtccagtggggcccggagggaagtcaagtcagccacattgagggagtcctcttgcaagagctgattcaggtatatgattttctgtggcaagaatctgtagaggaattcctcagcctcctggaaaagattctgtctgaagacctccacctgtttgcgggcttccccgctcaggcgcaccccacacggcttggccatgctgcttcagtcgctagatctctggtctcccggctagtcgcccgggctttcgctttcactcccca

SEQ ID NO: 158045 - DNA, 1000 bp, Homo Sapiens
tttttttttttttttttttttttttttttttttttttttttttttttttttttttttttaaggcggaacggagcgaggatacagaagatttattcgaagtccaggtacagactggccaacctgcctctacagcgtccacagcgaacacagggctagacaagggaggagtttctcaaacggttttaatcggttctctccgcgtcacaagccatcgggtaaggcaacggaatgtgcgtggggtcccctgtggctccgcggtcacaatactgagcctggaattgctgttagcaaaatatacatttgtgtcaccataaaaaaccgcgccgccgcccctcgggtctcacaacaggtataaaaaattataaatatttacacccttgttacacgcttttacggaaaggggatcctaggagagcccccgggacaggacgcgggggcggtagaaagagcacagagaagacaggaggagcgcccgccttccgggtcccagcatcagaggcaggcaaaacacagaaatgagactttggtccaaaatttgaaggaagaaaaaaccctgaagtttgagagcaagttttctaggcgactgcaggtgaaggcgtggtgtaaggcaaccggaggcgatgccagaggcggcgacacgcccgccccttccctgaagctcaggggctctaagataggaccggggctccctgtgcctgacccactgggcggccccgcctgctctctggaaactgggtcctgcctgtgacttaattacaaggaataaaataaaagtaacagcatacaaggtaataccacaaggaagtttagattacactcataccattgtatcatcttgctataaaaagttacttaaaactatttcttttgcatataaatgaaaaaagattagaatatttggtcaactggaaatattgctaggcacagacgtctgcaactgcaaagtatataatacagagattatgtcgaccagctccgcagctggagcagcggggagccc

SEQ ID NO: 158046 - DNA, 1000 bp, Homo Sapiens
ttttttttttttttttttcagcatcaccttgatttattttcctagtatttttttcctcagatggaaaaataatttcatcaagaaaacaaatgcttctgccaaagtgaaagaattttatgtcttaatgcttttctttaaaaaaaaaaaaagtcaacattgaactaggacatgctctgcttccccacccccattttgctgactacattttaaaaaatctattggcagaaaacaagatattttcttcaaatagagtgattatgttttattgctattttgtttagtatatatttttctcaattgggaaaaaaatctaggtgaaaaaaattacctaacaagagaagtagtttacatagtcataacatttaaattgctgcccaaaaaatgtaaaaaaaatttaatgtaaaatgtcacataatttcaaaaaacttacctcaattgtctatcatttatcatgtactataagtcaacttcctaaataagattacagtcctttattataagcccctactggtactatagtatacatttaaaaaacgctactacaaaaattttcttttctttttgtttttgcttattgtgtacttagctatagataatttttgaatacaaagcctacggtacatataaatgcaatagttaactgatcctgtttgctgatgtcctttttatgttccacaggtgacatcttttaatccagcatcttctcctgtttcttgccttcctttttcttcttcttagattctgcttgaggtttgggcttggtcagtttgccacagggcttggagatggtgacagtcttctggcattcggcattgtgcagggctcgcttcagacttccagttctggtcttcagggctgtgttcaggtcacattctccccaggcctggaactggtatttgcactccgcgccaaattgcttcttccagttgcaggggatcttacatctctgggtcttcatggtttgcttgcactcagctccagtccgagtgccctcccgtgt

SEQ ID NO: 158047 - DNA, 1000 bp, Homo Sapiens
ttttttaaggtttgcatataatcatactatttattgaagtagaaagaaactgaaaagtgtttacttcaaaacttcagtctagtaaactgaaattatgaatcataaaatgctgcttcttacttttgcttcctaaatcataatctaccccaactacattgaaattttcatgaaaaataaacatatcaataatgggatttacagaaaccaatttctttacaaagtcttgaccaactgtttacctgactatcccagtaaggagaattttccttcaaagatatttttaggaaaaacttttgtttctttgtttgcttttctttttaaaatggggaaaactgtaaaacataaaagaaatgcaatatatagtagaaattgcttattccaacttctaactgctcatatcaaacttctttttagaaaaatggaaaatgtatccagtacaattcaatcgacatacaatttttttttttagtaacagatttttcaaattgagctcttaaaaagtacagttaactacaaaagattaaatagatacttataaaatatatttaccctgaaatgcttaagaataaaagtgttgatgcccatgtcaatagtacattatacattacacacattatttaaatgtcattttctttccaataacgtagataaaaccacaatatttattgcttatatcaagtgcaggttaaaatccagatagcctccaaaaacaaatcctgtgataaaggatatctcaatgttggtcaggtgaaatactgtgtttgacatgtatgaatacagttgcaaaatttaccagtttttaacaaacatgaatgtctttattttagacagccatttacagtttggggttcagaggaacctgcagtcaagagtcctgagatgttgggcttgtgactgtaaatatcacttatctggttgatgtctattctactgcaccgtttttgggatatgaggcgtttgctgcagacaaacccctatgattaatgtagcactgtcagtt

SEQ ID NO: 158048 - DNA, 1000 bp, Homo Sapiens
ttttttttttttttttttttcagagctgactcctgatgtttacttctttttgctttcatgatacaggtgtataacagagatgatgagaattttgagccttgtttgtggcaattctaccaaaaggggattgcatggcaccaccacaaaatttcataaattaccctgaacatactcagttatttactatttgttcggagcaaagcatgaaacagtcttcaaatacatgagttatagattttgaaagagtgacattttttaaaacataaagtgcaacagtgctgaagttttcaaagtttttttgagttcttcattttttttttgtaaaatgccatttcctgcgagcagcattatggcacagtgaacataagggaaagcagttttccaacacatatcccagatctttttgctttcttatttatttgttgatgttgttaagggtttaacaaagccttcttcataaactttcaaaatagcttcacatacaaatctgtattgactaggtgtttggatcatcatggctcgctgatctctcattgttcttacaatatctagtggataaactggctgattgcattcaatgagacacatggctgtttccatagtaataagaaccccagttcttccgattccagcactgcaatggacaacaacgggttcttccttgccagccctcttgtttcgtacatgacaaacaaaatctagaaagtcactcgaatcatcagggactccatggtcaggccaggctatgtactggatctgagtgagtggacgactttcatttttctcttggttaaatagggtcatcttcctgaagatataggcagtgtttccttcttcagagtggcaggtaacttggtagcatccataagatgaactgcctgtgggttctggccaatattggtgacatttaactctgccacgttcaacttgtgtggtcaacattacaaccatagaggagccttgttcccaagtcatctgccaaaaatctgtacaagtgtgt

SEQ ID NO: 158049 - DNA, 1000 bp, Homo Sapiens
tttttttttttttttttttttttttttttttttttttttttttttttttttttttttttttttttttttttttttcacagtgatcccagggctttatttacaagaggagaagggttggccctgcctggggcctggctgggctatatacagggtcagggagaggtgggggggatgcagccatttaaattacaaaagaatggggcactcctaggttcaggttgtgagtctgtccatcgcgaaatgcttccacagggtcagggctgaggcatggccacctgaggacagcaccgctcacttcctcttgagggaacccttgctcttctccttgtctgctgaccgctgcttcttcactttctcctccctcttgttcttagtgtgcaggttctcatacacatcctccttgtgtttggacgaggtgcgggaggccttggcatgggcattcttcatggctgggggataggtgatgttcccgtactccgactcctggcccttctgcgactgcaggacctccagcttcttcttagtggtttcaatgaactgggcgatggccacgtagatgaacttgtactgcgcctccgtctgcaccatgcccgagcgctgcgcccgcaccatctggatggtcttctggatgtcaatgtcacagtccaggcccttggtggagatgttctccatgagcatgtcgatgacaatgatggtgcctgtgcggccgatgccggcgctgcagtgcacgatgatgggccctgcgtgaggcagactttcctgccgctggttgatctggtccaggaagctgaggacacccccaggctcactggggaccccatggtcgggccagctcaggtactggtaatgccagatctcccgaatcaggtctccattgtccagcggggagacctgtaaggtacggagtttgtattcggttgtgtcatgctccccgcagttggtcacagagtagggcccataagcacgctgcatgcccacctcgggccagtatgggacgcat

SEQ ID NO: 158050 - DNA, 1000 bp, Homo Sapiens
ttttttttttttttttttggttttgatcatgtcggtatatttatatgtaaatacaaaactgtatcactgtaagatattgaatatgaacattacaattattttctgaatcagactcagtccattgatattaaatacaaaatgaaatgattgtaaaaaataataatatacacattcaaagagcttattacagtataaaattattgaggtctgatcagctgccaacctcatcttctgtcacaggggaaggtttaggagttcctgggattttttgggaatgtggagtgctgaggactcttgatttatccctagcacataaggatgagtgggctgggagcaggcagggacaggttgggtgggtaggggacaaacagtgattgcaggggaccacctcactcagccagggggtgaagctttttattgacacagaacccacccagtttgagggtctagcaggctagcaggcaggaagagatgggcatctcggtagacagggccaagctgcataaaggaaccatccagcaaaagaaaaagggccccagctcatcctcccagggaggtattttcttagtggttttttctttctcatacctgggctccccctccttccttctaagattcgtaccgattgcatttggctctggctgctcagtgagttcatctctaccctccgcctcccatccctgggatagtgaaagcaaagagagagtatggaatcacagtggaggtctgttccccaaattggccaagtaaatgtagaaaaatcatcggataagggaaatccatgctgagctaacccagtgtcaccacaaactaatacattcttggctccaacaggtggcaactggaaggagataagtcattacttaaggaaggggccctgtggcaggaacatggaggagatgtgtgtgtgtcctcttccaccactctgtagcctgacaagaggagacatgatcaccaacccaagctagtccaggataaatagtagggtccaagaagcaag

SEQ ID NO: 158051 - DNA, 1000 bp, Homo Sapiens
ttttttttttttttttttcatataagaaaatggttttattcctaatttttagttcccatacagtttacaaatacacttttactctgataatacagctttgcaactagcaaagcagttgcgctaacacccataaatataggtggggagacaattaacatccactaatgtttctctacataaactattcttttaatgtcatttttttaagaacagttgcaaatagactacataatatacgtgggcaaaaaggcaattaagtgaatctcttgaaacactaaatgtataataaacagcatattatcaacatttacatgattcacatcaaaatgatgacatcctaaaacgtattccttttaaaggatagatttatcaataaaatattacatatcttttaatactctggtacaatacttcatatactgcaggaaaattaattgtaggtctagtcatcagcttaatcagggatccttttcccattagcttttattaataaaagaatcacaattaggtcataaataaacaggcaaattattaattacatgatttgaggcttaggatgaaaacttgtcaaaattagtttgatatacagcaaagttatacaacacactaaaaccaactgttcaatagtttttgccttgtgtgaactgcccatagtgaaaaaggaacaaatttttagtgatgaaagatacaataaactatattttggaacttttcaagaggaagaaggaaaaaagatttcaacaaaattaagggcaaatacagatcctaacaaaggcatcctgacatcagggaggccatgtgcttgctatgtgtgaaagttgatcccccaacaacatacagaaaacaaaagctgcactggctttgtagttatgtctatagtctaagtttcccttatggatactaagctacaacaaaacacttgacaattgcaaacctttccacatccccctgaattaaaaataactcaagatgttattagttcttaaaatccccaataaaa

SEQ ID NO: 158052 - DNA, 1000 bp, Homo Sapiens
tttttttttttttgtaagaaatctgattattcaaatttattaccatcaagaattatgcaatgatgctgtagtttttcttaacaaatagaaaacagactgtgtacaacagtgaactctacagcactagcatccacaaggtaaaaatgaatgtttcatcatccaacattaccaaccctggaatgttgatcttgacttagcctagctaggtttggggacgtcggcaccacgtccctcagctaaaacagctatgcacccttccccgcccccacttacctatctagatagcgctgcccagaggaagaggcgctctccctgcccctcagcaagctgggataataaggactgattagagtaccattgatagaagtccagtagtcttgccacattggtttatgagggcatcttggagtggaaaagagcgattatcgggggctttgaaaacagctgcaaaccagggaggaaaatcatctggcccctgctctgaggacagacatgtgctaccaggcccactggcctggacctgaaaggccagccacgcccccgcttggccctgaggtgcatggggtgtggcacacaccctaacctgtgctattcaccttggccacacagccagaccccacagcctacaaacaccacaccatactgcaatgctggggaccaaagccaggctctgtgggcccaggtcagccagcagctccctcgggaaccccaggcacacggagttgcttcccctcttgagggtttgaagcagaagccaagggctgactctttttttttttttttttgggttttttgttttttttgttttttatttttgtggttttttgtttttgttttaacctttgcaaacacgatggtgatgaggaatgccttgccaggctctcccagacacatctgtggttctgggctgtgaatgttaaacacacactgggatagacgaccagggatgagtgttccctatcttctccccgcccaccactgtcaatgtggcctaaaaaaa

SEQ ID NO: 158053 - DNA, 1000 bp, Homo Sapiens
ttttttttttttttcacaaaaatttcttttaatgaataaataatttgatgaaatcaaaaatatttacaatataaacacatggaaaagctctgggtccgtgaatctgatcgttgagttttgcattttgtgaactgagtcctcccccaagcttttcccttggaaacaatacaaatctgacagaaacgacgactcatacaacatatctttgttcattacacatttatctgttagtcctggaaagctacataagcatatattatgcaacatgttaaagtacaaatattacctaaaataatatattaccataatgccagatagcattctccacagaacaaaaacatacactcagctgtaacaataacgagggtcacgggccacaaaataataccccaaaggtacaaattccttcataagaatatagttgtgctcttcagtttaccagctgtctacgctgctctagaaagccggtggcaaggagtacgggatttggcaactgtggctgtgtgtgtgtttctgtcaggcagcagcattactgggattgggcagtgcaagcaattttagaaacactttcttgggctcttaaaaagagccaattatgcaaagcaaaataagcatattgagaagtcttcatctcttttgcacaaataccatggaacgtcttggctttgtggtatgaaagggattgtttgcagagctgtttacaccatcagccagaattcaagtattccagggccacctcgtagcagaacttgtactgatccaggaggtcgaccatgttgggcttgttgttcctcagtgtcttcacagcgtgaaagacatccacggttctctggtgccggagcatctcacatacgatgctgatggcgcagaacgtcccactgcggcctcccccgttcaagcagtgcacaacggtcgggccttccccgccattgtattcctcttgccacttgtccacctggcgaatgagcttcaagaaggagcgcttagacactggtgtgtc

SEQ ID NO: 158054 - DNA, 1000 bp, Homo Sapiens
tttttttttttttttttttgcagctgcacagacaacacactaactttattcacactggtacaaaagtagttttttctagaaatgttctcttgcgccagaaggagagaggttgagcagcgcatggtgggagggtggtgggaggaggctgggcgtgaggccagggagggcagagcgcccaagtgtgagtcagaggcaggcccggggctgagaagcagggggagccgggtgtggcgaccctccaccccattcttccatactggagcatagggggacacacacagatgttcagggaactcccagaaccccaggagagctacaggagagccaggccagggaatgtaggcaggagaaggctctgggtagaattgctacccatgtcctttcctctcctcctggctgcagcacccccatgggatgccctgggctctgggatgccccaggctctggcatgcgaggctgggcaggcgtgccccttctggctttcccttcctgactcttctaggaagggctgagcatgcccaagaggtggctggtggggcagtgaggagtgggtacacagagatgctcacacaggcaaagagggacagaggctgggctgcccgccaaggggccccagggtctcactggggcagggccttgaggatggcattcacttcctccgccacggctgtcagggcaaattcaaactggtccttagagcggacaaggccaggccgctggtcacggacatgctccagggtggcagcgatgtcaatctccttcactccttttgccatgcggttcaggaccatgtcgatgaggatgtaggtgccggtcctccccgcaccatcactgcagtgcacgatgatggggcaggagcggccccggtagcacttgttcaccttcctgcggaagtccagcaggggccgcgtggaggccggtgtgccctctgccggccagctgaggaagtggaactgcgtgagcgtgcgcgtctcctgggtctgcacgttcttcaggtaga

SEQ ID NO: 158055 - DNA, 1000 bp, Homo Sapiens
tttttttttttttattatcaaaaagtctgtattaattcaattcttaattcatgaagccacccatacaatcacaaatttatctaacacatttaattttggaacaaaggagcaactcctttaaagtttgagagtcgcataaatatttcatatacagcttaaacctaagctttgtaacgattatttttgagcagcagaaaaggaaggctagagaaatgctagagatgtccttactagtgacacattcttgctgaagaacaagttctctggaagtgaaactcaaataggagagaacaagagatacaggtaggtatcagttctgctagggtcttcagagagaccgagggccccaaaacagtgctactcaaagatgatctgcagacttgtgctggtcagtgaacacctttttttttttttcaccagtctgtgacatggtgaattagaaattgagagtgtttaaaaactttttagcatttcaatgttgctgtgatatccaagtacatgatcaatggacttaacctacagaacagtctggccagtttgggtgctgtcaaacttgccgggtcggcagcacacagtgtgaactccatacctgtcatcggcaataggaatgcatattgataagtgaaggactggaaaacaaaaaacctggtcctttaccatacatagtttgagaaagactgccctagagtaccataactccaccacaagtcctggaataattccaaaagtttttggaacaaagtgtgacctgaggtcaacctgctcacattcaatcaaaatcaaaataaaaatgagtgccttgggaacaaagataaagtggactagggcatctatttagattcctggagtaagccctggctaggctagcagaagtgagaatctgtaaaagaaaactggtaggacagaaggcacaaggttcatagagaagggctcttttgttcttccctcctcctctctatccttgtccagtttttggctggagctttaaggagaaaatagt

SEQ ID NO: 158056 - DNA, 1000 bp, Homo Sapiens; identical to SEQ ID NO: 157578

SEQ ID NO: 158057 - DNA, 1000 bp, Homo Sapiens
attggctgggagccccgcgcagcactgccaccaggctttattcggttgtaccaaagagatttccgtcagccatgtacaaacagaacagagtccataaggagagtggcgaagctgccgggaaggaaggcaagcgtgttttcctggagccaggcgctgggtggcaggacaccgtgttggggggtgcccagtgggaggtggtgtggtctacacccagagaactaaaggggtgaccgcagtcactgctccctaaagccccctgctctgcacctcccgccacagctgggtgggcagtcagtgtggcctctgtccaggtggtgggggcatccggggaccaggtgggggcgcacgcaggagcggtgcgtttcaggctgcaggtgccgtctgcccgtctcacttccggcctctccactgtgctggacaccctctctgagcagctttgctggaaagagcggagagcctgctgcaaaccaggcaccttgtaggcaggcaaggaggcagagtcctcaccagcccttccagagccaggccagttagagagggcggccctgcagagtcctatgtccaaacgcagaaggcgcagaagcagagcagggggagggccggccagggcctctgccaggttagaagtcaccatcgcgctcccccaggggctgtgccgcctgctgcctggcagcctccaggaaggccagctccttggcttccttcttctggtttcgcgcctcatactccaacctgttggtgatgatccgctggacgatgaggtctgtggtgaggttgctgccactgtcaatctgacggaagatgccccttctcttgggctcctggtatgggtcggagccatccctgtcagggataatttctgtcttgccgtgacacaccaggtccaccttgaagtgacttaggagctctgctgtgaccgcgtacggggctccaatcaccacttctgacacgtaccggcaggccagcacgctcagagtccgttcatgcagattcatgatgg

SEQ ID NO: 158058 - DNA, 1000 bp, Homo Sapiens
gcccttggaaattgacactttatttttaagctctattacatataatttccctccccattcccagagatactcaactattatagattattagctaacaaaacaaaaaccagtgaatgttgtaaaaatgttcaagttcagtaagaagctatgttttctagagacaattctagagttcaatttccattgactttgttagattcattggatagagaaatctttagatctgaaggttccacgttccagatgttttgggcatattctttaattgttcggtcactggagaatttccccgaggcagctatgtttttgagtaccattgtgttccaggcctttggattcatgtacagctgactcactttatcttgacacttgacataggcttcgtagtctgcaaagactttaaacctgtcatgataaaatagcatgttgatgatatctttgaagaggtcaggctgcttgggagaaaaaaagccattgtcaatttgatcaatgaccagcttcagctctggaagtgcctcatagtattcttttgcctcgtaccctttcttgtccaaagcagccacatcatctatcctcatgccaaagatgaacaggttctcttccccagcttcttctgccatttccacattggccccatccatggtcccgatagttagggccccatttagcatgaacttcatattgcctgtccccgaggcttcggtgcctgcagtggaaatctgctctgacagatctgtggctggaatgactttttcagcaagagatactctgtagttctccaagaagatgactttcaacttgcttccaaccatagggtcattgttcaccacatctgccactgaagtgatcagctttatgatcattttggccatgtgatatcctggggcagctttaccaccaatgataactgtccttggcacgaataacttcttagggtctttcttaatgcggttgtacatcgtgatcacatgcagacagttcaagagctgtcgcttgtact

SEQ ID NO: 158059 - DNA, 1000 bp, Homo Sapiens
ttttttttttttttttttagtagagacggggtttcaccttgttagccaggatggtctcgatctcctgacctcatgatccacccgcctcggcctcccaaagtgctgggattacaggcgtgagccaccgcgcccggccaatccttttctcttaagtgtgtttctgactcagcctttgctccttcagcatcattagagagtctgagctctctgaagattagctcttcctgtcgccacagcaactgcccaggccctgtgggcatccgtggtaacaggcgcagggctttgagagcccaagcttgacttgtagtgagagaaagccccgcagggagcccgataggaaacaagcacgttgtgctttgagaagttgtctttaacaggattagctatgcaggcgagcctcactttacgcaattggcatgcccctgaagaatgtgtgcgtgtcaaattttggtaaatggaggaactctcattttaaaggcagaaaagagactgttctctaagtccctgtagtgaatccccttcgtaaaacagagtcttcttttgtaaagtgattctgcacccgtgtagtgacctgttatgttagtctagtgctgagtatctattactgggaccatctgcagagaaccccaggggcaggcaaagaatagcagcaactcatcttgctctgagtgtgggcagtgtgtaacagggagagtgggctgagagcggacagtgtgtaacagggagaagcagactgggtgtggggccacaatgaggggaggtcaggaaggtgggccttgcctagcatgagcagttctgctgcagcagcggtggggtgtccgagagacgcgtgttcttggaggagcccagcatcgacgggtctgtgtccagcgaatcagacatcttgtcacaaatggcatccaccaggcgctcaaaggcctgccttacactgatgttctcctttgcactggcttcaaagaaatcaaacccaagctgctctgcaaggagctggcccttctca

SEQ ID NO: 158060 - DNA, 1000 bp, Homo Sapiens
tgtattgaaaatattttataatcaattctctagaatcctagccatccagtacaggaaaaaattatattggaacacttccgtatttttaaacaatgaaaaaaaatttgactagaggatggcataagaaatttacaaatacaaacttaggcttcctcacatttcccacagagcaactaaacgagaaaaagatttcaagaaatgacagtatacctcgaatgcaaaattccaaagtcaaatagctacttacattaagagatttaccaaaacagtttgtaaattaaacattaacagcaaaaggcacaaaaagcctatttcttttatggtgtctcggctgattctttaagaagcagataaacaaggtactgtatggaacgatcaaaacttggcctgagctgtcttctgataattaatcctagtatatccagatttgttgtccaaggacacaagctccatgccaccttctgctgtcactttccaagaagaggctgttttttttttttgtttccagttttcactatgatctgagtagacagagaatgtcataaaataaatgagagtattccattatccgatcagaaatgccacctcttttcccaactcattgctctgacttgaaagatgaacgtatatatgaattctcattttattctcctgagaaattatgcatgatccattataaaacatacaggtaatacaaagtccaaaagcctgtcatgtttatggcagtggtgtgatctcagctcacggcaaccttcacttcccgggttcaagcaattctcatgcctcagcctcccaagtagctgggaccacaggcgtgcgccaccatgcctggctattttttgtatttttagtatagacggggtttcgccatgacggtcaggctggtctcaatctcctggcctcaagtgatctgcccacctcggcctcccaaagtgctgggattataggcatgagccaccatacccagccagtttcatttattttcataataggttatgag

SEQ ID NO: 158061 - DNA, 1000 bp, Homo Sapiens
acaatagcgataaatagaatttattttatacaactgttaccgacatccacacggccacaggggcttccaaaatgggtattggggccaggaggctggcctttggcgtgacgcctaaaaagtgtgaccagacacacaagggctcccagcagctgtgccgggctgccccctccatggcggtcgggggaggcaaggcctggactctcggccagctgagactcttggcctggagggcccagcatgggatggcaggggttaagctgggtgctggctgaggagccaggtaggtccccatcccccatgagggggttacttgtctgtcatgtgtaggcagtggacagggcatcggcagacctgtggcagaactggagggtccaggaggcatactgggcacagccggctccctgcccctcagcccacctggggctccagggacctcaagaagcagggtagggtgataggaggtccctgggaagaaaatcctaccttctaaggcaggtgcatgtaatcacagtcttcagtgacctctgaaataatcttgtccatttgtagcagacatgcccagagagggagagtgacttgcccagagtcacacagcagaacccaaattggaaaccaggacccggctcccaacccagtgctcactcccccacatatcacatcctccttgtgctgcctccaggggctaagctctccacacggagctgtctcaaactctctctcccaccttgttccctctgagtccagagggatgctcaggggtgatggaggcccagggagggggcaagccagacccccagtcctgcttccactgagcaatccctgccccagcgcagacccccaggctgggggtggggacgatgccagcagcttccctgatcccaggtctggacggctctgccctgcagagacagcccagatgggtgggccatggggagggtggggaggcagggggcagcccacgggctggtgttggtcttcagggcagaggtctcgtctgcct

SEQ ID NO: 158062 - DNA, 1000 bp, Homo Sapiens
ttttttttttttttttttgcctggttgacaaattttctttacttatgcttgtgtccacatgattgtaaaaaagcaaacagtgccaatggccactttggtaaaaacacacagtgttcaaacctatgaaggattacatcctttggacaggttttattcccaggatatcaaaccccttggccatgacagcagctactgcttcacatagcagcatacgccacatgttcaccttcaatatttttccagtctgtctatctttctccacacagtagcagctatcatagaactctgtgaaagcagttgccagctcatatatataatcacagagagtgtggagaaataagtcatctaaaatcttttgcagaatctcagggaaccgtaaaatgcaccggcctagtttccattccttctcatgatccaaaagaatcttggtttctcgagcagctttttggagcatttcttcatcaatattggccagacgtgcaatagacctgattctagtgaaggcatacaacaagtaagcagctgtatttcctctgtcatctagcattttgtcaaaggagaagatgtagtcattcaaccggttatgggaaaggtcagcatatttgatgcagccatacgcaacggatgtctgagcagcattcaattcctctgcagttaagaccttgtctctttctttttccttcaacttgtccatggatcgttttagtccttctcccagaagatccatgaggcgcactgtttcacccgaacgtgttttaaactttttcttgtcttcccctagcaccacaccaaatccagcatggaagactcgagttactttagggtcataccaaccaatcatttgagcagcagcaaatattgtctggaagtgcacagattgtccattgtccacaacatagataatcatatctgctttttcctcaaatagtctttgtttaatagcagccaggtcagatgtatcataggtataacctccatctgattttactatggttaatgg

SEQ ID NO: 158063 - DNA, 734 bp, Homo Sapiens
ttttttttttttttttttttttttttttttttttttttttttttttttttttttttttttttgggagagcagctttattatcatggctggggatagaacgggttcctctccctgggggctggggtcttccactggttaccacccgcagcggtcctggaggcaccacgcagctcagtgctggcttagctgcggggcagggccttggagaaggcgaactgtccagggaagtagaagctgtgggggtcctcaccagcccgctgcaccctgaggcactgggtctcctggtgctcctcagcctcccgcagaacttgggtctctatggggcagtggaccaaccggcccagaactttgtcctcagagcccagtttgatgcaggccaggcatttccgtttcctcccattgggcctgactttgcactcgggtttcttccagtccctcttccggcagcttgtctgctgcagcttaaattccagcctcacaaatattccagctgggaagggcgtgtccacggcgctctccacactggtctcctggaaggcccactgcacgggcgggtgcttgtgaaattcctccagggccacctgcaggccccggcgctgggcttccgtgagctcggcgacgcccacgcccaccgcacccagccacagggccagagggatcagcagccgtcgcatgcttccgtgtcaccctggccgtccttccctgcgcctggaggtctcccctgaccgtcccgc

SEQ ID NO: 158064 - DNA, 1000 bp, Homo Sapiens
tttttttttttttgcaagatatcccttggttttattttaacttaacctttgtgaatacttcacaaaaatacacatacagaagtaaataaaactatacagttgaactaaatatccagcagatacaacaagtagtcagaagttcaaagatggataagttaggcagctgatgaggttgtctgcataatcaaaggggtagcacaaataatgaacaaataacttttaacaaaagcattctagttaacataaaagaaattggtagtctataaaatggttgaatgggtaacatgcattgatcaatacaacaaccaataatatttactgaattcaaactatttacttgtaaacatttaacaaagcattatgagatctaaatacagtctttgacaatttcaacaaaataagtcgtatgtttaaaaaataaagctgatgagcaatagatcattctatatattttctttcaacagttccagcaagagaaatagcagagtattttttaaaagtatacagcaaagattgttcctattataatgacaaactctggaaactgtaaatacaaataatcattgaacagtcaaatggtcatattcctaatcaggaagtagttacagtaagaacagtctgcaatccagttatacacaattgtcaataagaatgtgtttcttgtcagttgatttcatagttctttctctaagagacagcaaaactttggcaactgggtgtactgaaaatatattttgaaagttcgagatatcaagatacagtcatagcatttcgttttgtgaaaggtggtctgtacaccaaggctcagaggttgttaaagattgattccatgtggaaatagtgcaaatatcctgcacagatagcttacaaggttgctggcatagttattcaccagcagaatcttggattttgtttgcatagctcacacatcactggaatgtggaaaagtgtgctattttttggcaagagcaaaggagacattaaactgaagtgaattacc

SEQ ID NO: 158065 - DNA, 1000 bp, Homo Sapiens
ttttttttttgtattttcaaaattgtattaggtatcactacataaagtaaaaactcttaagttagagtgcaaaatgaaagcgccttattgttttaaaggtgcaaaagcaaaatatcacaaacattttcaatagaaaactgatttataaatccatttacagaagatcaaaaaaatcaatgtttagtaccaactttaactataaataactaagaaggaaaaaactgtccttcatccttctgtttctgtttcaacgtctatgtcttctgctccttgccttttggagaaaatattgcgttgtaaggctgacgtctttttggacgaggacaaggatcaagatcttccttaatataacctctttccatacaagtctgagtggaaggaaaaccaacttcccaaaaattctctggtgtgttgggtggaatgtagcggaatcggtgtcttgagcaggaagccaatttcttttctctttcttctgctggcatatctgcataataaatttcacattccttacacgtgtgcccaagcagttttcttctctcctcttttttccgaaccacctcaatatgaggaaaattttgcaagctagtctctctttcatcacctttaaaatacggctccacaaacgctttctgcttgactttgtcttgtttatcaccatgagtgtgtagtttctttgtggcagtagacaattcctcctcttcatctgctgcttgggagaaactgtctgccaaacaggattcatactcttcatgtgttgtccgatcaaacatatcttccaagctatcattcatttttctttcttcatttgaacttttttctcccttctgctcttgcttcttcatttttaagagaacggtttcactaaccaatgtacagtccatgtccactgtctctcctcctaattttgactgactgccatcctttgtatctattacagtaacatccattttatactgagaaaggtctgctcccggatctatactccactggatattttcaa

SEQ ID NO: 158066 - DNA, 1000 bp, Homo Sapiens
ttttttttttttttttttttttaagttgaaaaaccatttatttcaccggaaagaaaaaaagtgatccaactctataggtctagcctttggaccaaaaagagaccctggagcagtgagactctcaccaaggtcattcccaaatccaacagccgcaggaggcaggaggcagggaggagacagcacagcccccaccacagtttctgcacacaatgaggcctgctgggagaagagaacatgaatgggaagctacagaagtattgaaggacagaagaacaggaaaatgggcaggagaggaaaggaaaggaaaggaagagaaggtctgaacttagcaaggtaaattaaggtccacggttcctgagggactgaacgcacagagccgagaacgtcccggagatggggtaccacgaagggtgtattctcatgcacaaccgcagctcggaatttcagcccacacacatcccacctcaagctttaaaaggctgagtaccgcgcccgatcggcatactgctcccgctcataccgggccatgtcgtacagagaattccgcgcggctgctgaagcttgggacaactcactctcatgcccgtaaccgtagccctctccaacagtggggactggggctgtagcgcgacgcagggggctccgatcccgcccgtaatatgaagtggaagctgcagtaacagcagcagcggctgctgctgcagcagcagctgtggcagcagctcctgaggtcggcaacaggtgtctatcgtagggatcgagagaggtggaggtgaggtgactggccatggctgtattctggacttgtggcagctgggacagggtctgctctgcgtaattatacacggaggcagctgcagctgcactgcctcataggaccgggcagcacggcagcgcttgtagtaggcatcgagcgctccgtacgcgttgttgtaatacaatgaatccccatagctcatggtgtaaggcgtacgcactgctccgtattgctcattatatt

SEQ ID NO: 158067 - DNA, 1000 bp, Homo Sapiens
tttacaaaggacatttcatttttaatcactcaaaaatgaaaaaggtttggacaatgtcaaattccactcaccataatgctatagttatacattaaatataattatcctctatacatatgcaaaaatataaagttctatttcatacaataaaaccctttatagaaaccattttaaaattaagcagaacttctcaacattaatatgtgaggtctaagtccttctaaaggtttctttaaaggtttttaaacaaaatgctaaacctaaaaacattgtcctgtcagttcccaaattaaatctacttagaacaaaaacaaaaaatttatagctcggtcacatactacttaaataatattgttcaggcatctctaaaatcctccatgttttcaagtctggaaatagaactcaaatattccacaatacagtactaaacagatggagtatttaggaaagactttgttgtcatatggcacaatattaatattttgttgctcaatacgtttggaaaaatatcagattttgttttttcctaaaagagccaaaattataattctacattaagataattctgactgtggttaagacttaagagtgtaaaatacaacatcaatattttatcacaaaagtaaagctggtaacaaattataaaaggagccagtactctactgagacaggctcggagattaaagctcatcatgatagaaatagtcatcatggagctgtctgccataatctgtggcttcactggtgagaaacaagtccgggttttccagaatctcttcttcagagagctttttgtcaccattcaaatccatttcatcaattagatgaagcgcctcctcttgtgcaatgccctgattattaggtactacccaaggtaacagctcttggggatcaagcctgccatcgttatctttgtcataatcattcacgaatctgtctttctcaacaagtatccattctggatcttcatttgcagttggatcccacctgtaatcaccaa

SEQ ID NO: 158068 - DNA, 1000 bp, Homo Sapiens
ttttttttgtgttccagatccttttggggcaagggagtggggaacaggcactggccatgttgttacactgagatcaaacctgacagccgtttttaaaggtttaaccccaatcccaagtgctgaaaaaccagaggctgagggagatgtgtaagcttccacctcagtgttttactgagaccagcattggggcatatgaggcacaaggaatccagctctgttccctagaagccatccacaaggttttccttgtagacgtcatcactgtagacaatctgggtcctcttgtcccggtggcaacccttagggctgttctggacagcgagggagccccagacagacttgccagtagcggcatccagcatgggctgttttcgggctatgttgactttgagctgtacagactccacctgggtcccgttgagctcagcaacggcctgatctgctgactccatcttttcataggtgacgaaggcacagtttctgggtgggtccatggagaggtcaatgatgtttccaaaaggagagaaggccccacggagaagggtgggtgtcatgtcttctccatatacatagagagtattccctttcctaggggctcgccgttcagggaatgaatccgacctgcggaaaggaccctctcggtctcggtctcgatcccgctcccgatccctgtcccgttcccggtctcgatctcgatcccgatcccgatccctgtcccgctctctgtctctgtctcgatcccggtctcgatcccgctcccgatctcggtctctgtcccggttcctctcatggctgcggtcccggctgcggcttcggggaggggaggctgaggagtgggcaccactgcgttcttcatagccccagtcaaagcttcgagggggaccatcaccagcccctgggccctctgcctcttctccatctggtcctagttctcgaagtcgatcactagaagacacaaagctctcatacagagatttcctctggggacgtctggatgact

SEQ ID NO: 158069 - DNA, 1000 bp, Homo Sapiens
ttttttttttgaaggcatgagcttttgtcactttattgttaaccaatgaatattatccaaaattagagatgtaattgtaacttaattgtacaacacaaaattatgctaatggtaaaagcctactgggatttaccaaatactcattagtgtatttttacattgactatatgaacatgtgctcgcgactgctaataagttataattggtttaatctctaagaaatccatattgcaaatggttcttgtttagaaaaattcacacagccttaaaaatggattaaatccattttaatcctaatctacaaatagatcataaacagcaaaatataactgataatttttcaatactgtatcaaactgatgtagctatggtagtgcacataattcaaaatgaggaaaattaacaaaaatccaatgaaagttcaggtttttatctattatgcaattgctttaaagtgaacatttatgtctcaaaacatgaatagtagggtccaccatccattcctttgatgtactgcaagtaggaatattctcttccataggattctgaagcatgtgcacaaccatggtacaacagtcacttcaaggttaaccagctatgttttgtcctacaaagttcaaaaaatatattaaacgcaacctttcttttacataatgtctgcccagattaatccttttaaagtcagcaaaatcaaaaaagcacaagagatattttcagacacaacttgaatctactgtgcatgaaaatgtttaataaaatggcaattttaatagataaatgtaaatttgactgtgtaataccaaatggaaagtagctgaaccacacagagaaaacaaggctttacgtatctccaaatttagctgttttacaataaacaaagtattagaacatgtgaatattagaacctccttctaactggaaagatttcttcagtaagctataaccgaaattaatataaactaaaattataatttctaaaataagaattaacaaaccaaat

SEQ ID NO: 158070 - DNA, 1000 bp, Homo Sapiens
ttaacttttaaaacaaaatgatttccagtttaaaaaacaatgcactgaccacataattccttttttattttacacagttatacaaatattctaaatacacattttgtgttcaagatgatggcaaataagattaactgtacagtacataaggaaagaaaatattttaagtatatttagaagcaatagaaatgtctatacaaaacaagcaaatggaataaaattttttatttttaaagtattgcaacaggcccacaggtttgtaacaaaaatgtctttgcacagttcctcacaatgccccattaatagctaaagcaagacagcattttttaaaaaataatgtttcaaaatgctacacgtggtactactgtttgcacagtttgatcaaaataacgatctactttgagtcaagcaaaacctagaggaaatataccaaacaacttgaaaatcatttgtataaaaatcattgcacattattttactcgtttgaaaagtaaaaaagtgtatttacaaaatattttgcagtcaaaattataaagtgaatggatatctcgaagtaacacgtcttgatacagacagttcaaggaaaacacacaaatgctttttctttaagaggttttcagtgctccttccactgggaagtaaacatgatctactcaaatgaatttacaagatggtacacatactggagcaaatccaacacctgcattataaaacaatgtttaaaaggtgacagaatgaggaatttgtacattgtaagaagtgagctattcagagatcaacaagtacattttaattcggttagcatagaagtcttcatagtcttcagataacagacagtgaacatccttgactcgatgaaagttaaaaagcaccatgcacaacagtttagtggtaagcactgaaaaaaatagcacctgtaatactgtgatattgacaatttaaaactggtctaataactgccggagatatggtgccttggacaattctctatttactcggg

SEQ ID NO: 158071 - DNA, 1000 bp, Homo Sapiens
tttttttttttttttttttttttgccaacaaacactgcaaggctttattagctaaaatgtcaacccacacacagatcagagaccgccctcagcttctctgcgcctttccgccccgtcaccgcatcaatggggtggaggccaaactcaaacacttgcggggcacagacgtcccagaagcaaacatgcaagtcacgggagtttatttatttaatttttttccccagatggagactctgtcgcccaggctggagtgcaatggtgtgatcttggctcactgcaacctccacctcctgggttcaagcgattctcctgccacagcctcccgagtagctgggattacaggtgcccgccaccacacccagctaatttttatatttttagtaaagacagggtttccccatgttggccaggctggtcttgaacttctgacctcaggtgatccacctgcctcggcctcccaaagtgttgggattacaggcgtgagctaccgtgcctggccagccactggagtttaaaggacagtcatgttggctccagcctaaggcggcattttcccccatcagaaagccgcggctcctgtacctcagaatagggcacctgtaagtcagtcagtgaagtctctgctctaactggccaccggggccattgtcttctgacacagccttgccaggaggcctgccatctgcaaaagagagttcactccttccgctattttcatgtgagtgtatccaatttccttgataaactccagtttcaggtattctgccatttggaaagttttacacactcgaaagatgttgccaatgatatcttctggtgagtagcccagatgccacaagtgagcaagaatcttgtaggcttcgtcaatgttggcattcacacagtgctggatcatctcctttaccagcagtgggtggggctcgtcacagaccttgaacacgttctcactgttaatgaagccaaatcctgagaaggtggactgcaggttgttcagcgcctg

SEQ ID NO: 158072 - DNA, 1000 bp, Homo Sapiens
tgaagtaagaacaaaagctttactcgtgctcggcaacagcaaagcaggaggcagaggggagatgacggcccctgtcccatttccctccatggaaggcaccaggcggggaggtgggtctgctgggatgggcaggtcagcggaacaaaaggctcctgttgtttatgggcccaggcacagtggggcaggagcacgacccagaaagtagtcctgagccacaagtcagagcggagaaaacatctctgtggtcccagtcaagaggcctccgaatgaggcgcctggactgggagcaaagctctggtcgagaacatgaccttcccgggcctgagtcccactgtggtgcccggccgtgcacccagcctgcggcagagagggcggcgtcccccacaaagcctgccaggctgagcccttgcaatggccgtggctgggccaggaccttggcctggagcctgctccttgacacccagccagcctagcacccgccttcagcaacaggtaatggagcccggatggcagctccctcccaggtgcgcaagtgctggggtggaagcctgttcccgtgggatcaaccttggggctgggtcggggggaggggcactgcggccctggccatcagcctggctgtcttcgttctcccaaaacacccatcaccgcagcccaccaggggctgggagagggggggctgcaggctagccagagggtctgccaggtgcctgcatctcactggtgtggccgtggcacctgagggagcccactgagcccatagggggctctggttccccgcgcctgggacagagccaggcagccctgggtcggggtggttggtgtcaccgagaggtcggggcgccctgtttctgcctgggacaccagtccgtgtctgggtacagaagacaatggatagacttaaaccgtgtggggtcttgatgcaggctgaagcctccagccacgttcaccacgttatgtgggttctcaggacccccatggctcaaggtaacctgctgga

SEQ ID NO: 158073 - DNA, 1000 bp, Homo Sapiens
ttagttttgggattttatcatatgcttaatttgccaacttgaaaacagcagcatacagaatgtgtaccaatgaataaatgaatacctgtacgtcattcacaaatccaggaagatacccaggttttggcattatcttttggagattgtgggagaagaatgtttttccagaaagccctgtttttctttttttgagacaaggtctcactgtatcactaaggctagaatgcagtggtgcgatcgtagctcctgggctcaagcaattctcccacctcagcctcccaagtagctgggactacaggtgtgagccaagatgtctggctttttgtgtgtgtggaaatgaagtctcactatgttgcccaggctggcagaaagccctttcttcaaacattaactacccaaagtttttgaaggactttccattacctgtagtgctgaggccagtgtactcaggggaaggattgctaacaggggaagagggaggtggcacttccacagatgtggcagattttgctggagaaaacgatggcactggtgaaggggttggtgcggcagcctctgtcaagatgatctcttctcggacttctgcagtgcttccttctcccttcatggctcgcatgagctcattggcccgctcctgacagtgcagagattctaacaggtagagcacgtagtcatcaaacattaagtgaattaggtgaaaagacccgaagctgggggcgctgtgcaaggtcatgtcccggatcacccttgtgccgaaacaggaccacatcaagaggaactgctgggccactttcttcaaggacccttgtctcttggcagccaccttcacaacacagcggtcaaccatggtatccagccactcaatgtaggactcgatgggagactgctcctccaagagatggtcaaactcctgatataattgggtgatgagtttccggtgctcatcgcgagagtcttccatggtgtaaagggtttgcttggtgatgctgttcaggtccac

SEQ ID NO: 158074 - DNA, 1000 bp, Homo Sapiens
tttttttttttttttttttttcatatttgacttttgcttttattttataagaatataacatgctgaaacaggaaaatggggattgcaaacatcattcatatctaggaaaccagctccatttgtcacaataaataaatatttaaacagtgaggagttcctgacaggctccaagaggttcccagcacattcagaggtagagtctggtagagaaagggagacagtcaggctgaaacccctgctgagattctccagtagaggcaaactgaaattacaataataaataacaacagcaccaacaataacaaaaacaatgttatgacaatcacagaaaaccaatgatacaatacacttaaataatctcctggaggagctcatggtacagagagaacagtgttgattatcctgggccacaaaggggctgccctgggtagttcacttccccagcctgggctctgccgcaggagttcccatcaggaaatgtttgttcagtgatgccctgaggtgacaggcaggttctgattatccccagtcctgcccttcgaagcagcctctccccccagcttctgcactctaagggtgccatggtcctgggccacctctgcccactccagtgttcatctcacgtctgcaggaaagaaacacaaggctccccttctatctcggggcatctctttttgcctgttctcataccacaaaaaacactggctggatttcagcaggactctcagggaccgccaagagacttatttcctaggatccttttctgccttgttccacactgcggggcatgagagctggaaaagccactccccgaggcctccacactttgttctcctgggccctgcctccaagagacagcacagaactcagagagggcacatccaggaagaggccccagggcgggcctgctcacaggtggaccctgctgcaacgcagggtcaggggccacctgcagggggccacccagagcactgagctggattcaagtgagcctcctttc

SEQ ID NO: 158075 - DNA, 1000 bp, Homo Sapiens
tttttttgcaggtttcaaagaggaaaaaagcacgtttgttgttggtaggcgggcgtgaatgggagggttcttcaccttctccaacacctcgtatagatgggacgttgcagggcaatagaaaaggcagcagatgggggcgtgttttgccccactctgtacaatatagaagaatctcatatagatactttgtataaaagccacgtgtcctcatttgtgtcctcttattggctggctgggctgggggtactgggggacaaagaagctggggtgatagaccaggacacagggataccccatggtccccttcctctggctgtcccctggtggggtcactttggatccttggtgggagcatagcacagctccagtggccgggacaccttccagaatttctcattcaccagctccagggtcagcgagccattcaacgtcgtgaacgccccgcctccaggtgcgatgtagatggtgtactgcttttcactgacgccctccaggctgggcaaagcaggctcctcaggaccgtcacctcctccggcacccccaccctccccgccacacccatcaggtcctccggtgtcagaggcgccccctccaggccctcctggctcccctgcttcctgctgttgcctccgctcgagggcaatgcgcagggccaagtacttggagaggtggtccactgtggcattcccagttgtcttcacatacctcgtctggcagtattctcccttctccacgagcagggggtggggccggaacacgagctcaatttctccacctggctctggggggctgggggccccaggagggcttggggggcccagcgttccccctcccagagtccctccccggtcaccagagtcttccgaaccggcacccccacccaccccaccagtgccgcctccccctgtccctacactgctcccccctgcgccccctccacggggtcgcttgggagcagggcctggggcagagtcaggggcggagtctgagctcacatctt

SEQ ID NO: 158076 - DNA, 1000 bp, Homo Sapiens
tttttttttttttttttttttttttttttttttttttttttttcaggatcagtaaataacaatagcttttgcttattttattcaatatatttgaaatgatcattcacaaatttaacctatccttaaaaataggcattacttattttagtataatcccatttgtatacaaaacaaaccctttacatattcacacttaggtaagtgcacagaaaaaagcatgaaagaatatacattattaaattcaaacgctggtaacctttgggagggtaataaagggagatcatttttttattccattctgtatatttgaattttttacaacatgtatttatgggttactgaaattatttttaaaaggcataatagggtccagttaaaccatactttctagccattatttgcatattaatcaagacttctgttatttcaagtagctcttaaagtttgtcaaacagtttctaatttcctcctcaattttgcttgccccagtcatttatttagtaaacactcttcctcactcataattccagtttagtcagaagtacaacttaaagtggctccaggctccaggtaatcctgttcaaaattcaggaactcaagaaatttagatgggtttttggaactacaaaatggtttagataatgtgctctatatccaaactcacaaatgaatatatgtggtaccaggggatactttgtattgccatctggggacttttgcattaatgttgcctttagggaagtggtttataatccttggcctgcccaacagaaaaatctgtggaacttaaaaaaaatacatagatgcttaggcaccatctttaaagatttcgagtctgtagttctaagggaagcaaatattctttagaaatgctttttcctaaatctcaatcagtgattatataaatatatgtgtacaaaaatgacattacctagagaatgactgaatacagaacctcatggaatgcaaaaacaaaaaaagttcagagtaaagttagggg

SEQ ID NO: 158077 - DNA, 1000 bp, Homo Sapiens
tttttttttttttttttttttttttttttaggattcacaaccaaagaatatactgtttattaaaacaaagcaagggaaacaaaaggcttcaaaatcctttccatgtaacatagctttagtcaaaaaaaacaaaatacatgaatgcaggaatgtgtacaggtagaaaaagtacgcactcaccaagcgaagcgcagcattaattgaagtgaaaagtaaagaaacgctttgtagccgctcggatttccttaggggacagcaagtcaatgcttatcagcggtcctcagaagagacaattttgattaatatcagacccatctgactcagtctattaaaccctgaaggaaggatactcttcagatatagaagatatgcctttgattaatcattctaccctattgccattccaagcattaccaactatgtagcacctctagaaagagagagccttcgaattctaggaagacacacttactaaaatccccaggtgctcatgaccgcttctcagctcgccccgctgagaagaacccaagttgtgagcggggatggggggggggtggtcaccactggagaagcaaaaacctagttacataatttacttcatggtctgcagttagggtcagtgacttacgacataattcctgcttgatgataatgaaattgacagaagcctgaaggcagagggagtgactggtcttgcgctagccactggctgactccgtaggcctgacacagtctacaccacaaccacctgagcgtattttcctttgcctaccgatgggttctgagatgcgcacaagggaggaaattgcttagtccaccatcaagagcctctgcactgtgtagctaacatgggatcgtcacacggaggtgggaggaaatcgattccattctgcctatttgcaaacttctgcccgattggcactgctcctctcacatcaatgcacttctcctgatgctcatgaccagccttcggccatactctctgtagtccacgggcttc

SEQ ID NO: 158078 - DNA, 1000 bp, Homo Sapiens
tttttttttttttttttttttcctttaatagactttaatatagctcatttacaatcgtatgaaaatccatcaagatcaatcatgttgcacaatccctaaaggataaaactgagggaagtcatggataattttcacagcttcattgtaaagtccaagatcaaaaggatggctatcttctttaaactggacataagatgtacacaagatggtggccttggcggttactcttccaaccacttccacaattccagagatttcttcatcaaggggttccatcaactcgatggttccattttttccttctccatctgaaagaataaacatttttccggtgggatgaatcttttccagcctccctacgaagcagacaggcttgtcgatgaattgagctagcatgccggcgttgatgcgcgacctgggcaagtccatcatgtccaccatgattatggtccaagactgcggctggcgggaaacccacggacgactgaaactgtgcgccccgcgggtgtctatggggcagatttctcggcaccaatcagcgaagactagcgctccagcttcgccaattaaatgcgcggaaacctaaatcgcaatcgcgctgtctctgaaaggggtggagaaggggctggatgagtccggaagtggagattggctgcttagtgacgcgcggcgtcccggaagttgacagatacagggcgagaggcagtggaggcgggacttggataggggcggaacctgagactacctttctgcgatcacaggattcccggcggtgacttgaccccggaagtggggtgtgaagctccggtgctggtgcggcgggggactgcggggccagcctcaggtacctcgtctcgcgggaggcgccgcaaccttactgtttccccattcttcccgcgaacagagtcaaaagagctaggcgggagtcggcactagctgctgccgcggtgctgtgggtgctgcgtaccagctgttcactgctgtctcgccttccctcttg

SEQ ID NO: 158079 - DNA, 1000 bp, Homo Sapiens
ttttttttttttttttttttttttttttttttttttttttttttttttttttctgagctgcacagtgtatttttctcagcagccaccagaggcacattcaccggtggcgcgtcctggtgggcctccgggtgccgtcaccaggcagcagccgcccctccctcccgccacagtaggtctgtgcggcctgtccggccccgctgcgtggcgcaggcaattctcccaaacggctccactgggcgcctggtgctgggggcggagccagtgaccacgggagggcgggacctcgcccggggcccaggacccctgaacacaagtcctccgagctggaggctactccagaaccacggtgccgcccaccgcctccagggccgccttgatcttctccgcctcagctttggcgacattggctttgatttcctggggcagggactccaccagcttctttgcctggacgaggttgatgccttggatgtagttcttgatttccttgatcagcttcactttgtccacgggcttcgcctcggtcaggcggacggtgaaatgtgtccgttctttcgctatggggatatcttcttccaccgcctcctgggctgctgcagcagggacagccccagacatcacaccacccatcggcacaagcccgacatcctggatcttcaacgttttcttcaggagctcgttgaggtctgagatttccaagagagtgaggctggcgatgtcctggaccagctgctgtatcttgggggggtactccttgggggcgttatccaggggtgcaccagcgagggcctcacacctctgatggccgctgctcctcatatgtcgcacggcacagacacatggcacctgtcgcctggcaaggcggaacgcagcggcccgaagcccaaggcaaggcccccacagggggcgagcggccgccggcagcatcggtccgcgggctggaaggtcacacgcggttccccgggaggaggcgacgctctagccgcctcggccgccgggc

SEQ ID NO: 158080 - DNA, 1000 bp, Homo Sapiens
tttttttttttttttttttttttttttttttaatgttcacagtccctgctttatttccatttgttcacacacgctttaaaaaaaaaaaaaaaaacacatgcactcacacaatacccaaacatcagaattagaagggcataaaacagggggctttataggctgaaaaatatcttagacttcagaacagaataccaatcaaatattgaaaattcctttgttcaaaacacaaagatgttttgtttttaatgggagtttttttaaagttttctttttttaaaaaaaaaaaaaaagaaagttaaggacaaacggcaaactcacactgcctgacgcagggcctggtttctcttccttgaaggccttttacagatgtcagctttcactggcctccatgcacaacctcccactaccacccaatctgcctgccacagcaaagtgcaggcaccctgggccccctggaggatgcgggcaggggctacagggcatccaggatgtggtcgatcttggtgaccagctcctggcgctttcctgagatgagcttctcattctcaatgtacgtgtctttcttgagcttgccagccaccaggcgctcagcctccaccgccgacttcagcaccagctccttgacctgtgcatccagcttctgcatttcgctcactctgtcgcacagatcagagccctctgtcttcagcctggactgcagcagtgcaatctcactggtcaaggccttgtgttcagtctccaggctcttcttgccactgttgagggtggagatgtcccgggattgcttgtacctattgacggtctcgtcaaagtgacggtaaaggcctattctcttgttgaccagggtcaagacctgctctgtgatgcaggctaccttcatcctggcttctgcggctggatccttggtgatggagaagtccagccgaacatagatgataacggtgaagaacaggatgtagaaggccgccaccaccagcaggggctcctgcagcatgagcac

SEQ ID NO: 158081 - DNA, 1000 bp, Homo Sapiens
ttttttttttttttttttttgttcctattgttaccctctttattccaaaacaattacacatttcaacttttcaaaagcaacatctgggtaagttaggaatattcacagcttcttacacagtgtcagagaaagagactatctgagctcaccaggtatctgctgtgtgttggggaaactgaaaaacaagcaaaagtataactacaatctggacttttttcttttttaaataaagttttttttttccatttttcttctcatactgtgaattgttcttgactccttttcttgacattcagttttcagaatttccatctttcttctggaactaatgtgctgttctcttgactgcctgctgggccagcatccgattgccagccagaaacgtcacactgcccaggatggccaggtacttcaaggtctggaacatgttgagctgagtccagtagacatacatgagtcccagcatagcagcatgtcccaggtgaaatataatcgtgctaggagcaaaagtgaagttggagacattggcaccaatccggatccacagagcgaagagcagaagcaacggcgagaggatcagggcagtgaatgtattggacaccacggtggggggcctcttctcaggctcgcggaacaggtgctgaatttcctgttttggagtgaaaaggttctgggacaagacagtcgagggagcttcttcctcagggaacttgatgaccacatcagccacattccagaggattgggttcttcaaagtggcatctccaatgattaagtagagagtgtaggtgccagaggcagagtcaaattcaatctttctttcagaggtatccagttcaaacttgtacacgttcttgttgtctggctcggcaacaaacaccacttcctggccagtcttctggttatggagtcggacaaatgtctggtgaggagtgagttcagcaccagtgttcacatctaccagctggaagaacaaggcgaagttctggtggctgtctgc

SEQ ID NO: 158082 - DNA, 962 bp, Homo Sapiens
ttttttttttttttttttttcacgcttaattcactttatttttcttgtataaaaaccctatgttgtagccacagctggagcctgagtccgctgcacggagactctggtgtgggtcttgacgaggtggtcagtgaactcctgatagggagacttggtgaatacagtctccttccagaggtcgggggtcaggtagctgtaggtcttagaaatggcatcaaaggtggccttggcgaagttgcccagggtggcagtgcagccccgggctgaggtgtagcagtcatcgataccagccatcatgagcagcttcttaggcacaggtgcggagacgatgccagtgcccctgggtgcagggatgaggcgtaccagcacagagccgcagcggcctgtcaccttgcaagggacagtgtggggcttgccgatcttgttcccccagtagcctctgcgcacggggacgatggagagcttggccaggatgatggccccacggatggcggtggccacctccttggagcacttaacacccagaccgacgtggccattgtagtccccgatagcaacaaatgccttgaacctggtgcgctggccggcacgggtctgcttctgcactggcataatcttcaaaacctcatccttgagagaggcccccaggaagaaatcaatgatctctgattccttaataggcagggagaagagatagatctcctccagggacttgatcttcatgtccttgaccaagcggcccaacttggtgacgggcatccactccttatcctcggccttgcctccgcgagctccgcggcctcggccccggccccgtccacggccgcgaccccggccccggatgccactgccgaaacctccgcggaagccaccgcggttccccatcccagggccaccagggcccccgggcccccccgctgcaccggcgtcatccgccatttggtgttttgtcggaaaagaag

SEQ ID NO: 158083 - DNA, 1000 bp, Homo Sapiens
tttttttttttttttttttttttttaacgaactgaatggcgatgtattttaaacgctcatattttgtttctcctctcacacttctccctttgcgtgttccttttccacaattctaatgctactgtccatcaaaccctggcacctgaggccacgatgtttcagagacaatcgtacggagaagccacttcacagtcagtcacaggaaggccagagccggcaacaggacacaacagagcaaggctttaaaaattactcgaaagggaagaaaacccttgaaagcctcaggcccaccctcctgccccgagggaagacacccccattgcggcggtttcctcccaagcctcgccgccgtcacaggagccctctcctctgccatcgtctgtcctggcgtttctcggacgaagctttcacctcaatctctagaagcagaaacgaaacagtcccagccctccccccgccatatccaagtatacatgagggataaaattacatttgtacaaaaatagattttttttttttacctttccagatgctttagacattttctcttatctttactctctttatggatctgtcatcctctctaaagtattagctatgcgtcccagctaaggcattgctaaggattgggaacggctaaagctgtctgctccaaagcatcttaaaatagatgcatctcctgccttgagatattcattcgaacccggatttcaccaaaggagggtccttatgtacttgcttacacgaagcaaatttataggaaaacaggggaaacgtcttgattaaaaataaacacaaaacactggtaaccgctccgcctttcctgggtggcgctggtgtgcggctctctccacacgcgtctctctgtacagcacatacatgtttacaccacacacctgcgtggacgagcaccagatcacgcaccccagctccacgacagggacaccagccgactacccacaggctgcacattccggcagggccctcctgggtgccccac

SEQ ID NO: 158084 - DNA, 1000 bp, Homo Sapiens
gtaggtcaggtaacaaagtccagtctgttttatttttaacccaaatattccaaatatacagaaaattaccagtacaaagttaaacacattcagatttatttacacaatgctaaagaaatttgagttttatttccattttgtggaattttatcatggggtctggctttaatgtgtaactgacgtgggtcactgaaactcgattatcccacctcacatgcaattttctgtcctaagggaatagaaaacttgggtttttagggcacatgcagtaatgatcttaatactgctttacactttcgtgggaaggcagctgtcccacagcctggggaaggaccacatgctcagaaagggaacaagagagagggctgaacaacaggcacatggggaccctgagcatttctgtgcacgaggataaggagagtatgaccaaaaccctcctccctagaggtccaaacacaggaggtgggccaaatcatcagggaacagtcagtcacccgcttgtggctgagggcatgcggaggatgagaactacattaaggatctggggcatagcaataaatcattaccatgtacactatacagtttatatatgtatatatgtacacacacatatatataaaggtacagattagtttatgttattccttataaacaagtacacttaagaatgtactggtgtgaagaaatgcatactgcaagttgtttcgaattaatgttctgactcttgttattataatgcaacctaaccaagaaatcaacatgctcctgctatttcaatgatgcttcatgagggcaaggcctgggctctgctagggcaggatggtgctcctagagctacctgagctggacaaacccatggcagacagaacagaaagtctggcacctgctgactccggccctccctgtcacttcatcacacagcaaatcttaaaactttggttttttcaaagaacatttaagtccatgttcattttcctgcttcagggaagatggtagcaaa

SEQ ID NO: 158085 - DNA, 576 bp, Homo Sapiens
ttggaggaagagactttatttggccccagcccctagccccacagccaagacagtttgacataacaggccccggggccctggttgggtagaggcagggtggcctggcctcctgattagtggcctgtggccgtggccaccatgactgtggccatggccgtggccactgtgatcttggccactgtggtcttagggggtgccctccccgaggcctggcttatggtggtggccagggccctcgtcaccctcgtgcatcttctcgtgggaggcccaggttagcctcgccatcagcatgatgaactcctcgaagctcagctgcttgtctgcatttgtgtccaggtcctccatgatgtgttctatgaccttttcattcttattctccttcttgagaaaattttgcagatcttttcgcaccagctctttgaattccccctggttcagggtgtctgggtgccccagcttcacagagtattggtggaaggtgttgatgatggtctctatgttgcgttccagctgcgacattttgcaagtcatcgtcttgcactctgtcccaaagccgaggagccacacagagtgttt

SEQ ID NO: 158086 - DNA, 1000 bp, Homo Sapiens
tttttttttttttttttttttttttttttttaaagggtatgtgaacggaaacacatttattacaaaaaaaaaaaaccccaaaacgaaaaacaaattcacattgtattgagctacaatatggcagcagattaaaaaaaaatatttttacacagtttaaggtaactcctaacagaacatagccttgttgccacgagacaggacacaggattccaagtactcagtagcggcgagtgaagcgggcatcgctgggcctgctcccccggctctggcctccaaacccgccctgcatgccaccgtgtgggatggggtggccccgggaggccccgcctggggcaaagctgccgcgccctgacattcctcctcggttcatcatgtggccaggcccggagtgaccggacatgcttctctcgccaccttgccacctcttgtgatccctgtccatcatgcccccgtcggccgtgccctgccatgaccggtcatcctctcttcggccatggtccccccagtcacgtctggggggaggaggcagcccccggccctcgctcatcctcttgtcagagccatagcccccccagccatcgcgggagtcccggccgtggcgctctggtcctccatggcgttctgggtaatgctgtccttctcgttctcccatcattgaccttgaaccttctctcctgtccaccgagtggtcggggtagcggccgcggtccctgtggtcaaagtcgtggaagcggtcctggcggttaaagtcagaatggtagcgctcatccagggcggcccgcttggcttccggccaataggcatcatctcgccggtccaggtcgtagggccgccgcaccgcgggccgccgctcctgctcatagcgcagttcctgctggcgcctcagctcctcgcgctcacggtggatgcgctcctgctcgcgcctgcgctcgtgctccacgtgcatgcgttcgcgctccagccgttcccgctccatgcgctcccgctccagccgctggcg

SEQ ID NO: 158087 - DNA, 1000 bp, Homo Sapiens
ttttttttttttttttttacgatacaaacaattttaattgtgtagttacagtcaataaccactcctagtcagaacatttctgcataaagaaaattgtgatacacttataaaaacagccagctgtaacaaaatagctgttttcatagccataaactcataaaaaagaaatacacctttatacagaaattttatacagatgtagctttaaaattgattgtaaaccaaaggaagacacattgcaaacatcaattattttcacattaattgcataattttctaaggtgatctattagttttatttacctaagcttatttgcatgatagtaaaaattgcatacaacaataagagtgaagcttatagtatgaattgcttggataacatagagcactttttataggcaactgtgtaaagcacattttctctatttaaaacttttaagacactttgttttactgcccatcaaaatacatttataaatagaaaagaatcagtatggtaacaagagaagcaatattacatttaacggaaacttccaaaaaattaattacaacatgatgctgcaggatctacaaataaataatgaggactaaattgtgtttcacattttcttttcctttttttaaaaaatcatgtaacaatgagaatgaaaaaaaagtacagtgaacttttatttccaaaataaaaacaaatttgaattacggcagtgccatataatacaaggcatttgttggcatatgtcatctttaaactgcattccacagtctatagttcttttgtaacatacaatagagtaacaaactcttttttttcttttttttttttaaataaggggcaagtttccaaagatcagtgtggagtgctacagaaataattataggagaggaaatcataatcacagaaggtataatgcttgtttgaggctccggaataagaactaaaaaaaaaacaaaaaacactggtttcatgcttacggggtacacactttggtgcatcccgtga

SEQ ID NO: 158088 - DNA, 1000 bp, Homo Sapiens
ttttttttttggcgttagttctctctttatatagactctggttctagaaactcgcctgcagccgctggctggaccagcacacgctgacggggccggactatttacaggcccattgcgggctgtaccttggccacctcccggcacggtgctcagctgtgacgccaaaataagttagggccggccgggcggggcggggcggggacgggggctgtacacacaagtgctgggggctcggggcctcaatactgtcgagggccggggctgtaaacatggccggggcggccctgcccacccctagtggtcggtaacgaccggaagcagagcagccgggcagggctgggaggctcaggcgtccgacaggcagctctggatccggtccacccactgctgggccgagggcacgtcctgggcacagaagttgtaaacgcgacgcgttgtcttcacgtcaaagaaggccttctcgtccacagtcttaggggcacccatagtgggcgtgccaggtgccacagcctccacctccgccaagtcgatgacacccttgcactctgtgtccacacggtggtcgtagtagcgcagctggtgcttggtcttgtccagcacgaaccagcgggccttccaaggcttcatgaaggcccccttcttgtacagagtgccctcgtaggacctgttctcactctctgctgtctggaactggctgtacagggtgctggtgctgcggcgggcagcctgacgggagccggatgtggttgagccactactctggtcgctgtccaggctgaggctcagggtggagcccacgggcccctcctgcaggtacacacccagcgagcgacggtggtggggtgcggtggacacaaggagggagctaggggtgccacggccgtctggccggccctcgaggcgctgtgcagccttcacccggtcccaggtgtccttccagcgctcagcgggttggcccaactctgtctccagcctctgcagctcctccagcaggcgtgag

SEQ ID NO: 158089 - DNA, 1000 bp, Homo Sapiens
ttttttttttttttttttcactgcccctcaagtcagattccacaaggatttattggcaccggacctagcctggtgcccgccccttcaaggaaagacactaacaaggaggagtgccggcaccgcaagagccctcccagaagcgcccagactgggggtcggggaggacgctgccattcgtggccaggaagggaagggagattccggaggagggtgggcacggcgcagggaaaggccgggtggtgggatgggcagggaggcggggtaccggccccgctagaaggggaactcgcagacgtagtagagacgccgctggcagtcgtggtcccaccaggagccgtcgtcagaggcctgcgccacgcagttctcgagcgtgccaccgttgggctggtccgggctgagcggatgcggcgaggcgctgggctgggcgccgagctcggggcggggtgagcgatgccaggcgaagaaggacacgcgctggccgttttcgaagaggtagaggccctcggcgcgccgatcgtgcacgcccagccacacgggccagttgtagggagcgagcgccgcgcgcaggtaccgagtgagcgcctccatctgctggcggtctgccggctgcgccaggctcccgccccgcgccgtgcaccgcgcctgcgccgccgcctgagcttcgaagtcgcgcgagagcaggaagcacttgtggcccaggcgcagccccttcaggcagccctccaagcggccgtgctcgcgctcggcgcgaccctgcgcctcctgcagggcttgcacggcatcgcgggtgtcgcctgccgcgttccgcagctgccgcagcccctgggtcagctcgaccacgcgggtgtccaacgcgtgcagacggacgtgcagctggtgcaggcctgcgtccaggccggccaggcggcccaggatgtaagtgacgatgtcctcaggggtgggagaggggctggggccggaggatggggttggcgttgcttcctcctcctcttcctccccc

SEQ ID NO: 158090 - DNA, 1000 bp, Homo Sapiens
gaatctcatcccaggcaccatttatttccctgtccctttctgggacccctgaacttctcttcccagaagagcaaacgaaccaaatcccaggcccttgtcctgccccacagtgcctcacatcccttcggaagagtccaaggcctggggaggggcatcttcagctgaaggaggacacagggtgtctgctgggaagactggctgtcccacagcagtgcccagccttcgcaggacctctcttggtctctgtccgtgggtgaccctgctccagcctctcagatgatgctggtcctgcaggtgccctggctctgctccaagtggctggccttggtgctgttgctgaaggaggccacggggtgcagtgggaactcacggaggtgccattgctgccacttcttctgaacctccagctgcacctccccattgaggaagcagtagaggacggccaccaccagtccctggaatgagccaagggctagttcaaaaaacagctggatctccatagcgtcctctggggagaaggcgaagacgatgtagtggatgccaaagagggggatcagcaggagagtggacctggccaggcgcttataatggctgacttcatttcctcttgtttcttgggttctaagttttctcatcaggattcttagaatgtttatgaaaaggatgaaattaatcaggatggagaggatcacaggaccacgaatgatccaccagatggatgcgttggcattgatgtcccagcacccaacatcttccagaaagtgtctggcaatagcccacaaagcaacaaaaatggctggagaaccccatccgaatgccacaaatccctggaggtactttctttcagagaagaaggagatggcgaggagtgtgtgaaggtagaggccttccaccagcagccaggagtagttggccatgatgcagtactggaacagcaccatgaccagcttgcagcccgccctgtgcggatcgcagtaggtgacatcatctgaggagaaga

SEQ ID NO: 158091 - DNA, 760 bp, Homo Sapiens
tttttttttttttttgtacaaaaatatatttatttggtgtaatagttacaaaatattcatttccacaataatattttagcaatgcattggaatgttaaaaaaaattctttgtattaatgattcttgcaaagaccctcaaaacatcccaggggtagaactgtggttcaagaggaaaagcaatttccccaagtctctgtatctaaaaaacactagtaccatgaaagataaacttaaaacatcaataacttaaataagaattaacattacttaaggcataatgtttcacatcaacaaacaaaattcattataataaaataaaacagggtgtctggggaaagctaggggaaaataagttagctgcagattcttgggttgtggagtgagtgttcaagtcttcggagtttgggtttgcttgtccaggtggtccatggaatcctgaacccacttctgcttggggtcagcacagatctccttggccacaatggtcttgaagatcacagcttctttgggacacttgctgctggtgattcttctatagctcgcgagcctctgcactgagatcttcctattggtgaagttataacagcaggtgactggggcattgattgcatctggctgagcgagcccttggggaatgaaggtggctgctatgagcagcaggcacagaagggcggcagagactttcatgctggaggcgagagtgcgagcttcagtttgagaattggatgtttctgggttagtctcagcctctcggttcctc

SEQ ID NO: 158092 - DNA, 878 bp, Homo Sapiens
ttgggtgggaagacagaacagctttttattcagttaggtataaatcatatttacaaggaagaggtggggtgtactggggagccgtatcaggtccagggtcctgatgattctccttcaaggggacagtcctgctgcctcctctcatgctccctgggagactctccctcctcggtctctctggacctggcctgctgtgggcagctcagccatgcagggtagagctgggaatgcagatggggtggttaaagcaggagaaagagtgtggcaaggccagcatggggtggctgctccagggcccctgagcatagcctccttcttgcatcttgggttcaggcttcaagcgctggtgaggctggtggggtctccagggctccaggctgctcactgggctatggccctttaggggtctgtgaccgctcagtcctcttgcagcctttggagccctttcctttcttgccagtcttggaggcccccctgtccttcctgcagccctgggctggtttctgtggggatggtgtcttgtccagatgctgcatcagctgctgcacccagagctcctttgggtctgcacatagctctgcctgagagcgcttgcggggcaagaacaggatagctgggatggagcagcctaagcttggttcctgcttccggtagctgcggacaaccttggcgggaatcttcctttggctgtacttgaggcaacagtcctgagcccctccatcactgccttgggtcctggggatgccaaaggccagaaccaggataaggaggctcagagccagtgactgagccatgtctgtggtagagggtgagtaagaggccagagctgagggtgaggtgggcagctgcaagttgggggtctgtgcgtgggctgggat

SEQ ID NO: 158093 - DNA, 1000 bp, Homo Sapiens
tttttttttttttttttttggtttagaaatcttttattgtttctccaaatgacaatacaagtaccaaaaaccaacatgacacacaggaaaaaataaaagtgcaattttaatatagtgaatgtgatacatgtataattcctcataacaaaatggtcaaaacctttaaaagatccacaatagatatctgaaaatcttagcaatgctgtatatattttgaggactaaatgatgaatttatattcaaattgttcaaatatattttcaaaactttgcagagcacagatcattgttaattttgcttttatttaaaaaaccaagagaatacatttctatgtaaattagcaatcaggaatttatctgtttttgggcttcttcatctatctaaagtgtatatttagtgaccagaattatagtcatcctatagtgaaaaaatagcatacaaaatcaaagtttaatgagtaaatcatgacattatgccatactaagaagacatcaaacatctaaaaccataggaagagaatatattagcccttacagaacttaaatttttagaaattctgaataaggaaatatattctgcacagataacggtatgacacacccagtgttctaatacagtacaacttaaatagcatcctagggtaaagagtaacatattccccaagaaaacagaactaaaatatttcctattttatgagaagagtgagtaagaacaacaggatacctccctcaacagcacactaataaaacattatttccatacgaaatccacagccttttcggtaagactttaaggaatgtatgatagaaatacaatagttatcttcaattcaatattcattgaaagactaataaccagtgattctttgctcacaatatggtcaattgccaaagggttcaataacttatcaggtaaaataacagtaaatagtggaaatactatattagtacttcattagctgagctgtaaacttcagggagaagcgtaggctttcccccac

SEQ ID NO: 158094 - DNA, 1000 bp, Homo Sapiens
ttttttttttttttttttgaagtttagaaatcttttaatgtttattcaaaggacaaaataaagactatgaaccaatgagacacatagtaaaaaagtacaattttaatatagtgaatgtaatatatatgtaattactcataacaaaatggtcaaaacctttaaaagatacacaataggcatctaaaaagctcagcaatgctaaatatataatatatattatatataaatatataatatataaatacatacgtttttaccaagaaatgttttatttttcttgcagtagctttgttaattgcacaaaattatgttttgtttttgccatttaaatattatcacagaatcctattctgaaagacaaatgttcattaaaaacaaagcaaaaatagaaattcacaaccattaattacctaggtttgtcatttaaaggtttaaagaaaaaaagggaggagctttcctacaagccttttcacaagtgtcacattttctctttaaaagggaaggatttccaaacaaaggtgaaatagcttaaacagaaatatttgtaaaaataaactttacagcattatcaaggatattaagacaacactgactaaccggtttcattaccgcatcttcccccacccccaaccccagtgtgtcccaccaggactagaacaggctttacattcagacagaaatgcttcaaaatcccagtgaaatgaactgtgctaaaaacccgacaggcatcttccctgccctccccgctgccgctcgtcttctgcaatcctctaacccaggttctactctgtgaaaggggccaaagctgtgagtggggagggaacttgccccagcgtggccaccttatatataattatatattctaccataaatgctggccttcttcaaattatgattttggaaaatctaacccatacagagggataaaaaattgacatcccttggacaacttctccttgtttttttttgttttgttttgtttttaacattccaagctctc

SEQ ID NO: 158095 - DNA, 1000 bp, Homo Sapiens
tttttttttttttttttttttttttttttttttcacaagacttttaaattttattagtaaaatacaaaatggcacagacgttggtgatgagggttggaaaagtctttccaaagtcttcctactctttccaaagtcttcctagatcatccttgtccatgtcctgcttggagaaactaacaaagtccatggaagggggaccaactggccccagcggcttcctcacaaaggaggcagggccccatcacagggtgtcccacccctgaaaggctctcccagcctggaagagccagaacaaagtgcattggacccactcccaccctctctgagctgccagagtgaccccacctgagccaggccctgagcttcctgaatatgctgcgccacacccagcaggggagtgcagaggccaggtgggcagggcagcacagcgtcttgctctctatggaccagagctgggtttccttcctccaagcacccatctgtgaaggagtgttcctagcacctgggtagaacccagcccataagaggcccctcaggtagacggcaagggtcggggacaatccaagggagaggtgagctgccaccagggaccctgaggggccaggccagccggtgcagccccatccaggcatgctcgagccttcagcagccaaaaaagggaacccctgactttatgcctacaacttcccctttcccatgtcccagcccccttcccgggtagcgtccctttcagaaacaaacaggggactcatggaaaacatcatggaaatccctggtcctgtctgcggtggggacaaaggtgaaggagaaggtcttggagggcagagaacagtgttttcaaggagtgagagaggtgggaagggagcccagcctcaggaaagaatctggcgtgtgtggggtgggaccacaagggtcttgtggcctggctgcctgcaggagtctctgaagaagcatcaggaatgtggctgctcctggagcctttcctgggcttcttggacat

SEQ ID NO: 158096 - DNA, 1000 bp, Homo Sapiens
ttttttttttttttttttgcccgaaatgacaagtaccgtttattgtcgttacacaaatgaacccagcctctggcttgggcaccgtcccacggaccagcagatgagcatggtcagccgacccctttccccacccccgagtcatgtgcagtcatacactccaggcagaaagtcgcagtatcgaataccggacacaggttcccttggcttggtggtgcatctctgatccacagactggcccacctctcggagtggccaacggagtcgctgaaacgttgtcaaataagcaagtaagtgcaggagccctgggctgggggcctctggcctctgcagccgggtgggaggaggatgtccaaggtgtctgcggggtaggcctcggctccacacctccgctgtgaccacagcctcaggtcaagctgtgctggggccatccaccttcctttgccatttagaagatggggcttggagcttggcaacacagaaattgacatcagccttataaaaccttggctgaacctaccgacctccaggagaatttcagccaaaacaaaaaagcaaatacacagagggaccctggaaccagaatccctccccatgggaaagacgaaggcacagagattcgagccaagtttcccaacatgttggtgtttgcagaaaagtccggtcacgtcacacacagcacagaggcaagaagcgaaggcagtggcattcacaggactactttatattaaagtttattacatttggaaaatctactgtacagggaaaaacccattggattaagtagagttttgccaaaagcaaaagactatcactctttggaaaatattcctgattccagcccagggcccagggtggggccacaggagctaacggagaacctggccttggatggaggcgctcagagccagctctgcccaagacacccctcgtcaatttccaggaggaagcagcccctggagacggcgccacaggcaggacgggcgtggtctgcaggaggatc

SEQ ID NO: 158097 - DNA, 1000 bp, Homo Sapiens
ttttttttttttttttttttttttttttttagaaagtaccaggttttattatctttttatcaaaaaaaatcagtaacagacaacagtgtgagaggtgcctacagaggaggtgctcactccaacacagcccaaggggaagggcactgggggcagaagaggacccagccagctgggaccctgggttgcagtggtgacgggagctaatggccactggtgcagcaagggagggtggttcccctcaccgcagccactggggtcaggaggagacacgacctgcccaggctaagccaccaggcctcccctctcaggagagggagggtcccagacaacaggccccagctggggcctcatcagccctcccccattcccccccccctacccagggagacaagggtcgtcccagcacagctgaggctgtgactcgttaagccagtttagttctctagaatagtgctgtccaacagatggacatgctctcgctgtcagtacagtagccatgaactacatacagtgacgcctctagaaacgtggttagtgcaactgaggaaggaatttttaatcttatgtgattttaattggcttaactttaaacagccgcatgtggttactgtattggatagcacagccctagagcctgaagaaagcaaaccaaagaacaccagctgggtcccaaacagaaggcagaaagggtagaaccatccacctcaactattccagccccatcagaaggcaccaggaacagggcaagagaaaaaggcaaaaacccacccagccacatgaaaattcactcactcaaccacccagcaacatcaaactggaaacaccacactatttcctgaaaaaaatatatttatctatttttctagaaccaaggaagaataataatatattataagaacacagacacaaatatcccaccatccccttcattatattttgggatctgctaaaaaaaaactatgtttcggcaaaagctattttataagaggaagcagcttca

SEQ ID NO: 158098 - DNA, 1000 bp, Homo Sapiens
tttttttttttttttttttttaaaatgagtatttaattcagtttcagaaaaaaagggtacattacttcgatgagaaagcataaaattaagaggcttttctggaaatccaagaaaaagaaataaccattaatatgttcaatgataattttctagatcttcctcgtgtccaaagctatatattttctcctcaaaagcagctgctccaagaactaactagccctctttatctccctctagctgggacagactaattcccctccacccccacctctcttctttcaataacactgtgttagttgttaatggcctgggctctcaccaatgaaagagaattgtcctttaagccagcaaacccacaggcagtggcaacccaaagcttcacccaacccaccccccaacccggcccatccccagggcagaagccacagagctggcattgtttccactgtctcaggaagaaggagccaaaagctgaccctcagcacaaatcaaagcccaatatggagagagaataactgcttctaggccgagagtaggcaagctgtgggcaaaaaaggggagtttttgcagccacctcatctttagaaacaaggggaaaactagacccttttccactattatggtctaccaggtactctactgctccaaggagatctgaaaatacaaaaggatctaaacaaataaggagaacttttcccaggctggagataagaatgacaaacagaaagatgggtgaatgtaataatgtgtaggaagatgatgctgggagcctcctttcttcacatggctgccagccccatagaggacaacacagtaagaaccaggacaaccactccagactggtatagctggggaatcttcaggccttttcctaggtcccacatcaagtgtcggatcccattccaggtatgatacatgagagggaagacaagtgcaaacttagctgtgtggatcagtgctggccccagacacagggacttcacaagttccaaataagact

SEQ ID NO: 158099 - DNA, 1000 bp, Homo Sapiens
ctttaaatagttcacatttattattgataacaataaaaaaatcttttaaagactatcagtattgtattaccaagtgaggtaatatgtttacaaaacatttacagaatttgatatgcaaataacaaatttaggaaggaaagtgaattaagacataatagagggagaatcaaagaatcattagtactaagaaatgggaaatgacagcagcgttttaaaagagtggcaaggtactaaaggtagaaacacgatgcaaactgcatactcaaaccatagctgccccagaattcccttacaaggggagtgagattggattactcgggaggaaaccctgtaagcatttgtgcggtcatgtgctttgagctcttcaagatgcactacagtctttgggtataaaagaatgccactcccgaatcaacttaaaaagaacagatcttcagcctgggagggggcaggggatggctgcaattcaaacagttctataaacatctctgggcacatgaggactgttgagtgaagcattttcttggcagctgtcagcaaaatcgccatctgagacacagagaaagagaaagagaaagcagggaccaccttcaggcccttgtgatttgggaacaggaagcaccaggtggaagcagcacagacgcgctactaaccctacctacgaaccctacctacgaaccctacctacgaaccctacctactagccctacctactagccctacctactagccctacctactagccctacctactagccctacctactagccctacctactagccctacctactaaccctacctaccagccctacctacgaaccctacctactaaccctacctactagccctacctactagccctacctactaaccctacctactagccctacctactagccctacctactagccctacctactaaccctacctaccagccctacctacgaaccctacctactaaccctacctactagccctacctactagccctacctac

SEQ ID NO: 158100 - DNA, 893 bp, Homo Sapiens
tttttttttttttttcggttaaattcatccaatatttattgaatcgtgaacggttgcaaacgttgccacaatcagaaacccacccatcctgatgcctctcttggcttccccttgagaaggatgcctgaggcgggatgtccccccaaactccaggggacaactggggaagacatggggtatgcaaagagatatgatgaaaccacgggacaggaggagggtggggtggtgtggattccggggaagacacatacacacagactctcccgctcagaggcaaagaccgggggcgtcaatctctgcccccaacagcagccacgagaacatcagggaaagaccaggtgtccacaagacttttcagtccttcctatcatgaagcgtctgctgagaggggctgggtcaaggtccctggactctgccttcagggcgcattagccctgagccaaggcggctttgatggcggccaccaacttcagaaacttgctttctgtgtccacgtagccatcgcctttcttcttagagtgaatcaacttcccggctaccatcacttcaaagaacccggtggcctggggagttccctcgccgcagatgtccaggcggccggggaactcatcttctaacttcttcttgagctgaagatacttggacttgtagcctcaagcgccacaataaacgactcggacggcgagagccatggctcggggctgccacatccgctgaggagcggacgcccgggccacactaacctcccacctggacgcgctaggtctgcgcgagtgcggcgggaacctgcgcagaaaggatggagcctcggcttcccctggcgccaaccaatgccagggaggggcggtgggcggtgggcggagaggcgccaaggcggaggataaggaacccgc

SEQ ID NO: 158101 - DNA, 1000 bp, Homo Sapiens
tttttttttttttttaaatctttatgttcctttattggagcaagattcctgatcggtatacagtgatgtatttactaaacagagacctgtgcagaaattacatactatccatctagataggttgttacacttttgcctattgatggaatagttccatttatcaagttttatacatcaaaaagcttttgaagttcaccagactgtccattaattcacctctgaaaaagtggcatttaatttcagcgactatattttacagcattaaaaagcttatgcattagggtgcttctctgcacaatggcattgagcagacagagctgagtccattatcccacccagattcacatggtcacatttgagagctttataccagaaagcagggacagttactgctcaccatcagacttcttactgagagcctatcttcttggccacattttagagagccaatgaagacatgccagcaactgtcccgtgtataacttggcattagagcaccaggtctgttggatggtggtggcaggcacaattaatttatatccaggtaaaaggccaattttaaaaactgccacttggagataaaaatcaagggcacaatgtactcagagagtattgagctatctggtatcccaaatgatgtgaatacttttcagaaaccaatggcaaattgaacccacgtttcccagctatggagatattaatacattgattcaaatcccattactcaatccacatagccctgaggtcatcctgcaaaagtgcgtatcaaaaaatacgaagttagggtgacaaagtttgacagtgatgttatacaagtcaaacttggaaggtcatagtaagcatacctatgctgagagaaaagcatcaaatcctttgtgtacacatttagttttattgtaacaaagcaacttgtacacttttaacgtttaaaactgagcatcatctttcctttccagtgaaacaaaaagaaacccaaaaataaacaggaacaaaattacaa

SEQ ID NO: 158102 - DNA, 1000 bp, Homo Sapiens
tttttttttttttttataggtaaaacaggatgtaaagtttatatacaagaatataatgtttatctgaaatatttacagtgttggttaaagcaatatttttacaacttttaaaggtaaactactatgtatattacaggtaagctacaatgggtttaatttgcaaaagttaagtaagaaatgttttaaacaaggcttaaagtactcaagtcaattataaaatttatatcttttgccttttacttgaagaaatcatgctatagaaatggttaatgtgcttctaataaatggaagtattgtagctggaatgtgatacatgtaacagtttaagttcccattgaaggtataaaatgatgaattgttgtaagacttagacactgagtctcagtctggagctgatgaagatgttgagataacagccagctttatctcaacagggtttgtgacccacaagtttgggccacagagaaaattgaagcaatttgcatgttatgacaacctcagtgggaagtgaaaatcagctgactcaaaacaacaaacaacaaccaaccagacccaagtcacagttgcacctattcaaaactagctttaaagtgagctatttttaaacttcataaaaatattcatgattttattagtttgaatatttctacaagattcgggtgggcttttcctttaggtgaaaacagctatccactcctgtggccttataactcaggaaatgctggggatgcaaacgtgcaaaaggcagggggaagctgcccaggctgagactggagcagctaggagtgtgcttggggaacgggagctgagatcccggagcagaaatggtcagccgtgctctggagcaggcctgtcggagccatcaggatgccgggactagcactgcagcttgcggatgctgcgggagatgcgcttgaactctctctgccccttctgccaccgcttcaccgaggtgatcaccagctccccaccctgtttctgtcccatgaccagatagggc

SEQ ID NO: 158103 - DNA, 1000 bp, Homo Sapiens
ttttttttttttttttttttttttttttttttttttttttttctgagaaaagctaacaccaagaaaatgttttaattaaactacagaaacaatggttataatacagaatattcataagcaaaaagatacaccatgttataagtacttacaaagttacaaccatttgcttccttaacattttccatgttaagttcatacatgtagatatgatcagatttaccatttttagggggaagagggaaaaaaaggtgtatttatcatcagctagatgtgctcactgtatgctccgttatttatatgcaaggcccgggtgactggaagtgcagttgtcaggcattttaataaactggacagccatttgtttctgcacgacaaggcatctttacacaggagcaatcgggagaaaacaggaaacagccaagcactctgcactgcaacacgccaccttaacagctaaccagcattactcaactgctacacaactgcgcctagtgcacaaaaatacataagagaagagattagaattgtgtttgataaacaatcctttcaaaaaatcaagtcttttcacctgaaaagtctttatacaaatttgggttcagattaccatttagatctgaatgtaaataacatatacaaatttacaccaacttttgtaggtttttaattttaaggaatgaaggcaatgccgagtcaatctcttgacagctttaggctgtgtgtaatggctgcacacgttttccttaaaagtcaggaggccacaaattaggttaccaatctgtttaatttcaaacaaaaaaagtcagcactatataacaaaatgaaattttacctcaaatatccaaatccaataatgaaatctgaagtcgttcacctcactaaattacaagaaatttgaataacagcaacaaaatggcacataaaatgaagtttgccaactgaggcaaagcttaaacaagtaaaaagttagacaaatgttacaaaataaccttttcaatagcca

SEQ ID NO: 158104 - DNA, 1000 bp, Homo Sapiens
ttttttttttttttttttttttttttttgactgttgcattatgatttaatctaattgcacaaaaatttgaaattacaacacctgccattttctaagaggaaggttatgcatgcctccatattcaattctgcactgttacatttgaaccatattgtgaacttttacatcatgatggatcagcttagaattcccatgcaacacctcaaattataaaatggaagcaatttttagacctgtggaaagttttcatgctaaagataaaagccatttgttaatgggcaacttactttgtgtttaagaaccaggttgctgctatactttaaaatgttggtcactaaatattatggaccctgaactggcttctatgcctaaaaaaaaaaaaaatgggttaactatcacttaggtgacatctatatttccttcacttcagaagactaatccatagtgcctctcagctgtttcttataaaataagaatcgtgtaaccaactgcttcccatgggataagaacaatggtaacagtgggttcaactgactatacacaattatgctaatattttattaattcaaaagcactttacaagaaaatataagtatggcttccaataggaatgttatacctggacttggtaccaagctcacagatttgagtttgcaaggaaaaacaggctttcaagttaaagaacaatttgtaaccaaaactttaatcccaaggattctcacaaaacatattacaaatgacagcatgaaaaaaaaatcttgcacagtaactcaaagttcggctctacaatgtacccttaaactggcaggacatttttgaaatcacaaatttgcacataaagaatgtcacgaacagccatgtatccatatacagcaatcaaataaggaacttatgacctaaagcaaaggtaaactttcttgaaacttaacattctataccaactaggcaacctctgcccaggatgagagttggatttttcaaaaacctctaatttaatagt

SEQ ID NO: 158105 - DNA, 1000 bp, Homo Sapiens
ttttttttttttttttttcccggcacagatggtcacctttttattaggatattggcagcatgagggtctaagccttgacttctggccaaactcctgggccaagcactgccccacccaccccagttggctcagaactcgcagaccacaagacgcttttctccacaagccctgtcattccacttgccattggtgaagatctccacacagtcctctgacccgccatcatcgttgggctcccctggggcccagttggaatagaccagggactctcctgtggggtaggtgaacttgccctctgtcttggaatcagtcatgctcaggaaagcagcctcgttcttagctacgaccagctgttgcaaggcggcattctcagcggcagagcgtggagaggccaactgtccaccagcctgtgtgcacagcagctgtgcctccgtaaatggttttacaaagcctgctgtcttgaaaatcttctccccgacactttggccatttgggaagagctcaactttcttatactgagagaaagcagcctggaggtgctgtacttgtccctgtaaggcctcaacctgctgcctcagagaagcaacatctggaagcccactttctccctttgctcctttgtctccaggaatgcctttgtcccccttcaatcccgggggtcccctggcacctggacttccctggggacccatggctccagcagaccctgctgcccctgtgtttccagggactccacgctcaccagggacacctcgctctcccttagggcctgcgaggcctcttgcccctgccgagccctgcatgcctggggcacctacttctcctttgggcccagcttctccttttgggcctggcttgccctgaggtcctatgttcccctgcttccccaggggaccttctcttccagctggaccaggcacaccgggaggtcctggaggtccacttggcccagtgtctccctttggtccaggttctccaacagagccattgtcccctttgg

SEQ ID NO: 158106 - DNA, 1000 bp, Homo Sapiens
tttttttttttttttttttttttttttttttttttttttttttagaggtcacaacgcctatttattccccacacgtcacgccctgcaccccgggtgggcttggcacacacctcaccgccatgagcggctgcagggccgcggcggcccccgttcctactgctacctacgatacacggtactgcgcctacctcacagacggccaggagccagggagccccaggatgctccgactgacaaccctgctgctgggaccacggcgccgtgggctcgtctgccacccccaggcctcaggaacccagacaggctgcctgctgtccggctctccggctgctttcctggtggctgttttagggccaaggtgggtggcacctgaggtgtcccgtggcctccacccagcacaggaggggtaagcttccctggggggccccgggcccatgaaacatccaggacagaaggacagcaggatgggacacagacagaaacggcccagctgccttccctgtgcccggggctaaggcggccgggacagaaggtcatgatgtcgcccctggctctcagtcgcgaggaccagaaaatgagggtgggaggaggggaaacatgtctgtcaacatgcccaactggagaaaagtcacagaaactggtcctatgcacccaggacggctcctgagccgcggaggcgtggggtgaccgcagccgtctcttaggtgtctgccactaaagagttcctcatgcaaacacacatggcccgcggtgcccaggccgcagctggcagtgagctcttccgagcaggcacagggccggggtggccgggaggtcgactcggaaagaggcttctcacagacgggagagttcctgcagacagaccacgggatggggggcgggggctgtaaaaggctttggaagccacacgatccgccacacggctgaacgtgaaacctgccacttctctgagagcggcccgggagcaccccaggattctagaaaacactcaagtgaccga

SEQ ID NO: 158107 - DNA, 1000 bp, Homo Sapiens
aaaaaaaaaaaaaagaaaagaaaaagaaaaagacaacaagttaaaaaatgggcaaaagatgatagacacttcacaggagacaaaatcaaaatggttaataaaaacataaaaatatgctcaatctccttggtaattagctaaatgcaaattaaggccataactatacaccccaccagactggcaaaagtgaaatgtctgccaaggatgggaaggcaagggaattctgttttactgctggtgggcacgtaaactagaacaatatttagaaagatcttcataccctagaacccaggagtcagactcctgagtacaaaccctagaaaaatttgtgcaccatttgcaaaaaacacacgtgcatcagagacatggacaaaactgttgctagcagcattgtgtgtagttaccccaaactagaaacaaaccaactgtccatctacagcaggcatgtccaatcttttggcttccatggaccataccggaagaactgtctcgggtcacgcataaaatacactaccactaactatagctgatgagctaaaaaaaaaaatcgcaaacaaaaatctttataatgttttaagaaagtttacaaatttgtgttgggccacattcaaaggcatcctgggctgcatgcattggacaagcttgactgacagtgaaatgaatctgtgaactacgatacagccaaacaatggaagtttttagcaatgaacatgcacaaactatactacgcacagcaacatgaataaatctcacagacataataacgagccaaagaagccagctgccagaatttgcatctgtatgattcaaggggataaagcacagaaacaggaaaatactgcaatgcttgcataattgggtgctgaagactttttagaaaaacaagaacacaagactcacataagccagggcagagaggccggaagtgacactgtgaggggagggcacttgggtgctggcaaaactatttcctgatggtggttgcagatcgtttacttcc

SEQ ID NO: 158108 - DNA, 1000 bp, Homo Sapiens
aaaactcacattgatttattagaatatgaaaaagattcagtttcttctgtacaggcagcagagtggcagcagctgcggtggcttggtacgtggttgtcgatgtcacccttgcatggtgactcctgcccaaacagcacttgcatggagaggaggatggacagatgggccgaggacccatggcccagtcccctgcaaaaagggacactctgactattgcacaatcctgggggagtgccccagggacaaggggaaggagtgtgtgtgggcaaaggtctctgggggcccaggattctgcccaatccaccagccccaggggacaggggatcctcaggggaggccttctcccccccaccgcctccacaatgggctccacagcaggcagggtgtggtacacacaagggaaaggttccaggggccaaacccagggtgggggaagtaagagcaggccagcaggactggaggtcaggcccaagagctaggcaggtgccaagaggccagcatctgtgaggctggagagactcttgattaggagtgggagttacttctgatgtcacagtcttcgagcaacagttaagagcccagcaggcagagagacgtgggggaggggttggacagacaggcacagatgaggaagggtaattctggagtgtgaggagggagttagaggcagagcactgttcagccaggggttttcaaaatgttttaaaaacaggagcgccctctgtgcaaacaatcatatataggagtgtgaacaaacaaaacttaaaaaggcagcacattctggagccacggccagtccttcccctagcagcttcccctgaggggcccagtggtccccgtgggagcacagttcgaaaagctctgagtcacgtcactgtcaccgtagaaaccacccctgctccaggcagagacactcagagatgccctcagcccgcagctctgagtaaggataggttgggtggtggccagggtgacagagctggcaggaggagtgtgagac

SEQ ID NO: 158109 - DNA, 1000 bp, Homo Sapiens
ctttttttttttttttttcttttttttttttttttttttttttttttttttttttcaaggttcaaaagctggaggatttaattcaatcaatttagcaaggcccaaaatgaaacctggtaatgaaaatgaagacacagcaatattttcctcaagaaaatagacatttgggagaagaaatgttttcttaaaaaatgtttatttggaaaagtcagcctcttacacaaggttttgtatctatacttttactctgtcaattacagtggtattttaaatgcattgaatataattcattgaatgtctatatctttctgcctcgatttaagtgatattaggttaaaaaaatatttacagttttcattctggtccaccttccctccttatccttatactgaatccatttctctacttttcaggtaagtgaaaggggtcacaaaatttttaggtttgtgtggagggtaaaaatgcatccagcaattctaagcacaacaattttctgtaaggccttctctgaaaaaagagaaggaattacttattaaaactaagcacacttagcaacttctttcccaatcctatctttattcgtttgcctggtgccaaatttttctggccctttttaatttgcaaaccttaaaaaaaaaaaaacaaaaaaacaaaaacaccaaacacacacatatctcacacatagcactaagctagaagcagatataaatgggaccactgtgaatcaaaggggaaaaattccaggaaaaaaaaattccaatagcttcacagtttaactgaggttttggaaaaacttaagtgaattcagctgatgtttgaaatatctgtctacatttaattagatgtgttgtatttaccaaggaggcacaaatatgtagttctgtagattttaatactaacttttccagtaagaaaaataataccaggtgatttcaaaaagggcagtgatctataaacactcaaaatgcatctttgaacaggggagcagaaatagctaatt

SEQ ID NO: 158110 - DNA, 1000 bp, Homo Sapiens
ttttttttttttttttgatatttaaaaaatcattttacttattaaaactttctcatttcccaaggcacttcagtagctttcacaaaaacatgtttgttcttttttaaccaggtgaggcatatgctttaggagtaccatggtaacataatcagcaaagagaagacaattacactgaacacaaaatatcacccaataaagttacaggactaaagtgagctactctgaaagactatgaacacaatttaaatttcttttttgtaatatcctcccatgactaagtatcaagaaaggaacacacacaatgacactgtttttggcacttagagaagtgctagaggctagggctggtaaggccttgcaccagtggcagctgcagacaattgccagagtgattctgtgtttaaaaaaaaaaaaaaaaagacacaaaccaggaggctaaggaaccagcctttcccaagtgcattctgaagggcaaataacaaggagaaaaggatacaacaacaaacaaataaacaataaaacaaaacccacattacagctttgagagaaaagacaacgttgctcatctctctcacctgataaatttcctttaaaccatacataagacgctatagtagcaaggaggtttccacagcagtggaaaacaagaatagtagattcaatggagcatttattatgagcctggacaagcccagtgctttgatcagatgtaaacaagtctactcagtcgtcatgctgagtggtcttaagagctcacacatcagtgcactttgctggtgatctgcatctgctcattctgctccatcttcattacctttcactttccctagctctgcgctctcctgccctggggaagcaatgatccagttaatgtcctctgtaactgagaaaaggtaagaatcaaactccttgtgcaattacttccttttcctctaaagttcaccactagaggggagtggggaaaggggtgggggacttagacctctagccttattagggg

SEQ ID NO: 158111 - DNA, 1000 bp, Homo Sapiens
tttccataataaaaataagttctattttttgtttattttacaatatacttaatattctcttcttctttaccttcctctccagcttcatttccttcatgctgaatcaccagggggtcccacatggctgtcccaactccatcaagctggagtccgagaggtggcaggcaggcgggcaggggcttaggaacacgcgaggcagccgcactctaagtgtctctccacctcttctacaaacgaggagccgtccgtgcactggaagacgtatttccgccgcttgctgcgggtgggctggcagcactggggcccacagcccccacgacattccatgatgggcaccttggaggctgtggcacatgatgcataacctttctggcggcggatcacctctcggactacttgtcccaggcacggattctcttgttggcagtgctcgccgctaaagccgggctggcacaggcagtagggctccccttggtctgagatgtggcactgcccatggtgacacttgaaggctgagcaggcattggcagagtcattcttgttgtcacacaagtcccctccatagccctcggcacacttgcacatgtatgaggtcccagttgccacacattttccatggtggcatctgtggccgaggcaggggtcccgggcctcctgatcgcagagtgggccggtccagcctgggcggcactcgcacaccacgctgtccttctccacggagcggcacaggccgtgcttgcacacggtgcaggacttgcagcctggtgacacccccagggactgtggtgggagggccttgaagtcctgcagctcgttgttgatgcgcacctcatggatgcatccgtggaagccgcctagaggccggtccgtgccctggcgcaaggcggagaggccggtggaggtggggatgcctccaaggtagagggggctgttgatgcccactgctggctgcttctggagcttccccaggctctttggagttcctttgtccactactagg

SEQ ID NO: 158112 - DNA, 1000 bp, Homo Sapiens
ttttgtcaagctaaattatttctttattaggaaagcaccaacaccacattcttcgaaattactggaattttatttgcctcaggcttatgacttgcaaccaaagacattgtgcaaagaaagcaaagattaagtacactttagggagaaggagacgatacacattggtaacataggagatcagggtgacaaaagaagccatccaatacactatatagattgcaatattcaatagcgctttcaacaaaacttttttttaaatcaagagcaaaaaaattaagcaatgtttacagtagacataaatcttatacaattcaaaaagcttttgttcagatcatagagcataaaatggaaaaatgtatatgcaggtgaaatctaactactgtacatttatcacctattaaagttgcttatatgtaccacagtgtaaaaaaacaataccgaacaaataaaaacctcgaaaattgcctgatgaaaaataaaataaccagtggcttttaatggcttctcctggttatcagtgctacaaaagacaaaaatcttctcatctgaacaggtgataaaaccaggcacaatcaaaccgttaccaaattagacccacccatagaaatatactatccacccacatattttccatcaaaagctttttgtttgtttcaatctgaatctttgaggcccatttggtcacaatatgttacaaatatttgtgtatgtgtgtgttttttacaccatgatatcatatgtttgtctggcactatcctaaagctagtttatagacgatgatgatatagaaacaacccagtgcctatatgacaaatgaactcactgggtagaaatgagacaggggaggaaggaattcagttctaccaaggaaaaaggtccatactgatcactcatcatccgtcccacttccttctgactgttcacgttcatcctgctcctcatcgctgtcaaaatcgctcactacaggtttggcttttcctcgatttggccttttcttgcc

SEQ ID NO: 158113 - DNA, 1000 bp, Homo Sapiens
aacatttgaaatttttattgatttttaaatttaaaatccagttttaaccacaaaattgtttgaatcacaagtggtaatacaatgtcttcaatatttttctaaagttatttttctatataataataagacaacagcatagcatataggaagttttcattccagtggcttttttatatatttatccttcttaggaaggacaaattaaattttttaaattaaacttttaaaatataacaacatctaacagaactgtacaaaacaaagagacattttttaaacaacttgccaaacttacttatgagtgtgttttaaaaacaactttgtaaatgtctgggcaaagaagcaagctgtcctccctttaccttcatagtgagtttgtaaggctttgtctttgtaagcagaaagagtagactgtgttgttttttgccaaaaactgtttatacttaatctcactgaagtattgctatatggagaacccatactctgatcaacttgattttttgtgtgtaatgcttgatctaccaggtaacttcccaactgctcctaatgctagcgggctaatcccacattattattccactatcatccctgcagaaaggtcttggttttgatgaaaatcagccctttccttacctgctactgcctcaaaaagggaccaggaagattctagctggctaattcactgttccctttgagcaagaaaacggcacagggagaaaaggacttatctggtgagagatttggcatataccttcaatgtgtgccctataacacaacattgtctccgatctcatctttctatcaaatgacttccaacactcttaagtctcaggtattcttaaatctgtatcatcaaacatgaagcttctcttgtttgttagagtaattaatctttctttggattaaagtttccctttgaaataaaaccacctacctaatctgactgctaaatttctagcttctttgttttaaatatgctcaggagtcaacccaaattctg

SEQ ID NO: 158114 - DNA, 1000 bp, Homo Sapiens
tgcgttttgttgttggtttaatttattactgtttgacatccagtgacactgacataccctcgccgggcccccggcgagtctgacctgtccaataaaatacagtaggaggagtggacggtgacgcacatgcatccacacttaactacagtgactccaaactgcggcgcaacagtactgccagcaacggaaaagaaaaacaggtatcgtgtgttccccaattcggaattctctctctctctctttaagacagttaatgctgttacagatgctactgatgccaggacagggccagtcacaaacagtcctacagcttctctgctgtataaatatggaagattcttttgtttatacagttttactccaagtctgaaactacatctgctgctacccgttactgctaaggcctatgccatctcagctctggaacgaggggctcggggtcgagactggaatgtcggggctcagtcttcttcgctgccacttcctgagcggtcctcctcttgttcctcctcactgtcatcgtcactcacgaccggcttggctcgggaccctcggctcggccgccgccggccgcccttcagccggtcctgtgccttctccttccggccaagcttgatcttcactttgacggaccgagattcggattcggagccttcctcctcgccctcttcctcctcctcactctcctcgccttcactgtcatcctccttctcgattttctgccgcacgctggtgaagaccgactgcaagacgatggagtcttcatagatcagggagccctccaggttgaaggtctgtgcgttctggcacaggagcatgacgtccttctctaggtcgttgaggctgcggtacttgtggttgcgaatgcgctcctttatcttcttgaagtccacgggcttgcggatgagctcgtagtactcgggcagctcctttcgcgagggcagctggatgaagacctcgctgagctgacgtccactgctgctgtccttgtacttgatca

SEQ ID NO: 158115 - DNA, 1000 bp, Homo Sapiens
tttttttttttttttgttgaagaaattgaacatgacctgttgccttttatttaaaaactgttactagccctgcctggggctcctatacaaaaacaaaacacaacctaaaataaggtttcttcctgaccccagagactggggaggggtagggagggtggggtggggggcaggactggggctcaacaaatggaatgtgtgccgggaagggccacctggaagcccccactccacccccacccgatcctcaggatggcgctgggctgtcccctcgcctctgtccttgccagaagatggaggagaggcggcccaatcttctgagatgctccgtgggagccgtgtgctgatgggctggttaccaggccggggccgtgttggcaagacgcctcatccgcctcgtgttcctgtcctggtcgcggatcttcttctccatctcagcgtctgtcagagtctccagcagtgggcaccactggtccgcatcgcccgtgttccggatggcaatctccactgtgggcagagggttctcgctgaaggcgtaggtcttctgatgccagctcagctgtccccggatgctgtatgcgatggtggtgacaaactccccgcccaaccccagctccgagcacagcttcagggcaaacttctctggtgagttctccttctctgacatgtcccactcaaactggtccaccagggaaatgtttcccacatggatgttcagcttgatgatgacgcgctggtctgactggtcctccaggatgctgtccgtggggtaggactcgatctgctgtctgatggcagaggcgatggctggcacaaacgtcagcgggttcaaatccagatcgtcacagaggatttctgaaaacatctcaggcgtcatcaacttctcattcatgttccaggtgaaggcgtctcgcagcttctgcccatcgatctccatgtccagccggatggggaccagcacctcgggctgagatgcgttctcatggatcacagctgggtcatg

SEQ ID NO: 158116 - DNA, 1000 bp, Homo Sapiens
ttttttttttttttttttaatccatagaaaatgcagtagtttggagggaggtgtacccttagaagtggttaatagaaccttgtataaacacctttcaccagcccttcctttagggcagcattcccatcctatcctctctcccagacattataaacatcttttaaacagaagtccttgaataatctgatataaaaatgcatgcctctgttaggcatggtgagggctttggaggggcggaaggagctttccttacgtagtgatgaactctccaggctggggagggtcccagtggtgggggaagggctgttcctggaaccgtgatgtccacagggggtgagggggagagatgtctggctggctcctcactgtggaggtggcacaggggtgaccgtgcctgggctcggggctgtggggtctggaggcaggggggtgcctgggtctggcagtgggctggcactgggcaggaggttgccctgaacagctgccacaatggcagggctttgggctgcggcggatccgagccccggcccgagaggcaaggaagatggcatggtggtggtcgccggcaggttaggatgtagagggttcgccatggacacaggcaggttaggtggggggagagtgcccggggcgaacgggagatggtggtgatgcccatgcaggttaggaggagcggggaggttaatactgatggagtcagctagactaccaaatgggatgatggatggagcaggaggaggaggaggaggcggcatgccaaaaggcaaacccaaaggagcattacccgccacgcctgggtgcccgctgcctggcactgcccctggcatcattgagggaggagtttgttggttggggaacggtgaggggccatggggtccaggggggggaacccctggtgggactgccccaggctggggggctccagctggttgctgctgctgtggccctgcagttgaccctgcctgcccaatctgttcagaagggcccaaacttcctggag

SEQ ID NO: 158117 - DNA, 1000 bp, Homo Sapiens
ttttttttttttttttttaaagggccaagctttattgttctttagttctgtccccctcctgctgccccaggagtagggctggctgaggctctgggcccagatcctgggcctcccttgcccttcctagcacatgctggagctcagcctgggccctatataagccattgacctcctgtacgtggaagaggtagaatgcacctgcccacagcaccagccctacactgggggtccagagcagtatggcagcttccccggcccctcctccagccgccaggacacacagcagtgccaggagaagcagccccaggccaatcacatagctagcgaaggtggcccaccagcgagcctgagccatgcccagacccagctccgtccaggcctcctttagcacacacatcaacggcgacctctctgctggtccgtgggtagagctggggttctgctgtggggggctgtgcctcacaaacagagtagccatcagggcttcatgatcagagaggggggtgccactgtgagggtcaaagcctgtagtggtttcaaaactcttacaggagatgtaaaacccagaaactgccttgtaaagcacgtagtcaatgcggacaccaaagggaaatggcttcagctcctgctggctgacgtagcagttcttgggtaccattgtgttgccttcctcagagcccttgaagtcccgagtttcaagataggcatcatgaagccctgtccactccttcagcaggcagcagcccaggtcttctgggtgcatgttgaggtctccacacaacagaaccacgtctgccttcttggatgtgtggtggatgaactgggccaattcccaagcttgggccacacgatgtgctaggtagatgtccttctgtcgattgtattcggcatggagatgggtcacataggcgttgagcaccatgccacttagatggagcaccagcagccccacagccttcccactgaaccagtcaccatgatggatcatgtaggggtagcc

SEQ ID NO: 158118 - DNA, 1000 bp, Homo Sapiens
gaaagagaaagagaatggtaactttattcatggtcacagaatacccccgggaaggggaaggacctggcagcagggagtaaccacgactggtcagttgaagaaggtgaggatgctggccccgaggtgtacaggaagggggaaaatgtgcgagggcctttacggtgggcagtgccagctatggccccccagcagacaacaaggcacagtggggcttggggactgggggaggccagccctgtccgcctgtccttgacatcaggaggcttgtgagtggagtcctgcaacccccacccaacccctgtacaacgggggttccatttctgagacccccaaagtatggggcatcttagaggcccgccccacagctgagcatcatctcaaggaccttcccccatgacgggatcctcagaaagagccagggccagccgagcagaaccgaggggcagggcggggggcctggtgtggcctcctgcccgccatgcccctcacctggcaggggtggctgcccgacccagaagctccaggggcaccaggaacgggttcaggggacagatcccagctgcttgccaaggcgatttcagttcgctgtgctcggccttctcggtggctgggggggtctcctctggtgccttggagccagccccatccccttctgctgcaggccccaggctccctccagcgggaatgggctggggggctgtcaggcgtaggtacgtctccgtcatatgctcaaccagggctgtgcagggcaggagtggcagctcctctggaagtgacatgagcaggtcgaggaccacagcggactcagctgctgagagctcggggctgcggccacttcgggagacagaggacaagtacttgtagatcttctcaaagtccacagcaaagtcttcttcagtggagggaccagccgacgactcagaaggtttctcaggggcagggtcaggagtcctgggtgcggagctaggtgcagcaggggcagagctaggtatttcagggg

SEQ ID NO: 158119 - DNA, 720 bp, Homo Sapiens
tttttttttttttttaggagtgggctcaagttttatttggaatcatttaaaaaaaaaattcacagcagcataagtggggtcagaaggaccagagggtgggtggggccgagggagggcagtgaggttggtgcagcagcacaggtggacaggccaagggtggccaggaagacgagggcaggagcgtgggcagccgcatgtcactcaaggcgggcactccttgtgctaggaggggatggtgtccaaggcagaggagcgctcttcaggtcatccacgctggcctgtagccctctagtctcccccactctgggcctcctctgccacttcctctttctctttggatgccacaccctcctgttggggggcagatggcctcaagtcctccttgcgcaccaccccggaggtgaccgcgatgttctccgcctcctccacggtcttggtggccacagtgttgacgctgctcaccacagcctcgctcaccgcgttggcctgctccttggtcttctcggccactgaggtcacgctctgtacaacattctccttggtcttggctcccacatacatgaccccctccttggtcttctcagctgcttccgtcaccccctgcttggtcttttccaccgcacccaccacgccctccttggcgatggagaagcccttcttgaagacatccatggtgggtgtgcagggttgtgctgctgcaggcaggacggagctcgcagg

SEQ ID NO: 158120 - DNA, 1000 bp, Homo Sapiens
ttttttttttttttttttttttttttttttttttttttttttttttttaaaagaactaatgcagccctttatttcaaaacataatcaaaagagcatgagttcagacaggaggaatatagatggaatgcatggttcaaagctggatacacttctgcattcacctacaaatctcctctatctcggaaaggatttcttttattcagtttcatgaaaagtctccttcacaggcatgtagaaaagcaggagccagacttcttggtccttcctcacccgtccttaataacaacattgcctttagcagaacttaaggcaggccttattcatctttcaagatccaatttaaatagcacttagaatgaggcattaaaaccacctgcttacctgtctgtttcactgtattgattcaacagtgtctagctaacagcagatgctcactatctaacaggattctaactagaaccatgtgcgatactgggggaagggaaacctgtccatataagaattcaaccagcaatcactgggggaagaaccaaaattcttaagagataagaataagagacaggtgtatttctccaacataccattattctgcctaacaatttgcctaccagctatgcttgtggtccttttcagattaccaatctcagtctctttcctgtaaactcttaactgatttttaatgtacttgaaaggcacttcattctttccctatatccaaatacttctcacattctgatcttagcgataaaattcacaaagacctcacagtgactcaatgagagtgttgagcaatactgaccccattaaataatgtacccaacgtatttaggttagaaactctggtattccagcatccagaactacaagtgatgaagacttttgttagtgcaataactcttatttatttttctgaaccctccccttctccacctcccaatactggaagcttacccatcaggcagaattcctaatctgcctcaaaatctacaggtccaagctc

SEQ ID NO: 158121 - DNA, 1000 bp, Homo Sapiens
tttttcactgggccgggctgcctgtgtgctcacaggctgtttatttatccaagagtaaggaggagagagacaggatgaagagaaaaaccagactccccacggtggcagggctgaggggaaaaacaaacagaaaatctcctcttctttctcttgctgctgaccccagggtactccagcttcagatgggacctctgggggtggcttaggggcctcgaggaggcccggcagctcagctgttggctggggtcaggatccgcacaggggcaggtcccagactcggaatggcttctgtgtacacaaaatatctctctgcaaaaggcactggtggaggggggcagcaggaaggccaccccatcacaggcagagtccactctgtcctgcgtctgggtcctgggccccaagaccaatccagtctccctcagggttggggtttcggaggcccttgttcctctcctctcccttccctcagcccaggggtgagcaggcagtcggtggaggcccagctcaggccatgtcatggacacccctcttcagggctagtgcatccggcgacttctaggccaacagcccgaggcgggtgactttggccgacaggaaggagtggatgatgaagactatggttttgggacacgagtgcaggtccagctggatctcgccttcagcacctccaaaatccaggaaaaggagactggcaccgtcatctgaagacatctgcagcttctcgaagggctgtcgcaggagcacagctcgggctgcacctggctcagccgcccacagtgtgaagcccttgtcgatgtgcacagacaggctgcagggacgcccattccacgtgcaggctgtagacacctcctgcacaccctcggcggcccggtgacagccatccacaagctggcgggtccaggcagccagctcctgcggtgactccacgctgaacaggtgagtgtccacaccgtgacgcgtgcccgtgcgcagggcaaaagagagctctgcatcgtagggc

SEQ ID NO: 158122 - DNA, 1000 bp, Homo Sapiens
ttttttttttttttttttttttttttttttttttttttttttttttttttttttttttttttttttttttttttttttttttttttttttttttttttttttttttttttttttcagataccaccaccaatatttattacccaaagcaatctgaaagaatcgggcacaaggtcatggctttcccaggttacaagaaaatcagaacctcttcaaactcaccctccacccatagccaaagtaaggaattaaaggctatagctcaagctatgtcatggctactatatcctcattcttgatgaatagtctcaaagtcacaagttggcatgatgcgatttaggtctaaatcttaccagaaaaaaaacccaccattaaaataagacaagttcatagaaatcattccaacagaaagataccaagagcctttactggtaatgagaagaggaaagattttctgtttataataaccagaaagaaatggaattgtctaataaccatcaattgagtatgagcctagttgagttgagtatgagtctagtatgggatgctaatcttctggggtgggggaagtcctgtgagctaaccaaaccctcctggtctctggtgaggtccacaagtagcagtttcctggttgcctggtgacaagggaccatgcttaggggtgggctggggcatgttggggagggggtccttcacttggcaagtgaaataacacaattctcagaagctgtagaagaggcaatcttcaaacagtgctgagtagtcctcttactttttccacattaggggaatgcaaactggtttaacctcacatgacatttccttttttgtttgtttgtttttttcatttgattggtttaaaaattatcctggatccaggaaagtgatgccttttcttattctccttttatcatcaaaacaaacagccaatatgtctctagaaacattgcgttctaaactggaagtgctgacaagccttcatcccagaccctgagtggcagat

SEQ ID NO: 158123 - DNA, 1000 bp, Homo Sapiens
tttttttttttgttttttgtttttggcccatataaaaataacatattgcaactcaaagtgcatcttttaaaataaaccatcaactatctttatcaaataaaatatttacaccatttggtttctagtgaggaaagctctttcaggctatcaccatggggacgtcatctgaaaatccagttatcataggggcatcttcatcatcttcccccaggtcatccccagaggagaagattgcggaccccagcctggagctgtagtggctgttggcgaaggcggtgaagctgctctgcagcctccggtgcttcgtgtacaggatggcaaaccccacccccaggctcagcagtatcaggaataagatgggcaccaccacagcagcaacatccgtagatctggcagcctgcgttgcagatgcatctgcaccagaccccagctcatcgtacagcaggatggcaggctccccacagatctggttgccaaaaaggcatcttgcttggacggtgaacgtgtaattatgacccatcttcaggttggaaattttaaagaaattgtcagtagtattcccaaggtaagctgtgatattcatggcactatcaaacatgtgtatctcatagcccctgctttcattaaaatgcttttcctttaaagccaggcttttccaaaacagaagaacatgatcattttctgttatgatttttaaggcatcaggtgctgataatgaaactgtggtaatttttatgctggaatctttgctcatgttccccagttggacaatgatgtggtatttcccgccaggctccaacttgttaagggtgtattccacagtgctgttacgggattttactttgtagctcctgtcagtctttcttatgagatctttgactgcaattgcatacaacaagtcctggtcaggagagtcatacggtgattcccacttgatgaccacggaggttttgcccgtatgaaccacatgcaggtgacggggtggaagcctgctgtccgg

SEQ ID NO: 158124 - DNA, 1000 bp, Homo Sapiens
ttttttttttttttttttcagtgtccatatttcaaaaatttatttatctcaaactgtgcataatggagtaaaaacttaagttgaaaatgtacctgttataaggatgatattagttcaaatatatacatggattctcggcagactgattcaaataatacagagccgaatcttttaaaatacaactacggaaaataaaggggggaaaaccttaaaatatcacaataaatttacagaaatattacaaaccataagaaaatatttcaaacacagtaatttcatggttttttttatctgaacaaaatggaaagttgggatcgaacaaaagctattataaattaccaacggtgtcaacctgcatggccatttttgcttttaacagtaagttataaaatttagtacagtctaaaacttttgccctttttaaacaagaccacagagatggttcgccagtacttattctaattttttccttttgtacaatttttaaacaattaaaatgtccaaatttgaataattttcttcttttcacgtttgcaactgtcctaaatttcagctgcagaatcaaaattcagcaagaagcctctccttgaaaaatattggcaaattctcagcttataaacaatggacattttgattgccatgtttatctcgataaatactgtacaaaagttgcttgcaaatattaaaacatttttttcgtcgcttggagactagctctaaatattattggtaaagacttttgcaaacttcctgcaaagctcctaccgtaccactagaacttttaaaaagtttttcgtagctttctttcctccagatctatacaaggtccattcccccgccctccccaccctccccaggttttctctgtacaaaaatagtcccccaaaaagaagtccaggatctctctcataaaagttttcttgtcggcatcgcggtttttgcgtgagtgtggatgggattggtgttctcttttgcagctgtcatttgctgtgggtgatgg

SEQ ID NO: 158125 - DNA, 1000 bp, Homo Sapiens
ttttttttttttttttttttttttttttttttttttttttttgaagattttgcctcaggcaactaaatttattagcaagaaaaaatttttgtcagcccagtgctgaccaacaaagtacgttaataaaggataacaaatctgtcacttaattcataaaacatacctcaagcagttacaactaaaaataaagttggatttttgtttaatttaaaagcctcaaaaataacaagcaatgtgtttttaaacatgtagtagacacaattgtctattatacaatatacactgtacacaagtagagcttgggccgggcaggggtgaggtgaagggagagggaggaggtgcaggatgtgcaggtgctgttatctgaatccagatttgagtttaaatgctgtgtcatttagaaaagggaattgctagagtgagaaaaaattcatatgctcatcattgcccccaaccctcaactgaaagcaggcatcagggaggtgaataacaaggaaaggaagaagggagcaattaaataaaacttctttaaagcacacacagtacacagtgttcatcatctgaagtagagagtataaggcaacgttctccatagaaaaagagggggatcaggagtcggtgggtgtctttactttttaaatagagctggaatgtgctggaggagaggttgtggcggggctgggcacatggagtggaggtggccccgagtttctccagaggtgggtgccaagccccagggcgtccacagtggccggcagggccagggaggtgcaggagagggggcatggcatgacgcgactccggcagtgttgggagcggggatcggggtggggggtaggggctcactttgctcctcgacggagtgaaatgcatgtttttcctttggaaataagggttcccacgcgtcctggtttagaacgtctcattgggcacggccagtgtccacagtctgggcaggccgggagctcgtggtgaggggaagggccaaggcagagccaag

SEQ ID NO: 158126 - DNA, 1000 bp, Homo Sapiens
ttttttttttttttttttttttgatggaggaataaagtgacttttatgactttttgtttgaaacattgccgattcttttcatattttgttttcaaaagtcaagaaaacttctctttcttttaagttacttatatctgacagcccttaggtaaagtagacttttgtgagcaaaaccaaaacagttacttttctctctctacatgaatttgccataatttggaaactattcataaacattcttatgacaatggttatttgcataagttcaataataatctgtttcttttgtaacaggacagattggaaacactgattattttaccaaggctttgactagagtgtcatattttcaagtatgacaagattgttttgagggattgagattggctttgtggagctaatagaacatggaagaagactgacctggtaccttgtctacacagttccctcatacggttttttaaaaattgtatttacttagaagcattcagaatgtcaacaaaacagctgcaactgttttttttttttgcaattacagagtggcattcagttaacagaacaacaaatgttttgtataagctacatcagagacaactgaaggtgaaaaaactaccatcctcctatacaactaatttgtgctgtgcactaacaagaacctgctttaaatttccatgccaatttacaacccccatactgtaccaggcaaaggttagtggctaaataccaccaggacagggctatctgaagacacattcggtagtggttaactatacaaaaaaacacagtgtacggtttaaaaacaaatcttacacagtcttacgttgaagtttttttctttaaaaggagtgagttgtgtacaggcagcttaaatgctttatagacaagaaaaaaactgcactagaagcaacttatttatcatcatcttcttcattttcctcctcttgttcatcctcttcatcttcttcctcttccttctttttcttgcttttttcagccttga

SEQ ID NO: 158127 - DNA, 1000 bp, Homo Sapiens
ttttttttttttttttttttttttttttttttttttttttgattttttaggagcttttattgttttagtaatcttaacataacttaaaataagagaggggaaatgacatctggagatctaggtatgtggcccattgcaattgagcacatttcttgggtctgtttctctatctctaaggggagtctcaaaaccccagctcaaaatacgacactaacatgatgaacatgcatgagctttgaaaagtgctctgtagtcttatgatgatctagaagagcactgtccaatagaactttctgtgatgatgaaaagattctacttctgacctattcaatagggtaaccactaatcatgcatggctctcaagcacttgaaatgttgctagtgtgattggggagctgcgttttgaatgttaactaatttaaatttaaatcttaaaaagttacatgtgggtagtggctgccgtacggaacagtacagcactagaataatgctgtgtcctcctgttacacatactcatggtctctcctactctcccttcatcacacctgtgacatcttgcaatttatatttgattgtgtcattatctaatgtattcctcctggactctaagctccaaatgaacaaatgctttgtctactttgccataactgtgtccccagtgcttggcatgggacctggtgcagagtaaatacatcataaatattttgtgaatgaatgaatgaatgaatgaccatgattaataaaaggatatagctgctcagtctggtgctgataatggtggtagtgatcaaaagggttaaaccacaggtcattaaatgaaaacagctaacttagtgcttacaggaaccatacactccctgtgtataaacatgccggtgtgtgtgtacaggtgtgtgtgtgcaaaagcataatgtgtttgcaaaggtttgcatttgtgtagtcatgtgtagacatgtatgctcatgtgtttttgtgtcaggataataaggtgactaagact

SEQ ID NO: 158128 - DNA, 1000 bp, Homo Sapiens
ccccaccccccccgaaatgctctataaattaaaaaaaaaaataaatcaaccacattgaggaacattaggcacagagagtaatgtgttggttctgagcttgcatgctggaatttcactgaaaaggtaagagaagggcaggaggtgaaggaaaggagttcatttctttttgccaaaaaggctgaaccgcttctctttgtctttctctttgtccttttcccgcttgccgggactggactcgctggtgatggtgacgacgctggtggggagggtctgcgcgcggctggatgctggcgtgctctgggtgctggcagacacctcgtgtttatcagaggagatggcggaagagatagcctggatccatgtgttcatttcctcatcgtctttggcttggaagaggtactcattgccatcatttagtcttagcttgaatacgtgtttcttctttttgtaatcaagggccacttcgcagacagcttctttcaaactcacagggacctcgctgtggtagggaattccagaagcagcagtctttgcatctttgtagaaacccatttcttggttatttatgacacaataaacattgtgccaggacctgcttgaggctttcttattgtgggcctcccactcgtgtttccgattgaggaagccttccatctgggccgaaggtgtctcctgggttctggctggtaaggtggcggcactctgggctgggagggcagtcttggctttacgatcagaggtcggggaggggatggggctggactctttagagctcgtcctttgttctgtagcgccgttgaccatttcgcttgtgtccaccgtttctgccatccgtggagatccctgttcagctggcaaaccgttttgggaaacttgttctccttttgaagtatcccactgctgctgggactcggcttcctctgaaaccttcgtgctcggctcgggagaaggcggccgcctcttcctctcctcttcctcttgctgtctgcgcacttccagt

SEQ ID NO: 158129 - DNA, 1000 bp, Homo Sapiens
ttcattcttcattttatttgcatgtcccaacaactcatctcaaatactaaattcaaaagaaaaactgtagttctcctcagcattagcactaatttatggtaacaatcatttcttttaaatgtctaacttatttaaccccttcattttaaattgcaaattaaagcatgtatttacatatttatatacaaaaaacttcaaaaacaaattaatccaaatcttggtccaagagtttccactttataagtggtatggtactatgctatatatatcctcttccaaaagtctcttaggacttggtaagttccaaatattcattcacaaatggttcccctttaagcttaatgaaccatatacttcatttctgagtaaattagaggaaatattacagaacacgctttgtacaatacagcaccactactgagaagggctcgaggttttgtaatccaaggttctgacttaaagcaaaaatacacggcatagattgcaacagcaaagaagtgtccaattaaaactagagggttaggagacaatacagaaagcagcccaacaggacccgcaacacattcgccaccaagtttgaaataaagaaaacaggcttttcttagttgatgcagggaatcatctgtggcagaaaataattcataaagagcctgagcaaggatattcacgacaaaggaatgagatgtttttcttgcccagtaaaatgattttttggcctcgaaaatagctgcatcatcataaaggtcagggataccctttagcagttttctccatagttttatatctttaaaagcaacagtcattcctccaccagtaagtggatgcctcatattatatgcgtctcccaaaagaagaacacctcgtttcttcactgatgaaggaggaaggaagcttgctggcatggacctcagatgagaattgtcagtggcttctaagaatggttctttcaggtgatcaggtatttgtgggtaaattttttcaaccatgtattctcttaaat

SEQ ID NO: 158130 - DNA, 1000 bp, Homo Sapiens
tatctaatattttatttactgatctctctgaaacatgccaaaattcatatagctaagggaacttaccatgctaaaatgctgttcaacatgacaaatttatacaaaacatatttcaatgtagtgccttcatttcattcttgaggaatcaacattacatttaggtggtgaaatacaaatataattatcaaatatcgtgcttctagtttactggaaaacataacagttgtgacagtcacacctaacaccttggttaattaaagacagaaaatgggcaggggtgtcacagaagtatgcaaggatttgacagttcaaactaatccatagcccttctgagaaactacagatggaaaatatgtagtaaatatttctgtaatatggtggtttcagtacattatagcacagtgatcatcattccattcatacactcaaataactgctgcttctgatcactgaaaactagattcaaagtcattgctcaacaagctgatactacaaatcccttatattaacaggtagtttaaatgtggaaataaggcaaagcatacttgttagtcacaattactttcagatataattgagactacactgctatacataattaggtacacagtatgtataacaatgcatactatggtgtggagttaattccaattaccatattttatatttattggtcacaacagcatacattttatgctccaaaatacatggatctgacaaaatggttacatttaatgttcttttaaagaaagatgaactaaatttaagaagaattggtttttcctaatatctcattttcaaattactgatacaaatttgccagagaaacaattacatgttttacctaacatcaaataatctccagtttctaagacagatgcatttcttgttcaatttccaaaagtaaataaaggctttctaactgaaaacatttgcatccctagctctctaaagtaattaaaaagaaaattacaaaaaatgacctctaagcttctgaaca

SEQ ID NO: 158131 - DNA, 1000 bp, Homo Sapiens
tttttttttttttttttataaccactttgaagtttattttacagcactttaattgaaacattatttaactactgaccaggactgtttacaaatgcaatgcttggccttcgagataattaaaaacctttaagtactaaaattttacatcatgatttaacttaagtgttatgatggtgaaaacagaagaaaatctaaagcaaacatataatgatttccacaaaaaccatgtatttctcccttatattaaagggaggaaagaaggaaggaaaaagaaaaggaggggaaaagcgggcgagaagaaaaggaaagagtgcatgataagcaagaaaaatacactttccccccaattcgcaaaaagaagggaaacgctgaggtctcagcaaattaggtattcaactgagtcagtttatattaaggcattttctttacatattattgaatcccatcatgcctttcatgttgccagcagcaccctgttgaaactgcctcatcattgactgaagtcctgccataccacccatgtgatgaagaaccctaggatccatcattttggccatttgttggttcaattttgccatctgtgactggctcacattcttagacatgtcgccacctttgaaaagtcctttgatacctcccatcttttttaccatctgtgcaaacttggtatattgtgtcaaaagttcttgaacatctcttgttgatacacccgatcctcttgctactctttggattcttcctggttgtttactaaaaactttggcaccatccgtactgtctagttcttgatcattcatactatccattattgtcattaatttctttagccttgccattgactcctgttcatttcctttgctcataaaatctgtcccaaaaccagggatcatccccaagatctgactgaaggggcccattttcatgatattttgaaattgctcatacatgtctcgcaacgtaaactgaccatgtttcaacttctctataagtgcttcattgt

SEQ ID NO: 158132 - DNA, 1000 bp, Homo Sapiens
tttttttttttttttatttatgaaatttattttcttatataaattacttatttctctgggcagacagccttcaccttattgcactaatagcacatctgtaatatcaagctacaggacaagtcttaacaagaggtttgtgttcttcaatgtagcacttgtctaccaggcactgtagaggggagtgatgaggaaaagccaggactgcttaggaggtgaaggatgggaggggagggggtcatcatacatccttctgacaattggtttcctcccaggaaggggaacatgcagagcttacttctggattctgggagtgggaagagttgggaggccaagaagcccaatgcaacgctgcagctgagctacttttatttctgagggaagcaaggactcatcttttgctcatttgtaacaaatcactccagcctagctgatgctttggggtaaacaatggagtaggagtcatcatcagaattagaattagcagcaattaacaggcaatacactgccacagtgaggcgggtgtcatccaggtcctggggacctgcaggctgtgtatcctagggagaggtgccattcaagacctggcgctggctctggaagagtctcttaacctaatgcagctgggactcattaggctcagacggctcttgaccacactaattattagcaaagctctggtgttgggttccaaccattggtcaaagctgtaataagactgagtctgtaggcagagtgaagggggtgcctgagtaggaagggggaggcccgctgggagagggtcagtgggcagtgattgtaacatgattaggccttccttgcaaatggcggctgtgctgaacggggagtggggttggaaggagccacaagccccctcactctgcctttgtactacactgaagacaggttgctcacatactctaaagcacattcttgatacaggaagaagggcttgtggggaaagcggcgatttggtattgggcaagagccacgttaagccttc

SEQ ID NO: 158133 - DNA, 1000 bp, Homo Sapiens
ttttttttttttttttttttttttttttttggtttttgctcttttcatatagtatatattttattagttagtttgtactaatacattctcatattacaaaggcaatttaatggaagaatcttccttttgatatttgaatcatctgaaataacacaaacagaacaatacattcaaagaaatctcatttgcataacaaaaagacaagttaaacaacaaaaaaatttttcctttctcacaggtggacattgaagtggacctaattcggttttccttttaaaagccccgcaaacaaaagtcgtttaaaacctatttaaaatgaataaaaaattggtttactaaactactggtctccagcaccattttctgttttctgttgtttggatgcaggttcttctttgtctgtttcttctcttgctcttttcacaggtccagttgcaccattttcatcatgttcatcatgttcatcatcactagcaaatttcgttttcttgccctgaaactgtacttttcctttaccagacccaggctgggcagctttattaccctttccttttcctttaaatctacgaccttttgacttccatttgtttagggattcttgttggtcttctattattttcttcagtgcttctttttccacctctccttctagtacttcccaagtcacttctttgttccttaattgtaggttaccattatttgcatctttggctttacccaatgcttccttggctttttctttaaatagaattatcccctcttttgctcctctgacgaagtctatccattttatttcaccatgatttgagaaaagtatgtgtaaatcttctctacaggtctgatcatctaaatcacccgaaaatttcagcaagcatccaatcttttcttctagagatttcatttcagcatcttcttctaacttttgttttgcttcttgctcctgtttagctcttaatttagcttccactttattttgttttctttcttcattttttttggc

SEQ ID NO: 158134 - DNA, 1000 bp, Homo Sapiens
tttttttttttttttttttttacgagatccatgctttatgaacacattattctcacacatccggggataggtttgatacacaagatccttaaagtcattttacatattctgaaaccaagttgttcaaaagatgaattctgaaaacatagttggtgtagcaaatgaatatatcaaaacaaagaaaaacttcatccaaatatttacattttaaaaagacatttaaaaaataggctacttattaagtgtgcttgaacaaaccatgtgtggaattgaattccattcattacggagttagtttctgctaaatacttactgatgctagagcagacccctggcatctgaggatttaagagttcaactgttctcaatctatgctaaaaaaaaaaaatgacaaataataaattctacatttccgaggcactaatttgaacttcagaagtgggagggctgatatgtaaggcaagttatttaggaatgaggagggctgacagctgtaactcagtgtggttttgcagctgcctacgttagtaccaggtattccataaaactctgtagaggccatttacatttcgtaaattctgtaattacaccttactgtatcatgccctagtagtttcacaaacttagatattcacaaaaatgttttggaatatattccttgggaatgtgaagggtctcctatattacattaaacaaaaaaccatgcagttacttagagctcatagagctttctcaaaatcaattactgatcataacagcccaattaaaaactcaaacactttatattacagatatagagtttataatccagcaatgccaatataggtaatttgatagcccctatttgcaaagtgattaacaattatacaataacttctatctgctttggctcagatgtttaaatacttaaacagtttggaaagacttttttctgtgtgtatttcgttttgtttttttgtctgtgtgggcatgagcataggggaggttatactgaaaagga

SEQ ID NO: 158135 - DNA, 1000 bp, Homo Sapiens
tttttacggttcctatataacgtttatttctggaagttaaagtagatacagcaatataccaaaaaaaaaaaaaaaaaaaaaagacaaaaaacctcacaataatataaatttttacactatgaagtacacattggaatttgaatgcagtggccaggacagcagcttataaaccaccttataggtaggtaagcaacccacgggattccctcggctgggctggggatggggagggggcagtggacaggaagcgggcagggcctgaggaccctgttctttaatgggccacaacagggctcagctcctctcagaacttttgctacaatcagagttaagaccagatacatgctacctaaggccatgaacttgacaatatctgctccagagaagccctgaaccctcgccctaggtccctatgatttaaacccaatggtaagcccaagtctcacctttctaaatattctgtttatcagttaagcttattatgtactgaagagtgttgctggagaagtaagagctctgcatgacacatcaactgtctccaggcaggaggactggggcgaaccctgttcatcttagagaaggtcgtctcccccttaattcagagaccagctaatttgatttaacaaacagaattccacagaaactctgatcagctgaggcaaggtggttttgagttgccaaatccggccatgcctctgagtcagaggcagcccatccagcacgtgctaggtgttcccatacgcacaggagaggcgagctagccagccaaggcgggcaggcggggaggccctctagctgttctgcctcacctgtggggccccagcagggaggagtcaccagcctcagagggaggccaggtatacaccctcatacgagggcagactcaagtttatcagtaagcctttgccctgcatgaactgaatgaagacgccattacaagtgccactggatatcaccaagaaactggctaagaaccatattccctgagctcaaccagaca

SEQ ID NO: 158136 - DNA, 1000 bp, Homo Sapiens
ttttttttttttttttttttgaaaccaataaaacgtaacactttattattatttttatcttagaaggaattcaccaaaggcttcatattatgctatggcatctttaattataaaaataagcaaataaaataacttgcatctgtcattaccatgatatgtttcataacctttatatgcacatggagcttaaaaatgtaatttaacaataaataatgacatataccagatatgctcactgtttattccagtactcagccaaaaacctaaatatcatttaaattataaatacataatgcaaatataatggcacaaaaatgtctaaagtgcaaccaaatcacaagagaagaatcatgcaaactggtctaggtcagcccccgaatcactctgcagcaaacacaagacgaagctttggaagtttaagggggaattggagggagtagggtgggggaaagagaagcaaaaaactagcaacattgtgagaactgcttctttctgtatgtgtagatatatgtattgtagatacatatatagatatcatcgtggggagaaaagggggggtaccacggtttgaagaggtcacagccaaaaaaaaaaaaaaaaaaaaagaaaagaaaaaaggaaatctactgaactgaagaaagagagaaatttgctaggaatactcatgaactacttgtcgcattggggtcctggcttagttgggtttgcaaaatggacacaacacacaaactttaatagcttttctgattcagagaagtcagccttgcctgggggtgggaagtgtgggagggaggggaagagtctaacttagaatatggtctacctgatttccaagaggctaaggcagtgtccataagtttggggacctggggatgggacagttctgagtataaaaatgcccttaacaatctgatgtcagcacgcttagaggctgtgtggggacaaaggcagcaatgtttgtgctgctgctgctgctgctgggtctgctgcaattgctctt

SEQ ID NO: 158137 - DNA, 1000 bp, Homo Sapiens
ttttttttttttttttatgttcattcaaatttgcatttaatttctatttacattcattcaatccgaaatcaaataatacagtcaactaaatacaagatgaaaagcagaacaggtgttaccctcatagcactcctaataaggcagctgaagaattttatttactgatagatgcaaagcgaacttgggataggagaaacaatagtttaaagagcaaacacaaacatagatgaacccatctttcagatgttattccggataatccactgagataatacttgtgctataatgttaagaatcacacaagaaaaagtactgtattaatcagcaacagaccacaggttatgtgtgacaaatacttttgtgatagtttgtccagcttgctagtgtctactcctatgaaaaaaggtagatgtttggacattgatgtttttgagaaattaaccattttcaaagccttaaaatctattcttcataaattcaacatttctcatgggaataatcttagatctagcccttgtaagctaggaaccatatgattaactgaatattcaaaataggtcctatattaaatatataatccaaggctcagtatattaatactatctaagatgcatcttgtttataatcattcattacctatagtaaagaatgttgaatttatggagtatcatacatgcatcctccacccctgcccacaaattatcttctatcttaaaaaatagtatggaaaaatccttcttgaaggattcaaattagttaagaccataaagggggaaaaagaacataattttcctaaaaatctggttcaaagttcaataattaatactttacattgttaatcacagctggtttataaatcccagtttagttattctgtaatgctacaaaccttataaaatcaaattagtaaacttcagtgattatattttaattaaaaaacagcatgtataaaataaaaaaatatcctgtaatagctgattttaaagaaaataatcaagtg

SEQ ID NO: 158138 - DNA, 1000 bp, Homo Sapiens
ttttttttttttttttttttcaatagaaacactgtttattcaaatgacaggcaggaagcggtggcagcagcaggggggaaagggcagccaggcaggggctgggcagtgcttccctgtgtcccctgcaatcctgcttggacagccacccggctgttggcatcagggtcagaaatactttccctcctctccctcctgccccaaactgaataaatagcatccctctccccacgagagctaggggagactcatgtgctgagtttggtgccccagtcacagcccagagtccggtgagggcagaagttcaaaatggcttgtagggagtagaatacaaaactgttctactcattctcaccttcctcttcctcctccctgccacactcccctcccagcctggtcccaggacaggtggtcggtgagggtctggagcgggagaattgttgcctagcatacactgagctcaagttcacaaggccatccagcctgtcacccatccgggttgaccaccaaagagaacgtctcacttcacgccactttatggacataaaaggaggggcagggagggaggcagtgggcagccaggcctttcccagcctcagaggtaaccagagtccgaggagcaggccccctaccgatccatctcgtccaggagtggggtggcatcgccagcaatggacatgggggtgctttcgatcatggggctgggggagggccgaggtgtcagccgctgcttctgtttccgccgttctgcctccttttcctgcagccactgctccgccatttttccccagtcgatggctgcatggctgttggactttggctgctgctgccgttgccgggagctggaagagggctggggctgggcctgggccgactgtggggtggtgctggcctggagctggtggtactgaggggtggtgatgggctggcttggggtcgtgtaggagtagctaggggtcattagtggtgtggccactggctgctgggctggcgttgggaatac

SEQ ID NO: 158139 - DNA, 1000 bp, Homo Sapiens
caataaacagtaaatactcacaaaaggaggggcttcactaataactggacgaatcacattttgcatattgcgtttattttgcagaaaatgctttctgctgattgtctttggctactttgtcaaaagaaaaatatgaaacagttatagtttaacaacacaagagattagctacatatgcttaaaatacacacattctagggggcagagcagtcaaattttcaattcaactaaaacctgctgtcctcaactatgattttattctgtccttaacagctcaactctaactacttgaaagcaacaaggaagaagattaagagtgtgctttttatctcactaaagtaggactggtggagtttacaaattctggtgtgccaaagttgccaatacactgtatgagaaataaaccaaaaaaagtttctggaccctggcaaacattttttcaccgtcagtgaggttgggccaactgcatcatctccacagttgggttcatctgtaagccacctgggacagcaccgctactgcaggtgtgagcaagggatgctggggctctggggaaaggtgccgtgtgctcctccactgctttgaaaaggaagttactgaggctgcatttccttcttaacctgagactgccactgggtacctagtaggtcaatccagtcaccactggctgccacgacaaaaagtcactgcatctttcgggacctgggccttgctgcttcacatggaaggtggcgacacaggtgtccatgaggctatgaggcggccttgggctgcggcgtcgtactggctgtccacgatgtctgtggccgcggccgccccttcgtacagtggggatcccgaggaagagggcgccgagaccggatgggtgaggggtgtgtagtgcgcgggggagccccggaagaactgggcccccagcccgttggacacggctgctgcctgggagcccggggtgacggcgccgttgctcacagaccacaggctggggtactgactggagctg

SEQ ID NO: 158140 - DNA, 1000 bp, Homo Sapiens
ttttttttttttttttttgagaaaagattgattttttttttttttttttgagttccaaccccaaaaatattccaggacaagatagggggcaggctgggctggttcttcttcaatgggcttttgccgccaaggaggacagtggacttggcccacatccaggctacccccagcccgcttctcccctgcttagcccagggaggagacagtagaggtgatgggggcagccgggagggaggggccaaggcagtgatgctttcgggtaagaagttgggctgaggctgggggcacagggaggagctgcccaggtgcagttaccattgctcagtgacagagcctcaaagcttggccagggctgaaggtaccacacgggtgtgggtgaggcaggctaagcgggatggctgcagccaaggagctgggggagggccgggctcagggctagccctctccgctctaactgatgatctgccgaggtcgtccgtagcctgtcatgccggcctgggaggcccctctgttgctgcccatctgaaggccaatgacatgctttccctcctgcagctggctctctgtgaattccctcttatgctcctgcgctttcttcataaaccagttgggatctccacggtagtgcccatcattcttggtcactgccaagctgcccaaagccatcagggtcctctgcactgctgccatgtctttgccttcaaagaggtcaacagtctggaacatgtcagtcttgatgaccccatagtcctcagccgccttcaggaactgagccacctgctccatctgcttgaagaccatggagggtgggttctcgggcaccttcaccggcttggagccatcagggtacaggctgttcaccagcttgctcagaatcacgccattcttcagccagacctggaagcccaagcgcccacggtctgggcggcccacatcagggccacactgcactatgatccactccaccagccgctcctccagctcctcgtcatacttcttc

SEQ ID NO: 158141 - DNA, 1000 bp, Homo Sapiens
ttttttttttttttttttgttttttttggcaaaaagaaacatttaataatgagggggaaagggcagaaaggtgcaatccaggcaggcaggttgagggcaggacatgccgccttctagggtctccagagaagctgtgtcaacggaggacgtgggccggggagggcccaaggctgcagcacatctacacgaggggtcagcagaacttccagcggtttccacactcgttgcagacaacaaaggtggtcatgggctcatcagagctgcgggtctgcacctgtgtgtaggtgcagttctttttcctgcacttgccgcaggtgaacaggtctgtctgcgtgccgccagtgcgggccatctggtgctctcggatggcctccttggtcatggccttacggatctccttcagctcatcactggccatctcctctgaggtcatcacagcgatctgctggggtgttatggccccacacagcacattccgccgcaggtcagggttcttggcatccttcaggttggagatacgactccgtacacggttcttatacttcatgtctgtgtttccaacgtcccggaagatgcattcctcgatctgagccgacaggcgctcgcagtccgcaccgatggccacgtggtcatggtccgtctgcagggcagcggtcagcatctcgcggcacttgttgcgcacggcatcacaggtgacaggcaccggaggaaatgtggtgatcctcggagtcgacggtgccctgggcagctccggcctcttgcggctgggatccggggcctctgaggcatccctcgaggacgtgggcagaggcatgcccctcccccgctccctggctttggcatcggaagcatccaggagcttcttccaggacttgatgagagacttggccagtgcaatgacctcctcatccgagctctgcttccgaagggcgttgacagacatcccgactcgggtggactggagcaggtgcagcgtgataggcatggccttcagctcccg

SEQ ID NO: 158142 - DNA, 1000 bp, Homo Sapiens
tttaacatctgggggcaatatttattaattaaaactacgtcttatagtttacaaagatgctaatgaacaacaaaagtataattgacctttaaaatcctcagtgagacagaggcttcacatcttcagaattctaaagtgtgctccaggcagggaggcggggctgtggcacgcaggttcccaggggcagcacctgcagactgcagactcggagaccaaaaggatccacaaagcaagactccagtctcctgtagaattccattccccaacccccactgtccttgtattcctgcctccccagattccatttccaaggcaagtcctcagtttatcgtcgggagaatctgttcttgaaagctttaattgtcttggccatcattggggcaattttcttcacagtgggtttcctaggatcataggaaacagtgctgctgaccactggtgccaagtgggcactgctggtgcttgggccatcataggccggctcctcagggctggggttaaagctgatgctactggcggaagcatggctgcttcccatggggtacggggctggcttgatcttgattttctcagggacagctgctcctcccgttccaaacttttcctgcctcctccggacgtcacgaggtggcttggccacagagttgacaaaggccatctttgcttgtcggcctttgggcttattggcatgtgcgaactggatattctttgttagtactcgtagccgctgctctcgggcgtcctgaagccgcaggtacatctctcgccacgactcatactcttcgggtctttcttccttaaagtctcggtgacaatgaactttccataattgatctgtttcttcaattaatacatgattgtattcctctatgcgatacagctgatcaggtgtacacctctccaaaacgggttcaagaacagagtatgggactcctcccacttcaaagattgaatcgatgttgtttttaagtactcggatgcattgctggtgcaaggtcat

SEQ ID NO: 158143 - DNA, 1000 bp, Homo Sapiens
gccgttcagtctctgggctgtgtctcagcctgtacatactgctttgcacattctgaatgatatgttaaagaaagtcgtccctcaagttgcacttttttctttcttttttttgtttttctgttttttgataattgggaatgctgaaacctcttgcgtctgcgattcataactactcagacttgtcttatattacaaaaatgggggttaaggagaagtgtttatgtgggtttaagataatacagctgttaaggaagtggtctcttgttttaatgaagcaatgtggcaacttggacccttttacatctgtcccatgtgattcgatgcgtctcccattccagggtgtgggccggccaaggagagagggggaggctccgaggacaccttctcttcctcccttcttttcagacacgcagctttcggattcagattcctttctcggacttgctgctccagactgaggatgacggccaccgcctggtggaggatcaggagcttggtctggggcttgtcactcttgaggtggagctgcaccatgcggccgagctctttgaaagcctcgttgatgtcacggacccgcagacgctctcgggcattgttggccatcctccgctccttctcacgctctgccttctgctctggtgtcaggtcctcatcgtcattattgctagtaattgatttgatatccttcttgtcgtcatctaatttcttgtcctccgaagatttcgtgtcttgcaggttctcatcaccctcgtcatcggatttgatctcagagctgccagaggagacactctgcccctgtagtcctggtggcatgcctctgtaagggtcctggggtgggttcaggtcaggggaagtcgcagactggacaggaagctgtggaaccggaacctggtttggcagaagagaatggctgcctctcagggccacgccatcttcacgatgggtccccaccatgagtgaatgtctgttggctgaaagaaggccggttccataccctgag

SEQ ID NO: 158144 - DNA, 1000 bp, Homo Sapiens
tttttttttttgaatcatccattttattttattttgtcatgtgctcaacagcatctctctctctctcccctctccctggcaggtcacagagataaattaaaaataaaatctacaaggaaaataatttataaaagcactcccaggttcacaccttctatccctactgctcagttaggcaccccctaactgggaatcagtgcttccccccacccccatttcactcccacttgtctggggcagacggtactccagagccgggcaggggtgagggcagcagtggcaaacagttaaaaataaagacattgtagtcctggaaccatctggccaccttggcactcccatgtctgcctcccccaggcagccctccaggagcctgtgcgaagctggggctgtggagaagctgcctgtggctgagagcttgtgtgtttggggaggtgctctcagcctgtcatatgcacttctcaatcttctagaaagaaacccaaaaaagaaagcagacgacgacctcgggacagaggagaaaaatcccaagtgttcacacagttacacggagtctttatggcaaagagaacatttagcagctttgaatattgggaatctcctttttactcaacacaagcattctagaccctataagtgaaacagggcacaagccctaaaaaaatcaaagcgcaagaaattctaagaggactagttcttttgttgttgctgggttgtgtaattttttgtgttttcccagtgataagcccagttgttggtaggcagaggcccgagggaagggtgactccccagtgttgtgctgaatcctgcctggaggctgctacactagattctccatcattcctctgcctcacagcagtcccagaagaggaaggctgcaggcccagttcccggagcactgccatcaccctaccccagcttacagaagagctcaggcagtctgtgaggggtggggaacacaaacaccggaccaggggaggacggcatacacatgcaggct

SEQ ID NO: 158145 - DNA, 1000 bp, Homo Sapiens
ttttttttttttttttttttctcatttcaaaatatttaattttgtctgaaaaggatacattcccggcttccctcccaccacatcactccggcccaccagcagtgacacactcgcacgcacacacgcacataaggccaatgggctacggtctgcttctgccctctctggctgggaagaaggaatttctctcttgcctccttcccccaacaaaggtaaagagaggggcccgctggaatgccagctcccagggaaggacacagagccccacacactctatcacatcacatgcacttagaaaaataaaaccaagtggtgttctggcatccccaacaccgtaagagagcaatatccacctggaagtcatctttgccattttctagaaaaatttattgcacttaattagcagatgttaaaggagctctggagtagagctttgccatgaaaaccagatgctcctcggccctttgcgttccaaggagcacggctcccggggcccaggtagagggctgcccagcttcagaggggttttcccccactggcttgcatgcctcccgccctgcctcaggccaaaggaccgtaggagcggcctgcacagcccctcagcagggttacatgtacccagacttaaggttcactgctaagtgccccctccaacctcagaagccagacaggaaaacctcttcctttggccaagggtaagagttacccaggtcctccacaaagttgccataaaccttgaaaactctccctctctctaaatgcacacgttcctccatcagatgagacatttataatatgaatattcttgcaaagttccagctcattcatgatttgtctgttctgaggttgcactgagggtgccacaaagctttagacaggatgcttaggaagtagacggcacttccaagcccatcgggaacccacagaaagccaaggtaaagtcaacttctctagcctccagtgactgacagatgtcaaagatccaagcacaggagccgca

SEQ ID NO: 158146 - DNA, 1000 bp, Homo Sapiens
ccgtgtccaacagccaggagcctccaccctccaggagggaagggatggacagagccacactcgccgtctttattttgcactcaccctgggtgacactgggcaggccgctcctgcccacagccagactgaggaagaacacagcactcggcaggcccagtggggtccgtgcagggaggaccccaggaccagccttactcccgagcaggggacacagggccccacagagaacccctccgggaggttctctcctggctgggggagggctctggacccccacaaacactccccaacttgcggggctggggcataaaaacagccactcccagcaggccccctcagctttttgcatcagtcagctccctcccgggggattagggtgaggtgaagccaggcccaggcgtggggtataggtcttcccccgcaggcctcagccctgtcccgaggctgcatcacaatccagggcccccgctggcctttgggaacatggcctgggtcttcctcaaggcaagatcagccccagaccacttccggggtcacggggtcacggggtcacagggcagaagccagatggcagccatggctgacgggcctcctcctcgatggggcggagacagccacggggtctcccgagggtcccacagggctgtcctcatgcagcccaagccagcctgagcactggagccccaattcccaaccaggtctccctcagaccccccagaaagggcctcgaaaggccgccgctgcgccctgtggaaaggctgccgctgcagggcctgggccagccgggctgccagactcccctccaaagcctccggatgcctacgcttttccagacatagaggaaagtttgtcttcgagaaaacaaagtaaatagaagaaccccaaagcaaagcaaacccaccccccagatcagcagcatgggagccaacaggaggccactcctccagcaccaggggaccagccgtcccgacggcagcgcggctgcgcctacgtgatgtcc

SEQ ID NO: 158147 - DNA, 1000 bp, Homo Sapiens
tatacctttacctccaaaaggccctactccttaacgagaagacatctcaagaccaggagcttgtcactagtctgatatttcattcaggaatattgagcctgttagcacgtactggcttgataggaagtaactcaaccctaactgtagaaaagggttttctgaagagactcactgctgcaaaatgcatgccctgtattcatattgtgttatacgatgaacatgccacatgctttcatttaagtacgtgtgcgtaacacccgaaccaggaatctcagctatgaccttttcacttagctacgctaaatgtcagtccaagataaaagaggagattaaagataaaactgaagattaaagagactgtgagtagtgacacattcaagtgaggctgtaaatctaggtaagtgacactaagaacctgaagagaccctatgaacttttccctaggaggccgtttccaactgccctatgacaaacagctgtactacacgtttatatgatggttcactcacggagcttcgaacttattcatacctacatttaattgatcaccacgaatgggtaggcagacgtgtcagaccttcaggggactctccttccccacagcccccaaaccttctatacaaagtccctctgctttaagtcaaaaggtcaattctggattaaaacttgtccgcactaagtttataggaggtaacatgcaaataatgtgataaattaaaatgacttgtcaatagcaaacattataaatgtatgctgctatctcattaagtagaggacctggagaaaccataaaggtaacaaaaacccaagctaaatttcaaattttgtagtaatttcattttacagtggttgaatttacccacccaatgcttaatgaccacaaaatgtttctgcaactaaaactaaaagatagggaattataggagttgggatacatgttagatactaacgatcttcaagctttgaagatgtcattgcatgaagaaaattatgggaaaca

SEQ ID NO: 158148 - DNA, 1000 bp, Homo Sapiens
cggtttttttttcttgaagtagagtttaatttaaagcttattgatcatttgagcaaatctctggagggcagaacaagaaggagcaggcttcagttaacagaagcagccttgagttgccaggatagtggatggaataccaaagaaagagttcacaccagggaggaagcaatgccttctccctggagtctcccaaggggcagctttagaataagggaagaggatttgctggtcaccgtttgctgacatgggtctctatggtgagttcaggcctgaggacagggttgtctgcaaaaccacatggcccttgagaaatgtccttgcagattgggcttcaaactgcttggagcaccaggagagggacttcctggatttcagggatagagagaggagaatggaggcaataggaggagaatgcacttctatcaggcccatcccagtgctgagagagcactccagttgacaggtgccttcagggctggtgaacccatggcctgaagatatggcagcttctcaagggtcgtcagcaggtggcagcactgggctgcccatagtctgctgctccagggagagactctgtggcttcgaaatctatggatttgaattgagacaatggtggccctgatttttgaggccatgactcaggaaagggatgggattctgtggcctcggctggtgtttctaactgtaaaagaggtgaccctgtgatagcacaggacctggccttgtgggtctggctgcttatggttgtgttggcctttttgacctgctggctcttgaatctgccctcatataagtcatcaaatttaatcatccataatctgaaagctaagcacaaggtaggaaatgctgaaatctcaactaaggctccacagcatcagacaaggctacttggtgatgagaacaatcttctgagcattaatctctttcacttgtttggaacttaacttgacgataaatttcttgggtccagtttttattggggtgcattttatttgggatt

SEQ ID NO: 158149 - DNA, 1000 bp, Homo Sapiens
tttttttttttttttttttttttttttttttataaatataaatttccatatgatttattgttgttccttgtacataagaaacagtaatatacaacttacactgctttagaatgtaaaatggataaaaatgtgtacaaaaaaaagcacattcctagaaaaaggtattggcaaatagtaaaaatgggaggtcaaaagcaaaaaaaaaaaaaaaaaaaaacaaaacaaaaaaaagaaaaaaccaacaattcttcaattcagtgtgcaaacattatataaaaatagaaatactaactctacaggcagtatttcctgataaattatttaaatagcatatctacacaatctgagatatctattccaatggcaatgagaaaataatttataaaaataaagcaatggtataccagatgatagaaaaaaaacataactttcagaaattgtatttaacatttcaatgctatttccttattgggaatacttctctgcagagtttttatgctatgtacaacactgactttttaggtactacagtagctttaagtttgttagacacttaaactctttccgcttgatccaaaaattctttactcagtcacacaacaaatgaggtaatatttgtatgtaagtttcaccttttgtcatttttttctcttttggaaaaatgaaagaaaaaagtgtatatgctttccttctccctggaaatatgcacaagggatggggtaaaacagtattgaagacctcatggctttctttgcaatttaaaacatttgcaaatggataaccaactaattccacttgaaaagataaaacagagaaaaaaagaatcccataacatccactctgagcacaaggggcagagcagcttattagactgattttccttgtgctgttcttgcaagagatttgctgataaatgtcaactacttgctctcaaacactttccgtatgaagcctaaatttccaggcagaacagagttaataaataatctgtatttacaat

SEQ ID NO: 158150 - DNA, 1000 bp, Homo Sapiens
tttttttttttttttttttttttttttttttttttcaattcaacacaccttttatggagtacctactctatgccaggccctgcaccgggcactggggatacagacatgattcagacacagtctagcttgggaaacagactcatgcccgactaattataaaacagtgagataagtgtcacagtagaagcatgaaccaaggaagcacagacaactatttctgcctgggggagctggggaaggaggtgacacttgagttggggcctcaaaggacaagtaagatgttgccaggcagagaaagggggaagggcatcccaggcagagggaactacacagcaaaaagcaagggagtctggccatgtttggcctgctgaggaagggaaggtggtcttacgggatgggaggtgaccagccctgctgagcccacgctcccagctttcaggcacctcctgctcttggggcagaggcctgggagaaggtatggcactccttctccttccccatcggccttctggggggcttcagggagaggctgcattgcctgccaggtcctcgcagacctccggttcctcctcagaggagctcggggagtccgcctcactgctgtcgtcttccccacagaccgctcgggcatggagaattccgcttcggtggagcagctccaggagacgctgctgcgggctcttcgggctctggtgctgaagaaccggcccttggagacttcccgcttcaccaagctgctgctcaagctgccggacctgcggaccctgaacaacatgcattccgagaagctgctgtccttccgggtggacgcccagtgacccgcccggccggccttctgccgctgcccccttgtacagaatcgaactctgcacttctctctccttcatcagcagcttgggccagaagtgcggaatgttgtgtttgcggtggttgacgtagtgctcgaacgccagcaggtacgcctcctgactcttctcgatcttgtccacacacagcaggc

SEQ ID NO: 158151 - DNA, 1000 bp, Homo Sapiens
gtagtcagaattgtctttattgactttattttagtttttgtacataaagaaaaatcatgttcatatccatcatgaacaaaaacttaaaaaggcagaactagaagacacgtgtccttcaccaaagcaaatctgtgctaaaggttccaaacatttcaatttttaaaataaatattttcattttccgatgtctactttcatgtcttcagagtgtcacaggaaatcgaagcctatcatgaattacaatttttttttagagtcccggctcactgtgtttggtaacttgccataccatatccggcttggttaggaggaggtattacagggggaggagcttgtccttggggaggctgagcaccaaatccacccatccaagcagcagaaggtgattgatctactccaaatccttgttgattccatggttgcccgtatactccataaggcggtacttgccacccatttgccatatactgtccatactgttgtgggtttccatacacttggctccattggccccattgactatagtcaacctgttggaagtttttagtcatatcaggagattctttaccccaatagcatttaaccacatgtccttcaatcgtagtaccgttcaccgaaacaatggcatgggctgcactttcatgggttgaaaatctgacaaatgaatagcccttttctgggaaaactcttatttccataatttgtccaaatggtgagaatgtctgtctcataagctgatctgttaacccagacgcaattcctccacagtacacagtacaattttttggacttgactggtttactacatcttcaaatctcaactgcttagtgttgttttcttgtgtacttttaggtgcaggtggtttacgagtggcccaattggttcggatttgacgaccacccaaccactgaccgcccatatgcacaatcgcattttctgcatccagtttgttataaaaagatacaaaaccatagcctttggattttccagttgccatgt

SEQ ID NO: 158152 - DNA, 1000 bp, Homo Sapiens
ttgctacaaaaatcttgactttttatttaggagtaagatataatctatcaaaacaaaacatcacataacacatgtaacttactaaatttgtgacatgaaatgtgaataatattaaaattgaattatgcgaagtatcattggcctttgaataagttatagtcctatttgaaacattggtggatctgattagctagggcaggggttcttaacctacaattcacagacctctaagggattcacggatagaattcagaagatacatgaacttggatgggaaaaattaactttaatttcactagcctaaaactaaaatttagtatttccttcaatgacgagtgcagacaacaatccacagttgtactagcagtaactttgtcaacagaaatcaggtattttcatgttacatcacagttgttgcagatatctaatatatgttttatgctacttcaacatcatagcagttattacatccactcgtagatctggctattaaatgcacacctataactaccacatcataaattatttggtagcttacacttcagtgtaattcgtttcccttgtaaccccatgcatttccttttctgcatttaaaaacattattctggccaggcatggtggctcatgcctgtaatcccagcactttgggaggccgaggcaggtggatcacctgatgtcaggagttcaagatcagtctcgccaacacggtgaaaccctgtctctactaaaaaatacaaaaattagctgggtgtggtggcatgtgcctgtaatcccagctacttgggaggctgaggcaggaggatcacttgaacctcaggaggcggaggttgcagtgagctgagatttcgccactgcactccagcctgggtgacagagtgagactccatctcaaacaaacaaacaaacaaaaaaaacccattattctgaggagtccatgacacaaaaaagttaaagtgatctaggaaatcattgaaaatgaaataagaccaaagtgtgatga

SEQ ID NO: 158153 - DNA, 1000 bp, Homo Sapiens
gtgaacatagcagaggaggtttaataggataagtcagctacatttttaatgttatcaacttatcattaatgtgtatacattagcgccctactgaaaggaagtaccagtctttgggcaaaacttaagagattccttgaggaacctacggcctgaaccttaaaaaaaaatctctaaagaccttacagtctgctgctttaccatttcattttaattatcaacactggagttgcaattggctaagttgtcaactgtattttaggagtctaccaatgtggcactcagaatcggagtgaccatcagtgacctaaagaggtaagatttgtggaatactttagtccaaaagctttaaaaaactattagaccatatattctatatttttaaagtgaattatgcataaaagtctgtgcaaactacaacatgattgcagtaacattctcaagaaaaaaaaaccctagtatactttagcattattatttaagttatacaaaatacatctttataaaagtacagattttctttaaaaagtttaaattatacccactgaaatagcaaggctccctctttagtactaaaataagggtttatcagtctacattattgcttattcctatggggccattggaaacctgtaacaaataaaaatcaagttctatttcttaaggaaaagtgccctaaaaattcagctgtcactatgcttttctgaagcttttcatctgaggaatcgtccataaaactgttaactgatgctacccaaggcttggtttgtcaggatccaaagttgagtcttgcaaagttcctgcttgtgccaggaagctgttagtttgttgtccccaatcatagtaatctggagcaaaacctccctgaagtccctgaggggcaatgttccaggcaaggtcatcatcactgtcatatcttcgagggttgtcaaagaaataagatctgggactgaatccatggctggggaccattccagggttggtaaggtcctttgtaggattt

SEQ ID NO: 158154 - DNA, 1000 bp, Homo Sapiens
tttttttttttttttcttcttaaaatgtgtattttcagaattacaatgcttacattttaaagtcttaatacaatggttttaatctaacaatatattacataatatgaaaaatgacttttcatagtaaaccatgaaaatggaatacctgcagtgtcaaagtcaccaacttgtcaccttttccagtcacagaatcccaacacattgtattaatgatgactggggggggtcttacagcctgatgtatataggatgaataaatgtagagaaaggagcattttcatgaaaaataaaatttaaaaaccaggtaggatttattttaaagaacacagttgaaagtaaaacatttacatcagcccagtttgcccttttataaaaagtagtatagcttttcattttatatacaaacctgcagtgtctgatttcattttaaaacttaattttaagcactaaagaaaatttgaatagaagcctgtgtgtattttctctgctaattctgtatgggatatctggcatctccactaagagtaattaatacaggatctgaccctcctaggctgtgctgacaatggaactgttgtaggtaaagtcattttcagattaaatacaacaatttccacattagaatcagaagagttataatttttccaatcataggacatcccatgaaattcacaaaaattataacttattttattttccatttgacagtatttacatgttccacagatatttgtaaaacggctgcaaattccttgcttttcagatacacattgcatatctggcttcacaattatttaacatctctttatcaacaaaaccagcttgtctcaaacacatacaccttactttagataaaaacaataaacatccaattacagttactcttttaggacttttatgatgaacattaagaaaaaaatgacaattttgggtgacattcttctttgtcttaaagaggcagaagcattcatgtaacatagtttgcaaaagatcttttggg

SEQ ID NO: 158155 - DNA, 1000 bp, Homo Sapiens
aagaagcttcaatattcacttttattatttataaaaaaaaattaaggtaccagagtgcatatggtgtactgtgatcttggttttgcaaatttattcatgtgttttacattatttcaattttaataaacatatcatatgtgtatctttacaatacctgataaagattcagctgtctggcacttacacatgtattcatagagttcattctgatgctctgaacctcaagaggatgtgaaaatgacttgcctgtaattaccccaagatgaagatttattgaagcagttatgctccagcaactgccactcatttgtgctggttctactttttccccttaattgaatgtaaacatttgccaaaaaaaaaaaaaaaaaaaaaattctggaaatgaagttctgttagtttttagtccaataaataattttagctacgcttaatgtagcttttttaaggccttcatacaattgaaaaaaattaaagttgagcacgttaaaaccctgttcatttataaaataaaaaatagtactttataggtttgcagttaaaagttaccttccaaaacctatcatgcatgtcataagctgcaacccaactcgaagtcctaggtgctggcaggcagggcacatccccgtgccagcaatgtgaggcattaagaaaacaccatgatgtcagaggtctagatttacatgtattaagccacacgtcagtgaattctctgataaatacatgtcattttaataatcagtactggatagtggatgaaaacatgcattagactaaaaatgccacaaatttgtttttatacccattcactataaaacttccttttttaaaatttaaagtcttgtttcctattttagaatacgcaataatcgggaggatacatgatggggagccagttttcagtaaaagatgcacaatgggtccatccaagtaacttcatcagttgaatacaatttttccagttttcttttgttggtttttcttccacaagtttagttgc

SEQ ID NO: 158156 - DNA, 1000 bp, Homo Sapiens
atttgggatcttttttatttttatacacatgacaagattttacatcaagaatagtcagttaaatagtacaaatttacattcatgaggaatgttaaaaaaaattcaactaaaaaacccactttttcctgtgacccataatcccacattttacagtgcaggggagaaggggattagggggcatccaaaacaagtctctcccaaaaagaaatgatgtaaatttcacattccctctccacacaggatccaaatggtgagagtataatttacaattcatctttttcagctgtagattcctttgctgtttcttcttcttcatctgttcccacatccatttcttcatcttcgtcttgctctgtgtcttctgttgtgtcttctgctgtctcttcaggttcttcttcgggctcttcttccacctttgcatcagggtcaatgttcaaactgaggcgaagcattctttctattctatctccatatgctttagtgtctggtaaaagataccctgaccgaagcgttgctgtttcaaacaaaaccacagcaagatccaaaactgttttatcatcttcatcttccttaattcgtcgaagcatgtctctgatcagcgggtgtctgggattaatttcaaatgttttcttctgactcgcatagtaatttgtagagatgtccttgcccgtttggtacgcttgtgctttcatgattctctccatgttgccagaccatccgtactggctggccaccaaagcacacggagattctgtcaggcgctgagacaccacagccttttcaatcttgtccttaagggctttatctttcatccaattcagcagaggctcaaattctttctcaactgcttcacgactctccttagttttctcactttcatcgaacttcactccttccttggcaacattctggaacctcttcccatcaaattcgggaagggcctgaatacagtattcatccacaggttctgtgaggtaaataacttcatagccctttttca

SEQ ID NO: 158157 - DNA, 1000 bp, Homo Sapiens
tttttttttttttttttttatgctacatagtgaagactttttatttttattttgttggcagttcagttggtttcaacatttattgagcacctactatataccaggcactgtactagatgctggagacacaaagatgaataagacatggtccctgtccccaaggaactgatagtctcttggaggcaaacaggtagtgcaaagatgtggagtttactctaaaatgaataaaagtttcaataatatagtaatattgggcttttcaacacaatggtatgccactgtaatgtcaaagcagacaaataaaatgcattttcatgtgataaaacaataaaaccattaagagctaacttttaaaggttcacatgataaaggtagttaatactaaaaatttacatcatagtttttcaagtatttcatacttagaaatattattgcccacatttgtgctatagtcaaagccaaatccaggttgctgcatcattcacatctcagcatgctgggattcagtttctcactaagtttatgaattagaatggctaattcctcagttgcttggctcttgtcttccaaaagttcataacgaaggctggagatatcttgcttgatttcttttaattcaccttcattaacttcatcattttctttgtctacttgtgctttcaaaacataccgctttataagtcttttcattatctgctgataacgtgttggctgattgagaatgctgttaaaactgtgtgattcaaaaactcttgagttagactgagtgaagaggtttaacctggactttgagttacccattcccatttctatatccttctgaagccttctccttctgcatttgggaaagttaacaattcgcatgatgaaataaacaaatgattttggactaggaactagactgaaaggtggaggtaatgtttttccatcatcaaaataggataaccaaagttttgaacgagcaaacttccattctacatcactgtcatcctcaatttct

SEQ ID NO: 158158 - DNA, 1000 bp, Homo Sapiens
ttttttttttttttttttttttttttgtcagcgtggatttattttatttcattttttactctcaagagaaagaagagttactactgcaggaacagacatttttttaaaaagcgaaactcctgacacccttaaaacagaaaacattgttattcacataataatgtggggctctgtctctgccgacaggggctgggttcgggcattagctgtgccgtcgacaatagccccattcaccccattcataaatgctgctgctacaggaagggaacagcggctctcccagagagggatccacctggaacacgagtcacctccaaagagctgcgactgtttgagaatctgccaagaggaaaaccactcaatgggacctggataacccaggcccgggagtcatagcaggatgtggtacttcagggccctgggcaccctgttgatcacgagcctcccgtcatagctcagggaggcaaacagccacgggtcagccgaggaccagtccacggcatagacgctgtcctcgtgctcctcgtaggtggcgatcacgttgtcctgcaggggctccttgctcttctcttcagaacggtggtcctcctggtcactgatgtcatcgtcgtctaccaagtggccgaagggctccgacgagatggacaccatgttggaaaggatgactctgctgtcactgctgcccgtgaggaccagctggtcatgagagtggttgtagcggacgttccacacccagtgggagtgctcctccagggtcttcacgggttcggtgacatttcgggtgtcccagaacttcaccttacagtcgtctccgcagctggccaagtagtactgcttattgggattaaagtcaaggtcccgcaccagctgtccgtgggcattctctatgcagtagatctggctcatgctccgggtgtcccagccacggagggtggtgtcgttcgctgtggccacctgggtgcagttatgatgtgggctccaccgtcctgaggtgaacttc

SEQ ID NO: 158159 - DNA, 1000 bp, Homo Sapiens
ttttttttttctgtgaaaatgcactttattggctcccagggagtgggatgcaggatcagagtggacacgcgcagggggctggtgtggggagcaaagcgccgggcctgccccggaccctggtttccctgaggaccaacgtgaatgggggccccactggaaagatgcttggggctgcagagcggatggaatgcaggcccaggttgctgggtggtgccctcagctcctggcagggttgacgggtggtggccgctgggctctgccagccgatggtccgctggcacctgatcctgtcttccagcttcacttccgggcctgctcgtagttgtcagtgaaccaagcacaggtctccttcaccgcctgcttgaagggtgtgaaccggaagtcgggcaggtaggtcctcagcttgctgttactggctgtcttcttaaactgcccatccgacttggttgtatcaaaggtgacttccccatggaagtccatggcctccaccaccgcctcggctgcctccttgatggagacctcatcttcctcgcccacggagaggatgatgggctccacttcattgtactcccgcaggacccagataaagagctgggccaggtccagcgagtatatgaactgcctccgcggattccctgtaccccacaccgtcagggccgagccgctgctcttggccaggtgcaccttgtggatgaggccaggcagcacgtggccatcctcgatgttgaagttgtcgtggggcccgaaaacgttggtggggatgacagcggtgaaggtgcagccgtactgctggaagtaggccctgttctgcacgtcgatcatcctcttggcatacgagtacccaaaattgctgttgtggggaggcccattgtggatcatggtctcatctatcgggtaggtcgtcttgtcagggaagatacaggtggacaggcaggacaccaccttgcgggcccccacctcaaaggccgagtgcaggacgttgtcgttcatgtgcacgttt

SEQ ID NO: 158160 - DNA, 1000 bp, Homo Sapiens
ttttttttttttttcttttttaataaagttaaacagtaaaacaaaaattcacaagctgcctccctgtccacccccgcctccctcccctgccctcggtcttcggcattggttccctttgctccaccccactcacagagacacagggcatccaactgagaaaacgaaactgctctaagcacacggagacgtgatgaagggaggaggtgaactgtttccacattcaagattaaactgagtgaatctgcattttctgggttctgggtggttgcccttcattagccaaattgaaaaaagaaattccctggaccagatgcttcaaagctgaagccgccaggaccgccaaagaatgccttgaagatattgtttggatcaaaatcacccatattcatgccctcctcatctaggtcctgtccactgtcatagcgagtctttttcttgggatcagagaggatagtaaaggcctctccaacttccttgaacttcttctcctcctccttctgaacctcagcactggctccactatgccgatctggatggtgcatcaaggcccgtttccgataagctttcttgatctcgtcctcagaggcattcttgtccactcctagaatcttgtagtaatctttcctcttactcttcttcagttccagctgcgcattttttaggagctgtttgtgttcttttgttttctctgtctggtatactttttcatagtctcgtactgcttcttcatactgttctgtgtccatgtaacactgagctcttctcaagtaggcttttatgtaagtgtcatcaagcttcactgcatttgtgcagtcttctattgcatcatctagtttcctaagcttggaattaaccgtaccccgattacagtagagtttagcatttgtttttatattgttggggtctatccccagggcttctgtgtacagttcatatgctagtttgtaatttccttccttaaatgctttattcccatcttctttctttgctttgagtgctt

SEQ ID NO: 158161 - DNA, 1000 bp, Homo Sapiens
ttttttttttttttttttaatcagaaaaagaatctttttaatttgtataatttattagaagcttcttaggaactatatttaagccaaatatctacataagttacaacagaaaaagactgacgccgcaaataccaaactgccaaataatatacacagatttgtcaatgcccataaaaaatgtgaagggctggggactgggagtggtttttctttttacaacaaaatgtacagattactaaaaactaggcatttagtccaacttttgacagcgttttacagctacaagttcacattaaacaaactattttcgcggagggcggtcgccgctgagcctaggcggccagagggtgccggggagggggcacttcctttgtgtcagtgacaagtgggttatgttgaagactctttcctctccccagctcccgtcctcccttcaaaaaaaaaaaaaaatcctggtatttacaagcgagtcctctttgctggcagagtgtgcccagagtgaagtttggtctttagagtccagagccatgtcagcacagagccctctccaatctgtgccccgccctagcgtggaaaacccatttgaatcaccaaaaaaagacaccccaaagctgttttatgcccttctctgcttaaagattccttgagattggatgcgcttggttgtttttcattttctttttttaaaaaaaaaaacccacaaattttagggggggaaaaaaagaaagacgtccagcagtttggcctttgtggtttttttgttccttggtctaaacgcggccaggttgttaagaaaagtcgaagcgcgtggagcagcggtggatggtggtctgtgtggcgggcaggagggaagcggtgaggcagagcgctgggctagggccggcccggcgtcctctcaccaggtccgaccgtatagcaaggtggagcaggacatggtgccgtagtccgagcccgaggagttcaggtgggacaggctggatacctggccctgcagcgccgc

SEQ ID NO: 158162 - DNA, 1000 bp, Homo Sapiens
tttttttttttttttatataaattaacttttatttctgtaacatataaaaggtataaataggacttatgtaaaaaccaatcacctgcacacacaaattatgtgaaattagtttatatatctctttaaaccagagggaggaagaagcaggatgaggtccacctggcccaccataagtccttccccacatgctgtcgtgtattaatagcttctgtggccaaccagggttatctgccaggcagtgcctcaggatggggtggggggtggtggtggtgacgaggtgtgaggcttctgggcatggctgtgagggaggcacttggtgggatacatgcctgagatggaaacagtctcgtcctcacccagcaggtgggacttgtcggtgggggacaagccaagggtcccgcagctgccagttggccctccttcacatgcttatctgatgtggtgcaggaacaacaggcggaggtgagaggtcagtccacagaagggaggtctgagggagcagccgccacgggtgtcccacccaacgctggcaaacagttctgtgcacaagggatgcagctgaatggtgctgacggtggagctcacagagctcctgcattctcaaggtttggatacattctgggaagggtgaactggtgtaagagtcacataatacgtggaggggtgtaataatcaaaaaaacgtagcaaaacaccttctgtgcctgagccagggttgagggagccgagaagaaagtccacagctctgccacacgggccagcagtgctcatgtctgctggctgatcctccccaaagcctctcctgccacctttttttttttttttttaactaaactaaatggtcaatactgccatctctcttgataatgacaaagtgtttgcacaggatgcctacaggtgtgtgtgtcgctcctcactaatggatccgtagtcatatagctgtgagaggcactcctgggttgaaaatgaaggcaattatcacattactgtcagtcctgac

SEQ ID NO: 158163 - DNA, 1000 bp, Homo Sapiens
ttttttttttttttttttcagagaaaacatgagtttattaccagatggtggagatggtgggcctcaagtttggaagctgggggatttaagggctggattagtgcccctacaaatgttgggtccctcaagatcatggttaggctcacggccaagaaagaaaaataagttcacagaggtggggtctctagacaggagtaaggcacacggtgtgggtgaggctgacatccccctcttggtttcatcctggagcagggagcaggaggctccctctgcagccactgcctggtccagtcctcccaggcagggctgccattgtgcctcagcacacgctgaacactgaaggggcctggccttggtacttctcatggactgtcttcagaatgggtatgaggttctcgaaggttgggcgaaaggacgcctctgtctcccagcagttcttcatgagatgatagacctcacagggacatttgtcgggccgtggcagcctctcccctcgttccagcaactcagtgagtctcagaactgtcatctgaccctgagcaatgcctatgagctcaaggaatttcgtgggggggctctggctggagtcacagtgcgtcagcagctcatacagggtcaccccgaaggaccagacatctgacgcatagtagaacttatactccttcaggcactctggggcataccagaacacggggctgtccccatcctcgcgcacgcggtagtactcgtggccttcgggcacggccttggctaggccaaagtccccgatcttgaccagcctgtcgttgtccagcagcacgttgcgcgcggctaggtctcggtggatgtagtgctgcgagtgcagataggccatgccctcgcagatctgctgggcgaagagcagcagctgggccagcccgatgctgtgccggggcaggtagtctcggaggctgcccaggggcacgtactccatgaccagctgcagcgacttctcgccttggtcctcgcagcagcccttgta

SEQ ID NO: 158164 - DNA, 515 bp, Homo Sapiens
tgctgctccagtcaatgaaagggacactttattgaggctccagggccacggggcctgggcaggaggctgcccttcaaggaaagaaccaccttatttgaccttcttcttgggacgcaggttgttggtgtgaccacacttcttcttgcggcagttgacagcacgagggtgaaggcgagcatagcacttgcggcagatcatcttgtcgcagttgtatttctgggcaagctggcggagagaaggctcaataatgccacctcgcaggcgcaacaccaggtgcagggtggactctttctggatgttgtagtctgagagagtgcggccatcctccagctgtttgccggcaaatatcagacgctgctggtcaggtgggataccctccttgtcttgaattttggctttgacattctcaatggtgtcactgggctcgacctcaagggtgatggttttgccagtgagggtcttcacaaagatctgcatgtttgcgtcagctcggccgcctcgctgaagaaaaagaa

SEQ ID NO: 158165 - DNA, 1000 bp, Homo Sapiens
ttttttttttttttttttgccttcctttaacaagcatttattgagtgcctactgtgggcttacaatgcagggcttgggatccggggctccattgagctaggtgacagggtggctgccttgtcacagctcatagtgcagaggtgggaaggcagtgtcctcgtcgtcaccctcacagctcagctctagcaccaacacccgctgcccaggagcaggtgcctggcctgtcagctgctgaaccagttctgtcaccctgaggggcaggtgctgggcctgcttttcaggtgaccatccggccgcatagagcagggctgagccgtgcagcaggatcctcaccctcaacccgtgctgctcctgaagatgagccagcagcgactccagggtcctctcaggctgcccagctggtaccttcagacggtcccaagaggtccacttcaggtgatggaacgtctggatggctggggcaaaaggcatatagcggatgaggtagttttcagccagatgtaggtagctgtggcgaaaggcactacgaggccgtggcccactcaccaccttatacagctccaggcccaacaggcctgccacagctgctgtagtggtggcaatggctgggataatctggcccacaattcgcttgctctgggcacggttgaccggtggaatcccgtagttctgacatctcaggctagctgccgctaccacaaagtccacatggaagttgctgtcatcatccttctcaaacatcagaggcttcaggggagggcccacactccagacttccagggctttgttcagttccttctgctgctcagggccaaactcagcagaagccgaagccagctctagattactagcaaagatgggggccatctgttgggggtcaggctgtggcagcagcttcagcagctccctgagtgcagtccagtcctgtgagccaggcagcccatgcatctgggcatacaggttggcagctgccagtacgtagaggaggtgtgtgtcttgg

SEQ ID NO: 158166 - DNA, 1000 bp, Homo Sapiens
ttttttttttttttgtttattaggtggtttttaatattgtttattagcacagtaacaaatgcagacttaagtagtccacaacatagaaccaatccactgagcaactcctattccacgccttacagttagttaacagcttaaggtatttcactacaggttttcacaagtcctgattcagaccttttttaaacaaagtagattggcatataaaataaaacgcactactcatctcttatatggtgttttatagccacgtgtccattttatatatatgagatgacaatctctaaaaactctgttaaatatcaatgttcccttccaagaagggaaaacaaattccaattttgttttaaacaaaaagtatgtagtcttagagggactttacataaatggccatatgtgtaacctgtaccaaattaagctgttttaaatttacagactacaagcaactgaacccaaatgtctaaatgtacattcttttctgtactacatttcagctaatattgcagaactaatgacaattttaaaagttgctattaccaattctgtctactgtagcaagataccttaagttacaacaaaatcttaggaaataagactgaataatatctgttatagaaataccctactctttaccaactcccaccctccctgaccccttcaaaatcataagcagctctcttctgtgacagacaaataatgtaagaattgtgaaaccccaatttatgtagcgtatctcttggtccactgtctggccattctgtcatgttctgctctgttggtcatatactgagtggcaatacttcccaccaaggggtcggcaggattacagtctgtaagaagtgagcagatagaaaggaggactttagaaatggttagtgctggactccaattatctttcaatatgtccaagcaaataacaccttgactgttaatattacaatgatagattcttgtccgaaatgtaacctttggaggcttgaagggatattctggtgta

SEQ ID NO: 158167 - DNA, 1000 bp, Homo Sapiens
ttgcttttgagacctgcatcctaaaaccaaaatagctcgtgatacagcctctaagtcatcatttattgatttatagagcactcatcacatgaatgaggtgctttacaatacagtaaacatcacaacagaactcacatagttaaatacaatcaacaaattacagaactaaaaaaactgaaatgaagcaacattatgtcaaatttcaaagatgctgagaagtggcagtacaaaaaaggtaattccaccaactggagaccagacgggcaaagatacacaggcaccacagcccaaagcgggcagattcgtcgagggtgagtgggcatatcaaataaaatctcacaaccaagaatgaaggccgttaaagatactgacacccacgtgatcacagtactagtggaataacctcacaaacatgttaccttagtatgacacgtcaacctcatatggattttaaactcaaaaaagaggccagaaagccactcagatcatctatcccatacaagcacagactgaaatctatatgcctctacgagaacttggaataaatttaggaaacagccaacagttctacaatccataagatctatggagatgttgttgatggttggcacaagtttagggggaaaaatcattttcctaaagcagagaggaatcgcctcacactgatgaggcactggtgggacaaaagccacctcgttcagtgtcacctgaatgtgggtttcgtatcaaatgtagaggcatttaaatttacattatcagatgaacactgagaaaggcacagatgacatctccgacagaggaagggaagttgtaacatctatgtaggcctgtttcagtatgtaacacactcagggcaggtggaaaagcatgtggagacgcactcatgcctggctctcacttccactcccgtagagctagccctaaaaaaaaaacccacatggttttatcaaactaactgcattaaagtggcacttaaagttcaaaaatagttgtccctgag

SEQ ID NO: 158168 - DNA, 1000 bp, Homo Sapiens
cagtgtctgagagcatttttattacgggcagcagaacgggatcgcagcatcttagaaagcctattctctgccgtggtggggagtagggagcagagggaaggacccagcacacttcaagaaaccaggcgggtgtgaattcctgagtgagcttggggcagcagtgggtggctgctccacagctcgcccctcctccagaggacccagctttttggttttggagcagccagggctgttcgccagcttgctcagagcctaccctgaaggcatggctggcaggagcaagccgcccaggcccaaaggagagacacccactggctcgaaagccaagcctctgctgacggggccaaccctggggtgccagtgccagggctgagagtccctgaggggctgccggcacacaggtatcctcccgtgatgagcagagtgcagtgaggggttgacaggcaggcagagctacgttggcagaaatacgaagcaatgggacagtttccaagaatggcaacatttctggatccagagaagcaacaagaacaaatggtggcttgtttggatagctgacagaatttggcattttattacaaactggagtgtgagtgaaataaaatccatcatcacttttctgctaatgaagacagatgtggaaacgccagcccggtgcccttgccatcccgggcacaagggagtctccagaaacctgcccttggcgtacctaggacaaaagaagccgagttcgtgtacacaccgcaggggccatgcgcctgaacaatgttaggctgccgaacctgcccatcactccccacttctgcacagaccagaccaagctgtcttacacgcctgtaggccccggaaagatctcaagttatagaattaaaattaaaacaaaaagcaaagtttaagtcatcttctccacaggatctagtcccccccaagagccaagaagggaagccgccagtggcagaagcggggttggtgacacacggcatttggatcgtcggcttcc

SEQ ID NO: 158169 - DNA, 1000 bp, Homo Sapiens
ttttttttttttttttttaccaagcaatgcatttatttggaaggataccagttaccagtcatcaaaagcttttgtatgttgaaaatgtaattttaatagttaattcttcatcttacataggagcacaataaaatacaccacaatctgaagaaactccagaattacgagaataagagtgaagaaaattcaaatgggctacaatatccattaccttaaactgcaagagacaaggttgcaacccgaaggttaacatttatgtatttatgactggctacatttatgacttaaaaataacaagaatcaggaattagatatggagagaggtgggaaagaacagttttgtgaggggaggaattcgtcaataaagaagaaaaattactgaattccaaattaaagaataaaacgagctcccacagcaaatactggagggatgaaagcaagaatcattaactgaggacttgatactctcaaagggataaacctttctgatgacacacaagctagatagttgagatctgctcatcaggtttataaggaagactcacaaatgcctcagcaaatcccaaatgatcagatcagtgtttcttaacacacatgaaaggttacagatgaaattttcagataagaaccaagaaaaatgtcataacccaaattttaggcaaaaatgtggcacaactgtgaaagtcctacatgtcagtcacaactgctatctttgctgtgactttcctgtacagtaatttttaaacattgtggcaagacaccaatgatcatctaatcagacaacacaaacacatttatttcaaattcctagaaggttaaaaaaaggtcagatactgatgctttatgcatgctcagggccagtttataaatactccattcagtactatcttaacacaaatctgcatcagtgaaaagaaactggcaaaatccacctcttgccattcaatttgtcagatggtgaagaccaagaaagaatgttccatcagtttcaattttaaaa

SEQ ID NO: 158170 - DNA, 1000 bp, Homo Sapiens
aatttttggcatgcccatttattcaacatgattaggtaactgtatcatatatgcaccatacaggaatatcaagtttttaaaaaaacagaacactgagtattaaaaaggtattgtggccttaattaaatccttgattcagaaggcacttcagtaactttcagtgcttcaaagtcattaacatcatcactgtacagtaatgaagaaaaaatttgtaccatgtgcaatttccagtatttatgcaagaaaaccttattttaggcatttttttctttctatacaattaaaataaaataagcattagtatgatttttacaaatattgtttattttaatgaagctggtacagacaatgtccatttaaaacccatatcccaggccaaaaagtacaaataaaatcaaaaagagcagtgttctgttgtattcatttctgcatgtatagctttattaattgctaatgaaaattagaacttttctgggatcttctgacaagatttttaaaaaatcttaaaatgccttttcttcagtgaagccatctttggagttagtcattactctcaccttatctgtcatcttgacttcaacctgatattcctcttcttttggtccagaccctcaaattttaaaagtagcttcaagttaaggaaaggtcatttttccacagttcagttctctgaaaaacttccatctcccactgaaagtcacagtccaggagtgaagtaatcacatgctagaacatcagggccaattggaaagtcattatgaacacttgcattggtcgatcttatttatcaccacaagcctgaaaatgcaatgtcctgaaaaaggtgacctctctgtgcacacgtaatttttaaaaaggagagggtaatatgaaggggactgaggcttgatcaccaaaaatcagcacaatgaaaacaaacaataatgaataatgagcactagaattcaaattaccagatgtttcaaagagatggggtgccagttttcaattccgttttgaa

SEQ ID NO: 158171 - DNA, 1000 bp, Homo Sapiens
ttttttttcacagatgcaagtgccatgcaaaaataaattaaagaacagataccaaaacatacatgtgataaaactacagaaggtagatttttaaaagcatttatataaacataatttataatacttctcttttttcctttatatacagtcacaaagctgtagttatacatctaggatttcctctgctgtacccccacagcgtaatctgtagcgaccagttctccagcttatagttgggtcccataatgcagacaaaaaaatgtatattgtcatggattcgcggatgaaccaggcgactgcataatcaagttttgaaaaacacagtgtgccaccctggacacccctgagttgaatgtagtcaaatataaaccatgccaggcaatgacacatgaaaaataccataatatcccatctgaacacatggtgggctgcccatccaataattaaactggcaacaaagcattctgaaattggctcacaaattattgtagcaggaagcatgttaattcgtagtttggtccacctgatcattctggattgaaactgagaaattgaatatgagccagagttttgcattgcaacttgagtggacattgcaaacctccaacctcggtcagctatcgctttggccataaagtaatcttcggcaatgtactgagcaaaagctataagtcctcctgcttgatccaacacatcttttctcattaaacaagacattcctgtcacacatttgaaaccagttacattggcagagatatagtatcttggatgtgaagttccaaaatatacctgctctaaggtggcagcaaagccctgtctgtctgctacgtaaggcagcccgtgaaccaagcctactttttctgtcatttgattcaccatgtcagtaagcgtatctggaattactcttattccactatcacaaatccatataagatcatactttgcaacttcatatcctggcattaaattattaattttaggattaatgccaactttttta

SEQ ID NO: 158172 - DNA, 1000 bp, Homo Sapiens
gggacacgcacatatcaagatttaaaactaaggtctgacacagtcactgaattgatttaaataattaaggcttctaaaaggttcagtgccaaaactctctacatcagtatttgaataaaatacatttctgcattttaggtttgtgctttttacagccatcttaattccacagaatttcattagtagtctcataagggcatgttagaattgtttactgatgttttacttttagtagctgttagactaaataatagcaataaaaattcaatgagtgaaccaatttatttctatcacctgggctgttggctcatttcactttcttttcatgtttaatatggccatttcttttgtacttgccattgaggattccattgtggtaatgtccattaactgtgctatgcttatttctagaccacagacttttgatttttctgtagataaattttgtcacccaagacaagagaaagtataacaaggcagcaccaagcaaaagcacaaaggcaatatccagtaaaaaatactgacaaaaggagatctgatggacagcggcacgtaggtgatgggctccattgtgacgaataatataatctatccaatagatagttcgattgacagggtgaccaggttgatccttgtgaatttccgaaagcttctgagccctctgacggtagctgggattattgataaccttcactagtgcttcatagagctctttttcagtaactgtcttccattctagcaatatccccatgccttttgcctgtactctggtcatagtatcataatggtctccaaagagtggaattcccactacaggcacaccatgatacatagtttcaaaaatactgttcaaaccaccatggctcaggaaggctttaatctttgaatgcccaagcaggtcattttgtggtaaccattctatgagtttagtgttgtttcctagattctttggtttgggtccagaaaacctccaaatcactttttgaggcaatctccccag

SEQ ID NO: 158173 - DNA, 1000 bp, Homo Sapiens
tttttttttttttttttttttttgcgggggccacatggggccagtttattgcagttaaatacctctctctctattttttttttgtcaatttttccataaagaaaattaaaacacacacacacacccccaaaggggagcagggacccagaaacaagaggtggggtgggacgtggcctccctgcataggtccaggccccgggtggccccccaaaggctcccctccttcccatcagcaccctgtctcagtacctccagagagcaggaggcagcgggacgtggcagggcctctgtcccctccctcttgcctccaggtgagaccactagaagtgccggggcttagtgagggccgggagaagggcgacagacagacggatgggcagggaggataccgtttccaagtggaggagggcggtgggcactgtatccacagaaatgcattatttctccccgttttttgttaaaaatctactataaaaaaacgcagctgggggaggggcatgtgtccctctctgtgctaagggctggggaagggggcagcagaggccggcgtgggcggcggcggctgcgtggtggtggcgggcgtcactgccgggtgccctcgcccaccatctccaggttgtgctgctgcagctgggctcgaagcagggcgttctcattcttcagctcctcgatctgctgcctcaggagctcgttgtccatctgcagccgctcggcctctttgaaggtctcctgcatgcgctggttggtctggcgcaactcccggatgtaatcgcaggccttggacaggatccctcctttactcgctcccgtcttgctgttgtctgcgttacagtctggaatgattttcgaaagctggacgatccagttgttgatcttgtccctccgcctccgctccacttcgttgtgctgggctcttctcctctcatctcggggtgttctggttccatcaatttttggagagtaagggtgtgtccggggggcgatcgtcctctgtgttcct

SEQ ID NO: 158174 - DNA, 1000 bp, Homo Sapiens
tttttttttttttttttttttatgtatacttgttttattcataatttgtcatgttctgggataccaaaagtaataatggctgaacttaacaaaatttgtaacctcatcttaatatccactgatccatctcattcaatggtaacagtcaatgttttctaaaggaacataaaaacaaacatgcacacaattgcacagttttcataaaggtctatttcattattggtgggtagcgcatttaacagttaaatacatttaaataatgtataggtgactgcaggactgcagcattggtaactagataaccaactagaaaccagctaacaaagaactgtctaaatacttaaaatacagctcttgttgagatcatcctttgttttgatcatcttcttgggggaaaaaagcctgctgctggtcacaatggaaatatattaaggccaaatcttctgatatccattcccaaaggtttctttcagctggattaagcctccaactccagggcgagcccaaccttgtggcctccagcattaatgctcttcccatctaccagagcagagagtgtaagcttcacaccaggcctcagagtctgagtatagcctactccaattaagctagagttgttgacttttgcagaaatggaagcagtgggatccaactgatatttagctgcaatgccaaaacgagtgcagttggtacctgatgtccaagcaaggtttactgaagtgtcaagatcttcacaaactttctgataaattgatcctccaaattctgtcccatcgttgacattagtgtgtagctggaagtccccagtcctgtagcccactgcaaagttattccttgtcagctttgatttggcactgtcaaaggtcatctggtagccagcaagccagccctcataaccaaagacagctgaaccatggattgcaggtccagcaaaatcaaagtcaacatcacaaccaaggtttatacactccctcttgtaagaagacttgattttaccact

SEQ ID NO: 158175 - DNA, 1000 bp, Homo Sapiens
tttttttttttttttttttttttttttttttttttttttttttttttttttttttccttccatctcttttatcagggttgggggtcacagttcttgtaccaaagcccaaatcccattatgcagaggtttgggtcttcttagtgaggggaggaagagccagttgtaagatgcttacttgcacagagtggttagaaactgagacagtactccattctcccctgagctggtatgtgacccctcttgctgcctcccagtctcctcttccaactctgtcctgtttgatgatggcctcagggagacaagggatggcagaagagccctctgagaggcccaggtcctagagcagcttctgcctgggctgaggtcttgggggcttggctgttttttaccaggctcctctttgttcccccactgggatatagcctctgaggcaagtcaccctgctgagtctgaaaagccatgtgtcaccttcgcagcttccggcacctgcaggtgtctgggttgagctctaagccccgcccttggcaacggaggaagctgcggcgtcggcagcggcagcggcaggtccgggggtcagggcgctggtggtgctgggtgcagcgtgggcagaggggcctggggctggagtgggatgggtgatgtcagctggggagggtgctccgggggcagagtcccagcccggaacagaacggggctggggacggtggtggggagtggcagccctgtctggcttcacagcactgtccttttttttaggtctgcattcacactggctgtgttcttccagggacatctcccccagctgactgctcgggtaccggatcatgaggatctgcatccggacttggtgctgcccagtgggcacacactccaggccatcgtcagggcagcagccaccacagcgctgcacagtcacgcagctgggcaccagctgtttggccacggtgcccatgagctccacagtcaagggcaccaccacctcccggggctggcaggtagc

SEQ ID NO: 158176 - DNA, 1000 bp, Homo Sapiens
ttttttttttttttttttactgtgtgtttgcatcaaacaaaagagagttttattttaagctttgcatttccttaaaagtgaggactttgtcaaacatttttatccactctgagaaatgtacaatgattagaaaagtgcgtgtcataataattttcatatatatgtactccaaaacatcacaaacacacggctttgggataacttaaggagtataacctgaagattttcaaatttcataaattagcctttaatgaattgtacaaaatatttttataaaaaaagtttatgttttctgaacacatgagtatttaatcattacttccacctcgcaagactcacaggaaaataaaacagttcaaatagaaaaggagaaaaaagtcaaaagaaaacaaagaaaaggaaatctggttcacagcatctgaattacttctggactctctttctggttcttgaacgggtctgtatggcctcctctgtctgtgtgtttgaccattccgtatcttcaacaccaggttccttgctttcttcaatttctttctttcgcttctttgttattgtttttgctttcaaacctccattctccacaacactgaggtccaatttgccatcatccttacttcctatagcttttagtccttgcaaaagaatgtcacgtaaattttcataaagaggtttttcagtgtagtctagtaatttcactgtttccatgtatttggcaatttcacctggtttgtttttctcaggaaaacatttgtccatcaaacttgcaatattttctctgtatctaattttggaatctctaacatatttaggatctttcaaattatcctcccaaggaagatggccagtaagccattggatcatgcaataaccaagtatttccaaatcaccacgtcttgatggggccacgccattgtgtgcatcgatgctcgtgaattcaatagtgccatcgtgacatcttttggggtcttctttgtattctttatgaactccttctggg

SEQ ID NO: 158177 - DNA, 1000 bp, Homo Sapiens
atgatataggaattttattcttcctttttttcttgatctgtacagatatacttctgatattccatccactaaattattttccaccatattcacccaatagttacagaatattgccagaccattcatcttctttttaattcccttcagattctaagtgagaaggaactctcattccctaaagattttttatatcaaggggacagtaatgcaaagcaatccctttctgaggcttttgctcttacaaagatacaacacaccatagtaccaaaggacacacgtccccaccttgttacatcagattttaatatggcaataaatgccttgaaaaatacacattttaaacttaaaagggtattgaaagccattcttctccaggtaattaccaattaccctaagggtggtagctgtaaaaccacttgtacagacaaaagtcttggtcttttcaaaagttaaagttaagtcaggggcagttgattctgctttctttactgttccatctgagagaagtatggaatttcttaattgggaccatttgtgggaagacattgagaaagctcctttgagacacttttttttctgcttggccaactgctctagaaagaagaaacgtcaaggtgggtggagacagtggtctgggcccaccaccctcccggctgaacagcctgtcatgctatttccaaagagaactcgccaggaggggagatgactgcagaacaccaggagatggatagaatagggtaggctttaggtgcagcgtgtggccccccatcctggggcccccagggaggaagagggggcttccgttgagataaaggccacatgccttaggaaatatccccccagaaagaacccaaaggtccagtgttcttgcagatccaatggagtccttgtagaagggaaggtggatggtgacgcctgctggggtcatgtagcggttgtccagtcagcgttcttgggggccttgcatgtgtgcacatccagagcttccaggcagtcctga

SEQ ID NO: 158178 - DNA, 1000 bp, Homo Sapiens
tttttttttcaatgtatcaaaaattttattatcagattttcacaatgtttatgtacaaactaaaattatattttctacatcatcacacaaattaaaatgttcaaacatcaatgttcagaatatgtttgaatacgtctattcaaaaaaagctgaagacattttaaaatgatgttttctttgtcctgttttcaaaatcttcccagacaggatgttggacagctatcacatataatatgtgtgaatgaatatgataaatgtgtcctttgcaacaaaaagtctcatacaatttatgtaattataggcatgctgaatgaatagtttagaactcaatgtgccagtgtcatcatcaaatcgtatctttgtatacatgtgtaatccattttgcacaatggtttcaattcactgtgtatgtaattaaattgtaagatacggtaatagcggctgctgacttgaaattctcctttttcattttaaagaaatgaatagaaaacatagtctagtgaacatcaaagtattttttgagactgttaaatctcatcaaagaggtcttctgggctgctgtttctcagagtttctaaagacatgttttcagctgagatgtgctcctttttcgacgtctcaggtagtgaagaatcaggcttttccttttcttgaagctgattctcctgaggagccattttaggttctgtcccaagatttctttgcattcgctgtctcctttttctacttggtgcaatatcagtgacatcaagacttgaaataatggaatcatctttacttacagcagctgaagccaacccagagagatcagtttggttttcactttcctcatcagtactctcatcatagactggatctcggtcagcagtcatttcagaacagattgcagtttccccttcttgtttgatgtccttttctcgttcttgagctgcatttaataatttattatgcaaacttctgatttttgttttcttctcattcaacaccagaataaaccgct

SEQ ID NO: 158179 - DNA, 1000 bp, Homo Sapiens
ctttaggattgctattttattgttgccctttctgttacatgggatgtacacatcaggtgttaaaaggtacaatacattctacaactgagcaccactttctgtaactgaacaggcaaagaaattacactgaacatcagcatctggcagtatttttttggaaaaaaaaagtgactaaaatgggtttaaattgattaacactattaaatcacatctaatatttgatactacatgattcaatacagctatacgatacaattatacaaaatgtgttaacatcaaagaatacaaccaaaattaagatagcaaacaaaacctatataacttttttttttttacaggaaaatacttttgaagtatgcatgtaactgcccattcttttaaagaaaatctactgcaagcaaagttatcaacctccagaaaaatcacacgtagcattactaagcatatccccaaaaaagtgtacaatatgcacacttggaaaatacaaaattaaaaaaattgtaagcaacaggtgagcttcatatttataagaatgtgaaaagaagtcccatttttagcactgttgtataaagaattgtcttttgatgcgaagttcatgaattgtcctcctgttgggaccacactttacaaaaacactgtgtttttgaaacgagattacagagcaagatagagcatcttagcaatgtcatcttagtaaagttttttttttttaatttttactactttatcaaaacatgtcccttaggtgtgtaggattcatttttaaaattcttcctagaaataatatacaaaggagaggcatatttattcccaatcacacttctggaagatgcttcccgtggtcgagaagggtcttctctcttcttttcactggttgtttttggccttagcatgtgttaagatgtgagatttcaggttagttgactgagcaaacttcttattacaaccatcgaaggggcacacatagggcctgtctccggtatggattcgcacatgtgtg

SEQ ID NO: 158180 - DNA, 1000 bp, Homo Sapiens
tccagctttattggaatagtttaaaattacatttctattttctaggacttcagttgctctttccatctgacttttaaaaactgattacagcaaatgaaacacagttgtctaagtgatatagtatacaaaaataacatcttgatttctgtgaaaatgcatttctctgcaattcctgaatagctccaaattatgctaactctgagcattgatgtttactctgggttttagatttagtctttgaaaataatgtgttctaaacctttgccatcaccatctatgtgtccaacatcaacactgtgatgaagttgttcctgtttaggcttttattccgatttctctcgaacagccattaacacgcatgtttatctttttgtttactcccactcaactgtatgttctatgtagggcctgatacagatgttacttgatgttatttaatagctactgaggtcagacaatccaagaccatcattatactaaaattaaagttatttatggaagttcatagacacttccagaattggttttacctcctacatgggaacatgttcaaggaacccaggacgggcttactggtctgactcaactcttcccattcatcaatccctattcaccagtggcacggaaagggggttctttaacaaagcattatacataacacctctaccaaactaaacataaactttttttgtagttaaatgcagaaagtcggtttttttccacccctttcctccttttacacggcaagtaaagctcactggcctgggagttgcctctatctgccaacctttggccagtgaagaggattcagagaaaataatacaaccatcaatcagaaaaaggaggggcgacaaaggaaaataattaggctgtagcctcaattgtgcattcccgtgcaaggtgccctgactcgccacagcggtaacagttgacttcacttgtcttgctgcagttgatggctacatgaccagtttcaccacacctatagcacttcactttg

SEQ ID NO: 158181 - DNA, 1000 bp, Homo Sapiens
tttttttttttttttttttttttttccatttataatgcttttattaagtactttctgatgctgagtaagatgtgagcagatattaacggcttttccacattctttatatttgtatactttttctcaactaaaaattcttttctgtgcagtaaggtgtgagcataaattaagttttgccacattgtttgcacttgtagtttgttccaatatgaattatcttacctaaagtgtgacaaccaaagactttgccatagtcttcacatttttagaatttctcaccagtatgattacttttataagtctgaggtgttgtcaaaattattgtcacatctttcaggttagtagtttctctccagtataaattttcttatgtttagtaagacttgtaaattgattaaagctttgccataattttcatatttgtaatttttctccggtatgaattatcttatgtttagtaaggactgaggaccatttaaaagctttgtcacattcttcacatttgtaaggtttttctccagtatgaattctcttatgtttagtaaggtttgaggactggttaaaggctttgccacattcttcacatgtgtagggtttctctccagtatgaattttcttatgtttggtaagttttgaggattggttaaaagctttgccacattcttcacatttgtatggtttctctccagtatgaattatcttatggatagtaagggttgagggccatttaaaacctttgccacattcttcacatttgtaaggtttctcttctgtatgacttttcttatgtctagtaagatttgaggactggttaaaagctttgccacatttttcacattcatagggtttctctccagtatgaattttcttatgttcagtaagttttgaggattggttaaaagctttttcacattctttagatttgtaaggcttctctccagtatgaattatcttatgtttagtaagggttgaagagtgtttaaaagctttaccacattct

SEQ ID NO: 158182 - DNA, 1000 bp, Homo Sapiens
ttttctgtgatgtatcttatatttgtttcacactgaataacaaatgtctatagtcagattcaaggataactgtcagcattaccttaaatccaaactctgtctgaaagttaaaatcataaaacacctaaaaacactttgttatgtttgtatgtttcaacaagaaaaactactgtttattttttatgtcaatattgtagttacattttcagaatcacatgctgtgggaaaaaatcagcaagcagaaggtttataataaaccaaaagatttatttataacattttctgaattcacttaaaaaacaaaaaggaatcccccttccctcaaaatagaaccgtttcctacagattccatccagtatgacttttcagatatctaaggagattttgctacacttattacaatggtagttttcccacagtgtaattctctgatataggtttgaaatattgcagaaagtcactctacattcatttatacagttgctttttctcctacaagagtattaaaatgtaagtattgcattgtaaatgaaggcattcccaaatcactgtgtttgtatcactttgcttaaatatgaattttctgatctccaaagtgcatcatctttgtaaagctcatcccttgtccatgctttctgtcctggttgacagatgcggaatgagggctaatctctggctttctccaatctattggatatgtattctttcctggtaggaatttacacacgtaaagtaagggactcctaccaaatgaagtcttctcaacattaccagatggaagaatcttctcaacaatattgatttcaccttgttattgcaaaaaaataaaagagtggttattaatggcttttccacatattcctgggtttttttttctccagggtggtgaataaagtgtgggccatattacttcacagtcatcactttcacataaggcttctttccaagagttctctgaagtaaggcattatacttctttttaaaaaattccatacattca

SEQ ID NO: 158183 - DNA, 1000 bp, Homo Sapiens
tttttttagaaaataatccaatttattctctctagggaacaggccacccttcccggttccagggtgccatccatccttaaataaacagtcagaagggccgccagctcactcggcaggcgggggacattcaggagctgtaggggaggtctctgccagtgcgggctggccctcagccccgtcgcgagggcggaagaccagctccccagcctgcagcacctgcccggcaggccacgtgccacctggcccatactgctgatagaagtccgcgtctgtctggaacatgaccagtgcctgggctgtgtggattcgcacatgctgagccaggctgttggcatccagaaacttgtccccacaggagtcacaggcgtagaggatgtgagtgttggggtcttcttcctgcacttgcttcacagctttgctgatctcggccttcaggacttccgtctcatcggctgtcactgcagctcccaccggcaccactgtgagctgagtgacggctgtcgctgccagtgcctcggtagccagcgtgaccatgtcatccacagtgaccacgctgacctcactgccctcctcgggctccaggatcttgatgcctgccttgccctggtgcacggtcttcacgtgggagcgcaggttgtctacccggttgaagccacgcccacacttatcacacaggtaaggcttctctccagtgtgaatgatgatgtgcttggacaggtcccccacgttcacgaaggccttgctgcacacgctgcacttgtgtgggcggatgttgtcgtggtggcgaatatgattggccaactggctggactggacgaatctcttgccgcagcgctcgcagacgtagggcttctccccggtgtgctggcgcacgtgggcgatgagggagctggcctgggtgaaggccttaccgcacatcacacactggcatggcttctcacctgtgtgaatgcggacgtgccgctgcagagcgccggggtctgcaaactgtcgctggcag

SEQ ID NO: 158184 - DNA, 1000 bp, Homo Sapiens
tttttttttttttcattcaacaagtctttattgagcacctactctgtgcccagcactgcactaggtgccatgagaatacaagagtagtataagatgttatccgccctccaggagcttacaaaactagaggcagaaataagatgtacatgtgactcaggcagcatgtgacacacacaaagtgggcagctctgagacaatggtggtcaagtgaccactgaggcccagagccgttggaacagtctcttagaacagggtggaggacttaaaacttggatgaacaggggctggcagagcacttggaatgggtaaggacaagactgggagatcaatttggctggagcaggggagcttgtgttaaactgtgatgatgaggggcacctggacagaggttgggtccgtgggcaatgagaagacatgttactccctctcttgacatgaagacctggtgggcttgtggcctcctgctgccttcctttccctgtcttcccatctccactctctcctaggaaagtggaacctggatgctggtagggccagagacagaggcttaacaccctgctggggaacccggtcagaactcccgaggcaggagaggttctgctccactggatgtttgtcttggtgtttttggatgtgctgatcaagagcaagatgttctggattcttaaaactcccctcacaaggaccaatctagagataatttattgatcagtgatcacagcttgtaccccaaagccgtgtatgtctggatccttccctaagaccacagatagctccagggagtcccacctccttggctatggaaatatgctcagccctggtttcagagaagcctggactccactctggaccccatgagatgatatgcgctggtactccaggctttaaatggcctgggaagcctcagtggattttgtttattttcagcattgccatgtatgcttaactctgagttggggtggggtaggtctgtttaaaatgccagggaaggtgggcagca

SEQ ID NO: 158185 - DNA, 1000 bp, Homo Sapiens
gaagccctggaaaaggaatgggtaagatgggaagtcccagaaaccagggaacttggctgcaagtgttacctttatttatttcatatatgtatatttccagaaggacaacggttgactggtattaagaccaaaccagtccatcagaatatcatcgaccaaaatgagaatttccctgttgggccattagggttggagtcttattaaccctcccctattcctcgggcccataatgcattatgagatagaggagaagaaaccaggcacagaagactctccctgtcatgctttaaccccataccctgtgctccacttatggaggacgtctccccagttcttgccactcccacaatcagagaaggtgaggttcataattattcagcctcatctccaaggaacctttaactggcaacagagattgttgggccatcatgagatgctactttctagctctatgaacataaaatcacgtaagaaaaagcaaacaacacaaatacatgaaagccatttactcctggtgaattcctcagggtcccaggttcaacactttccgtgatgtcagagtactcagtcagggatgatggggacagggtgtcagaacagtcttgatggtcttgccagcaacagctttttcttattttccataatttggtcttagtcgttctccagttgtcttcatgtaaataaagtggcccatggcaatcatgattctgtaattgttatagtgcctttgtaagttgacagtttccaaatccccttactcatacgacccctgtgaaggggggtgtgaaggggttggtgggcttgtgcatatgagggaatgtgaacgatttcattatgaccgaattatgctttactcaataagcactcaaacactaccatctcacttgtagtagaagtgctagggatgcaaccaagagactggttgaataacgggaaggttaaatgcatgagtattttaatagaaaaaaatattaaaaacaaaaccaaaactcgtatggaa

SEQ ID NO: 158186 - DNA, 1000 bp, Homo Sapiens
tttttttttgaagggaagagcgctatttattaggttgtgagtttctctgttttgccttaacagatgcacaaaaggtcattgaaagtataactgaaggaaataggtcagacgagcctaaacacaagacttgctagctgcagggctggtgcacgggaccccaggaaggcagccgagccactcgtgcccactagggacagcccagagaccttgagccagggacccccgatccactaacctcttctcccccattgcgctgacagttgccttgcactgtggttaccataaaataactctcattggcatccaagctttataaaaacatcttcattttgctcaaaaagggcagtcaatagatacagagaagccaaactgaacagcctcaataaaataaaattaacaccagcagcgaatcctcttgctgaagacttcggctagagggcacgtgcaccaaagttctaggctgttaaggggccacccacacaccgtcctcgccttgaacacaccagcttggaaatcagttatggattttaatggccttttcaaggtaagtgtagcgactcctctttggggctttgttgaagtggtcgagccctagccaaggccgaggatgagacatattaccgggctgtggctcaaagtctttcaaatttacttcatactcgtcttcatttatgtactggtgtcggcccgtcattacaattgcaaatttaaacttctcaaactccttctcctggatgtccagcaggctctggattcgcttcatcacttctcgaaaatgctcgccctggtgtatcctcagcaaaaacgggattccgaacgttccgaagacctctttgtggaaatgcgccactgtgacaagcatctcattctctttgtctatgtccacctggtccaaagggatttcctctattcgaaacgtccggctcgttgcaggagataaacattctaatagttcatcttcttgatgaacaccaatgattttgtagcttacaatttctag

SEQ ID NO: 158187 - DNA, 1000 bp, Homo Sapiens
tttttttttttttttttttttttttttgatttagatttatttttattgacaaggtttataagaacaaatatttaaaatcgaaggccaattattaggtctcatttagttgcttattttgttcacttgtatttacctttccctagtgtctgagtaactatcaagaaacaaacctgtgaaaatacctgttaacattcaacatatatttttatatatttctgttctatgatgcaaagatatttttcaacacttaattggtgcaacaaatgtgtcattgtgtcataaacagcatgttttaaaattcagatttaataaactgatttaagacagtaaatttgaaagacaaaattaagtctcattcaggagtggtccattatgttgatcatctagaatcaacactgattaaccaaactctgaaagccaagagccccaactccagagaaacattaaatttctttaatgtaaaagtatattatttttgagacacactttgtcagagacatccacgattgcctgcacattatattctggcattataatctggtactttagtcataatcgtgaagctggctaggtttccagtaaatatcagcattttatatgggcaaaagcagttaataaaaatcagttcatttactgtaagccaaatgtgcttgtacttaatcccaccctttcccaaagtttttgaagctttgataggttgatttttggtctgtccttatataatataaaacgtacctacagacacttttacagagttaatactaaaattacaaattgatgacactttcgaggcaaagcagggtaactgttccttcagtgttgccatcactgaattgactttcactgttccatcatactgtttggctgaacactgacattccatagtctacaactataaagatacctacctatgtgagtttaaaaagtgatctgcacaaaagaaataaaaaaactttatatacaaccaattgttttttaaaaatacaaaaataacatctgt

SEQ ID NO: 158188 - DNA, 1000 bp, Homo Sapiens
ttttttttttttttttttaccagaacaaaagacattttattttgagaaataaattggaaaaaaatattttaaaatgtttaatttgcaatatacataatactggaattgaaatgctgtctgatggaaatgttgcaatgtggagtaggagggtcaagttcgtgaagatattcttaaaattaatcttggaaactctgtgcctatgaggtttctctaaagtggctaaaatatgcatttaatatgttgtctaaatgagtacatttaattctagagactgtaaggagtagagattatatgctttggggctttttgtagcatttttttaaaatcagttgtacagatcccattaaacgaaattgtttcttaacagcaagaatctgatcatttaactagttttctcagcaatataaaaggaatacaacctccactgtcatatataacttgttgtctcctagctcctatttgaattccattggcttttatagaaagttattgagttagtcagacagaaggattcatgatatataatttgtcatttgttataatgggattttcttctattccattgtggactgctaccctcacctaggataaagcagatatggttgctatgaattagactgtatctaagcttcaagaaatatgaataatgcatttaaatccagagaatcatagaattaaaggaaatcttagaactaagaatatatataatatatatatatatttcttaagatggacttttgcttttgtcacccaggctggagtgcaatggcgccatctcggctcactgcaacctctgcctcccaggttcaattgattctcctgcctcagcctcccgagtagctgggattacaggcacgtgccaccacgcccagctaatttttgtatttttagtagagatggggtttcaccatgttggccaggctcgtctcaaatttctgacctcaagtgatccacccgcctcagcttcccaaagtgctcagattacaggcatgagccactg

SEQ ID NO: 158189 - DNA, 1000 bp, Homo Sapiens
ttaattcaatgagttacttttttttttttttaaacagatttgtacagcaaaaagttcccagatcacagtctctaccatacagtcacctgtccagtgtgcaggaagccacaggggccctggccagaggggccaagagcagaagctgcactgcagagtttacttctacctacaggtgacatgtggctggaagaatcttgagttccctttgttctccagtgtatcttgtacaaaatattacatttgtttaaacacatatttacagagtttgcacaaatagaaaatggttacaaattacaaccaggcttggcaggataccagttcccctccccactgaccaaggtcagatgtgatgaccatttcatatttacagttgcaatttaaaaagtctgtgtttagagacctaaatgaagtttataaaaactggttaaatatcatcaactcatttatgtaagctgtacaagtagtggataccaattagtcagttcatgtcttgctccctgaagaaagattttgaagtaaaagaaaccctctcaagcaagcaacatacatccctggcctgtctgccagtttgtttggtttttgccggggaaggagatagaaggaagaagaggggaatggaacagggggaataggacaatctggttgaaactgtttctattcctttttttttttttttttaaacagctgagaaccaggataagccagctggcttgttaaacactatcctttggctttgcgaagagaacccatagttccatccttttttctcagagacgaaatgtcttctcaataggactacagtatggataaagaaaggactttctggagaggacaatgtttgttattccgatgttcatctttgacttgagtgccaagcccaatttcaacagtgcaaaaaaagactctcaggaagcagcatgggggtcaaaggcttgtgtagtagctgtctacccactgggcaaggcctcgctccaccagggaccggtttatcaacaccact

SEQ ID NO: 158190 - DNA, 1000 bp, Homo Sapiens
aaaaaaaaatcacactgtacaaatttagatagaacattatcaatgctcagatttataaaaatgggaacagaaagactaaagctagcgaaggaacgtacatttctgttttgtctttttaaattaggaaggtaaaagtgattttttcttcaggtgcagtgatagtaaatgtctagaagacatccgaagagccagaaataaaaagcacaggagccgcctgcagactctcagagttctgtcttcacccactgaatccgaagtggatgcgtgtggcctcccgcagggtggcctggccccgtggatccacgccgaacgctcaacgagattcccaaggctggctgtgtacagcctaaaactttgtgctcagagaaaaaccagcatgatgggttcatcaactcctgtttctcaaacaaaatgagttttctgtacacttgttacaaaggtctgtacaaaagcacgaagctgctgtgaggtgttatttccgaaagagttaaaaatggatggaagggagctgttcgtacagttccgcctgtacattcacagagggaggacaccataaaaaaaggactcactcagaaattccagaccggagaatcctggcttcttaaaagattattttgaaagcttggaataagtttcagctctgccatttcccaaaccgttcgcccagcatcgtcatagttcagcttcctctaaaactatattctccctttcttacacgcaaactaccaggaaaataaccgcaacccagtgaaactatggggcttctgtgaatataaggaacgacgcagggagaagtcgtaaaagctgcgggctcagagcccggagcgcccttcacattcccgcgtgccgtggcggccacagtcacagccaggggtgccaggcggggtccatgcggcacagattgtccaggctgtttgccgcggccaccagggtgttcaccttgctttccccgccttcgaactgggcgaggttgtgcaggcgggtcatgatggcggtgacg

SEQ ID NO: 158191 - DNA, 1000 bp, Homo Sapiens
tgaatttttacactgtgggattggctatgagacaccataaaatgtaaaatagttcagacagctcaagctctattattttcaggcacaaaatccatataattttgtacaaaactttgaattttttatttgtgaaattaaaaatatggtattatatatatataaacttctattcctctataaatatagatgattttgtgatagtgaacagaataaatgtataccaaattcaaagaccaatatcattttagcgtatgacagacatagataaatttaggtcctaagtaccggcattttgataaattcttaaagtttaaaacaatacaatcaggaggattgcttttctcctcttcttcacagagaactaaagtgaatatttttaaatggctttgaaagatttacatttgacacatttctgtaaatccaaaagaggagcacacaggatttaatgcagtagacctgcacacattttccctttagcatgcatgcccatattttgtttatttcaggcgctatctccccgtcaattattccaccttctttacctcctgaaatcttaccaggttattattggtggtgtgaattgttcccccctcagaatgtgctgctgaataataatcgtaataaaatgttgaaagtgtacaacttttacattttaaagtttctgatatatgtctagttatttgattaaaaataagaaaatagcacttcattttgaggaagtccatgacactgaaatatccttcaagttttcaatttctgtttacgttttgctgtcttgttaaggaaagcaaacatcaactccttaacaaagctttccaggtgacctcaacatttccattttacagaccggtaaaatctaagcgcaggctgtctcattctcaaaggcaaggttgccaggcatccgtatgcaattagaattaacattttataacccatatcttcagtctcttccaacccacacaaagcttcatgcttcttcccaaatctcagtaaccacatc

SEQ ID NO: 158192 - DNA, 438 bp, Homo Sapiens
tgggtggctcttaaaagagcctttggggttaggtgttaagacgcttacttggaatgtttacttggagctggtgtacttggtgacggccttggtgccctccgacacggcgtgcttggccagctctccgggaagcagcaggcgcacggccgtctggatctccctggaggtgatggtcgagcgcttgttgtaatgcgccaggcgggaagcctcgcccgcgatgcgctcaaatatgtcgttaacgaaagaattcatgatgcccatggccttggaagagatgccagtgtcgggatggacctgtttcagcaccttgtacacgtacacagagtaactctccttgcggctgcgcttgcgcttcttgccatctttcttctgcgctttggtcactgccttcttggagcccttcttcggggcgggagcagacttggctggctcaggcat

SEQ ID NO: 158193 - DNA, 1000 bp, Homo Sapiens
ttaaattaattggtaactttattaataacaatagcatctatacacatttgaaaacacacatgtaggagacagttaagatctattcagtctgtgataatgtctagagctcatttggattcatcaaacccctgccatcagctccaaaagcccttagccaaaaacagctgaatcactcatcaaaccatcagtgtcttcctcggcagaatcaagggttggacagaaagagtaaatattctgcacctccacaaaataaaactaaaatgcaattgtcctgcatctgagaatacaagggtggacagtatgagctgcatgactgtgaaccaatgaggcttctcttggcctcatttgtaaaaaggagattaactctgtagtcccgcctatattgcatggcctccagaaaagcaaatgaggtggtaagtgtaaattaaaagctcctctcctttaagaggggaacaccatgaggggagagtaagaaaaggagaaggaaaaggctctttccagtgaccaacacgctgaatttgatgaaaatccataagaggttatgctaaactgagaagcataagggtggatctaccattgccacctcctctttgtagcaaaaaaaatcttaacacggccccctcccagctgttgcactgaggtgactaaggatacattttgaggaagtagctccaagaacatttccattttcactgtgccttcacatacatctaatggaaatgaacagcacccttcatccatccacggaagcgattaagaaaagggtgggatggaaaaattaacccaacaatattagatcaatacgtagtatttaagtgtccataatgtgccaggctgaagatgcacgggaaaaccacactagccggtctgtcaagggcttgagaataccataaacaagaaaacagacgaaccaatttcagacagctgctagaaggaagataaaatgagacaggcaagtatgagaggcgcgaattcctgagtggatgacgtaggtctctga

SEQ ID NO: 158194 - DNA, 396 bp, Homo Sapiens
tggtcggccctaaaaagggcctttgggatcgaaacgtgcaaagctggagcggcggcctagcctccgaagccgtacagggtgcgcccctggcgcttgagcgcgtacaccacatccatggctgtgacggtcttgcgcttggcgtgctcggtgtaggtgactgcgtcccgaatcacattctccaggaacaccttcagcacaccgcgggtctcctcgtaaatgaggccagagatccgcttaacgccgccacgccgagctagacgccgaatggcaggcttggtgatgccctgaatgttgtctctcaagaccttgcggtggcgcttagcgccccctttgcctaagccttttccgccctttcctctgccggacatgaccgctggagcccgatagacagcttct

SEQ ID NO: 158195 - DNA, 1000 bp, Homo Sapiens
tttttttttttttttttttttttttttttttttttttttttttttttttttttttttttttttttttttttgctggtgtcatcaatccaatttattaagtcctcaatgagggggaggaagggccacatctccctctgcaggccctttgaccatcttgatggcttctgctcctccctgtcccctcagctctgccttggtttccccactgacaaaggggatcttctgctgtcctgtgtgccctgaaactaaaacccagggggaggccagaaatcctcaggaagttttccagctccctgcaagaatagccaaggacagagaaatcacaggatcaggacgagcagggcaagctggagcagggggtagaacagaccaagtcctttaccgcagaggaagaaaccacactgtggaagggaaataaatagaggggtccagggcagcagagcccaggcccccagggcgcagtggctataggcgcagcaggcgagtgggagcccccggccgcttcagccactgaggaagagacgcttgtaggccttgttcatctgctccaagaagatgaaggtgaggacggtgtgggggcccaggcgggcatagtacggcgtgaagcccttccacaggctgaagaagccctcgtagcggacaactttgaacagcacgtccagcccgttcttgtattccggcttcccatcaatcatccgcatgttctggattcgggtcttggcaatgtccacaggcatggaggcagcagtggtgacaagaccgctgatcatgctggcacagaagtggcacaagatgttgtcagagaagtagcctgagtccagtaagaactgcttggattgggagtaggaggcgagctgggcagcattgacgacgacggcccgagccatggtagggatgcagccccgccacagtgtgaggacaccctcttcccgggtgattcgaatcagggcgttaaacacatttttgtagccacggcgctggtcagctggaagccggccat

SEQ ID NO: 158196 - DNA, 1000 bp, Homo Sapiens
tttttttttttttttttagagacaataatttccctttatttaatctccacatttatgtcccctggatctttttatatttagttagaagaagggaggtggggattaggtcttaaaacatacggggggcagtttaaaagcccactaccattacttgccttggcagaggtaggggcctgatccctcatcaggatatggactgtgagatactcagggaggacaagagactggcagatgctgatagctcacaaagagaacttgagattacggagtctcaacaaatccctgcgactcattaggcatttcagacataatctctgcaagctgaaaactaggacttcaaaatcccttaagcaagggactcagacccaagagacaaggcaggtgagtgaaacaaaagaccagagataccacacagtacaaaatagtaattatttatattttcaaaaaaaaaaaaattaacatttggaagttctcccctggaggaagaggggctagtcagaaggaacagaactggctcctatgcaggcggcaagtcaggtacaaacagctgagcaatctgggctgggattttatcacacagcatttttaattgataaaatttccttctctcttcttttgttctgtttttgttttgtgtgtttttttttttgtttgttttttagaaaaaggggtgggggagaagaaataaaatcagagaaaaatgcccaaaaacattttccacaatatctaaaaacagagaaccatagttcttgtcaagacaatatgaattctggatgagttattttttccagttttcaacaccaataaagatttttgcaaaagccaccacatcagaacactcatcttccagatcaaataaccttccccttttgccttcacttgtcatttttcataaaaggataaaaggatgtattctgttcttgcaaacaataagtgctaacaacaagagagctcttctgatgcttgtatggtggtaaggagttttcacaaatatccaagt

SEQ ID NO: 158197 - DNA, 1000 bp, Homo Sapiens
ttttttttttgccaaaagaattcgagtatcagtgagatgttctggccagggtacaggagggatgagtgaggcagaaactatcaaagaaaactcatttccccacacccaagaaggagctggatgacccaggtacagatataattttgagatgggaaaattaagggattttaaagaaacagttccagcctcaacaagaagctagagaatgtggtgctcagtgaggggttatcctacttggaggcccagctggtctcccaggttcagccaaacacggaaatctcagatcctcggatgtcatgtggggtggggcagggaagtctcacatgtcttcagccctgcacaaggccaggagggctgactggcaatcccctttcactgcatcctggagagaagagtagagggacttcccaaatttcttcctgaactcagctctgatactcagaaggtcagtctcacatcgagagataaggatgcgaatcaggacttggtaattgggctcagtttcctggagggcttgatgaagtttgtcagcaaagtacagcggtgtgttcttgatcaccgaagctaggccgagcagagccacctgagcatctccatggaaacggttctggacagcctcctccagctcttgcccagtgctccgctggtactgatcaaacactcggatgaggtgttcaggatttcgctgggtgaagactgggacccatgtttcctctctgctaggtccttctgcccgctgcagtgcctggacatcttgttctgccagattatagtcaatgattccagagtagctgtcacggccccccttggccagggccaacagcaggtcctgcaagatgccactggtctcagatgtgatgccatccacagcctccacctggaaattgtgtttgtagactgccaggcactcctgcagctggggtggggttcgagtggcaagaatttcaatggccacgtccacagcagaatctgaggccttcagagctgtcctcaattcctg

SEQ ID NO: 158198 - DNA, 1000 bp, Homo Sapiens
tttttttttttttttttttttttagaaaataggtggtttttaatggaaaattttataaaagggagagggcatgtaaaggggcccctgggccaggcccgggaccacgacatcagtgggaggcgctggtggaggcgggagcagtgcagggcgtcgcagcttccaggcgtccgtaggtcccttctccaggtccaggcgggcggccccgtgcacatacgcataagcgggctgcaggatgcgcggcaggggccccgagtggcgggcgcgggtgggtggccagcgggtgccagggctcaggcccggggccgtgcgggcgcacagtggtgcggctggtgcgtgggtgcgaatcccgggcggcagatgcagcggaaggagccatccgtgttgaggcaacgcgcgttgacgcacagcggggaggcagcctcggcctcatcacactcgttgatgtcaacgcaggccatgcgggtcatgtccaggcggtagccgtcgaagcaacggcaggtgaagccttcggggacgcgcacgcagcggtcgttggtgcagccgtccaggatcccgcactcctccgcctccagctcctcgtagggctcagccagggaaccagcatagcttccaccttcaggaggctcctcgggctctgggaaggagcggcgggtgtcccgggaccgatagggccagcgggtgcccgggccaggtggcgcaggagcctcagattcgccataggggccaccatcgtcctcaaagtctggcatgtcgaagcggggtgccccataaggagcctcccggcgggcgaagggcccaggtggcggtgggtaggggtcgtagggtagcgcaggtggtgggtacaactcaggcccatatgggaggccctggtaaggtggacctaagtctgggccgtactcgtaggggagtccaaagccacctggtcgcggggggctatatgcgggggggcgtagcacattgcacagggcctcgaagtcatctgagtcctgcgcagggcaga

SEQ ID NO: 158199 - DNA, 1000 bp, Homo Sapiens
ttttttttttttttaagcgtgttataaaatttatttgtgtaagcattcagacatttttaggtgggaaagatgatatgcagaatccactacaaggtgcaacagaaaatcgtattggaaaggacggtacatctggcgcagaccagcagtggcacgattccaaacaaatgtcagacgagagcgcttcatggggagaaactgaaaattataatttaaagcttcatgaggcaagatatgttccaatttaaaacactaagaaatagtaccatcgatgaaaaaggaaatcaacctctaggtgtaccaaaaggggcgtagggcaaacggggaaaatttgcatttgttgaggtacaaataggagtgttctgtaagagaggggcattaattattaatgacaaaccctgcaaatacaaaataaaacccaaatcactggtcacagaattcaaaatgtacatgtaataaaggcaaggcaatagactcaagtttatggcctgtcgaatatttactccactgacgttatctacagaagcacttggccagtttgtacacagtgattccttatgcacgccgaaagggtttccgtaaaaatgacattatatacaaatctgtacacccatccaccagagcgattctccaagctccagagggagttatcaacttaaagcaggatacctgaggtttcatgtctttagttgccttatcataatcccaaatatacatttcagggtttgtttttgtttttaaagacactttcctggaatatgtgcactatggttaaaattaaaaacaaaagtaataaaataaaataaaatgatcgctggaaggagctgaccctccccacccatctgagagacttcatctggctgcagcacagtgaagactgtgtgtgtccctggacgggcgcctggcgctggggtggctcccagtggcgcacctcttcggtggagtcagcgaaggctctcgttgacttttaaaaaaggaggaggatgaagaaggaaaaaaggaa

SEQ ID NO: 158200 - DNA, 1000 bp, Homo Sapiens
tttttttttttaaccctttcatacctttattcttttttttaaccaaaaaagtttttcttataaaataaattttgggcaaacatcatgcagcccttcttgatgattttctcccagagaacaaaattcaacagggccctgtggagcaaggagccccttttccctatctccttcctctaagagctacacccagaccagctggttatcagcggaggccccgctgttcctcatgagaatgctggtggaagacgaaggtgatagcagtggaggcagcatcccaggcagcctggagtacctcatcccggagcccccacttatcagtgcagtggttccaccctgccaggtctgaagtgcagtcagaaccatcagggggtggccggatctgacggctgttgacacaacgtcggcagtgcaacctgtcatgtgtgtcactgaggctagcttcatccaggataaacagctccttcaactcgcccagagagaagtggcgctctacatcctgctcctcatccaccacacagctgctcagtgccttcttgtggctctgacgctggaagatcttctcctcaatggtccctgcagacagcaggcggtagatatagcaagtcttcttttgaccatctcgccagacccgggccatggcttgttcatcattggctgggttccagtcagggtcaaacatgaccagccggttagccccaatgagattgaggccacagcccccagctttgctgctcagcatgaagacaaagtcagggctcgatggactattgaagcgttctacaaccttggctcgcttcttaatggacatcgtgccatccaggcggacgtataagtaccttcgggcacggcacagcttctcaaagagatccaaagtctgggtgtaattcgacaccagcactactttgtcactgctacggcttcgggtcaccgccagaatataatccaggaccagcatcttacctgacagctggggctccagggccttagagctgtaaccagg

SEQ ID NO: 158201 - DNA, 1000 bp, Homo Sapiens
tttttttttttttttctttagagaaaaatatttttaatgtagaaaagatgaatagctgtaatgaaatacaaaccgttcctatacacagtaaacttactaagaactgctaatccttctccaggttcttagaatctgggtacagcattatagaaagtaaccacgctatgaaaacacacacccaaaacccgatgggtggcaattgtgatagattaggaagacaaaacagattcagaagtagcagagaatactgcacattttcttggaaaatttcttaattgttcagtgctttctgacaagtttccccagcccaatttatctcttagctattctctgctacttagtcctgtcttctgacaatcatcatacggggacgatcatctgccttacagtgtaacatgtttttcctaacacagccgcattttatctgccctaagagaatagcaactaatggctttcaatgaagtcaccatgatttagaaagtttaaaaccacaaattttccatgtggtaaaacttctaattactaacattgcacattcaccagtccgtttaaaagtttggtttaaaaatgcattaaatagagttcaatttaatattcaggagaggaaaaggcacttaatactgcaatttccagaatataatttgtctgtcttcccctcctgtgatgatactgctacactgttcattcatccatatacatgtcacagcacctgtgtggccctgtattctctcactgatttttgctccaaggaggtcccaaacgagcagttcaccagactgactgccagataaaacggaatttccatcccagacaaagcacctctggggctcatctgatgtcatggaggagatgagcattcctgtctgcacatcaatgacattaagacagccatctgttcctgtgctgaggacatggcgactatctgggctaaaagcagtgtcacatacaatccctgaatggcatggaatctggtgcattaaggtggccgttgtgaggtccc

SEQ ID NO: 158202 - DNA, 1000 bp, Homo Sapiens; identical to SEQ ID NO: 157440

SEQ ID NO: 158203 - DNA, 1000 bp, Homo Sapiens
agatcccaaatgttcccacaagctttattccaaaaataatattatttaataggtattaaataatgtatagaaggaaaaggagctggtgtcaggttctgtttgcgtccttctcttaccctagctcttctcgtgttttgcctatttttttgggcattttcttagcatggggatcttctagctccttggccttataataatggggagccacctccagaagccaactgctctcaatctccagtacctgtctcatgaactctttggtggtcaagacaagttcgtggtagagcagccagcgtggctgttgctcaaagagggaggagttgggatgaatgaagactgtctgctgctgtttcactgtgcggtagccactccgagtcaaccgtgccgtgtggtaaaagtaaccagcagtgatggccttgcgtacacggatatagtccccctggcaggaactgagaccaacttccacacgttccaagagcccttccagctgttcccgcacatcccgggctcggcgcatcgatctgaactgtacaaagttctcacagcaccactgggaagagtaaccactctcagcccactgtgtgtaaacatttagcagaaccaggtggtcaccgccagggagaaagaagttgacacgggcattgtcagcatggacgaccttgtcctttggtcggtagaagatggagttgttgacagagagcatggcagccactgtcaggatctcctctgaacagctgtacttctcagaggctaagatcattttggacagcatggggtccaccggcagctctgccatctttcgaccagacgtggtgagctccccaaggtggttgagggctcccagagcatacagctgctccaaagtcagcagcagtgtctcatatggtggagggtccaggaaatcaaagtgcattaggtcatggatccctaagctcttgagcagcaacacgacattgcccaagctggtcctctggatctcaggcactgtggtttcctcaag

SEQ ID NO: 158204 - DNA, 1000 bp, Homo Sapiens
tttttttagacatagatacttatttatttgcatatttaaagtttacacacatgctatgactccaatgttttaaaaaaataagcccttaacagctctgagacacatggcctcttctgtatcccaagcaaatccctaaatggaggtagagcacgtgttcctatttttcacactctcatatgggagataagtggttaaggaggactagaaacccaatcaggcctaccggggtgccggacagacacacagcattcctaaaggaatgccaccagagaaaaaatacaagtctgtacatatatctttattttcatacttaaaaagaatcacatactcattccaacagctttaccaggcttcgccaacccaataagttacacactcactcaggtactaggaaggttattgcacagctccttaactgatcggggtcagggcagagtggtcactttccccacagccaggctctggatttgcctcctgtgaagacaccatgcctagcacaggctgacggggcggctgcagtcgaaccttgcctccagattatgaaccagtataagtagcacaattctcgtggctactttcacttcagagtgtcatgtttattgatgtggagctttctgaatagggaggttaaggcacacctgctgagtaaaacaaatatttcttgtgtagcgttctagattgagggcagcagtcaatggtaaaataaacttcagtagcatgttcctgtcaggttatatggcagccctggctcaaggatttctccccctgcacgattcctaagactgtttgctagctgattctttgttttggcaatttgatggttttgatgaatttgctgtgatccaggggtgttcaagtacttctctgagcattggcctctggctgggattatgcttcaacagtcttgaaatgaggtccctggctccctctgttacaaagtcagggaatgtgaattcaacccgtgatattcttttgtaggtctcttggtatgtgtttgcct

SEQ ID NO: 158205 - DNA, 1000 bp, Homo Sapiens
ttttttttttttttttaataaatgaagcctattttattacttcaagtgttaatgataaaaaaatttcagcacagctgttgcatttaaaaaagtgaaactacatactatgtttctagctcagtaaacagatgaacctgatgtctttaaatgacataacaattgagcattgtacagtacatcttatgaagacccgtaaattaaagaactactggtttaaagttagtgattatgaaacaaaaacatattcatagtttcagcttcttttttcttcctcgaccatcaggtgcgccatccattttacgtttctgtgttgaaggctttggtcctcgtttctttttctctgccttctccttttcttctagttccatgttttctctttcaatcaaagtaattaaggtattacatctcctctggagctccattgcagttctggacttaagaaaccagtcaaatctgaactgaggagagttgcgaatacactgtcgcaattcatcataaacattttctttgtcaaatccaagtttgtgaagcatacaaatcagaaaacgatcttcttcttcagtatagttttttcctttgttagtaccatatgatattctcagctgatgaaaaggtgctttgtaccgtccaatctttgtgtcaagtgctttcttgatgcttattcttctttgaattctcgcctctcccctttcaatctgagccataatcttctctatgtcctggagctcgttgcacctttcccaaaacacagctgaatattcaatgacttcttctggagttttgccttctacttctcttgctatattttcaatatcatcacgaccccacttctcattagctttgataaactggttaaaatctctcttattccaattggtaaatccctgtgttagaagcttctctttttcctctaactcttcatcattaagggattcagcttcatcaattttaagctgttcttctttttgtgcctgtgctgcgttaggcagctcaggatttc

SEQ ID NO: 158206 - DNA, 1000 bp, Homo Sapiens
tttttttttttttttttttttttttttttttttttttttttttttttttttttttgcaaggacaaggaagtgttttatttatttacaacaaaaacatttgtaacataattctgtcttcaaaacagagaaccctacaaaatacacaaagcaatctctattggtgttgactcagggacattcgcagccggaagcagggctgggactgggagggaagccaaggactaattccgtctaaaaaaacaagaaactgccttaaaaaaagtagcagtgttctacttgtcagtagctgcgctttcccctcccttctgttacgaacacggaaaacagaaaacagcacctgtgaaaacacgtttcagccgcgtccatgagagatgcggccacaggacattccagcccctgctcctggaaggtggctgccacggctgcgctgggagctcccttccactcccccaatgatggagaaccacagctctctcccctcgttggtaggtgaagaaccttcaactttctcctgctgtagaaccatcgccacagggcgcgaacatgcggtgccacatttctttctctttatccacatagtccctgtaacagctagccagtttcttcagctcattattgatgtcatgattgaagggttgctccttctgggctcgaactagaaaatcccgggccttttgatactcagtcaggagaagacaagcctgtccacacctgaagagggccttggcattcttttggtcaatgatcaaagcctgctctccatagcacagggctatggtgggtcggtctagcttcaggtatgtaaaggacaggttcaggagaacaggaagcttggcggcctccaccaggtgctgctcttcagggggtgctgatcgccggcgcagaagcaacagggcccttttatatctcactttggcatcatagaaacgattctggcggaaaaggtagttgccaaactcccgttccgtagctgccactttcaggaccttctgaagtggaa

SEQ ID NO: 158207 - DNA, 1000 bp, Homo Sapiens
ttttttttttttttttttttaaaagggaaatcattcatttattaaggatcgcaagacaacatcttaatttctgtagtacgatttaaatgttttacttctttgataaagcagagtacaatagaaaaaaaacaattagtttccagtaatatctatatctctaatcagaattaagtcttccaagacatattacctggaaataaaagcctgttacaataagcaaagcttcaaccagagcggctacttttcgtgccaggaaaaagttcatccctataggaggaatgatgtgctatgtaaaatggctgtaaggtcacagccttgagggcattggaagtatattatcctattccacattaagtatttcagcgaatttcaaacatcagtttatctgcaaccatgctggcaacctttaactgatatttcaatcaaccggtaaaaaataaattaagaaatcccttcacggatattccgtgatttacactgttaaaaggtacactgttcattaacatgtaattctggttcagaattacctttgagactccttgctcaaaatttggttaacagtaagaatcttccagaaattcaagttcttattaatcaataatttgtcagctaggatacattcaggcatcagctgcaactacagaataggtgcacagcctcagcgctttggaaagacataatctagaacactactagcagacaaaaaattacctgcaactggatagcgtaagtgcagtatagcgagacaaaacatatattcatatgttggcttgtttaagcctcaaaccctcgaccctttgttgagatcccataattttattcctatgattttaataactcaagttccaggaggactataagtctaatttgtactccaaaccaaacagcagtgcagttcgctactactgaggctgaatctgtacagacttcaagaccaagtccagaagacagttattatctaaaaaataattacttgaatacatagatgatccttcagaga

SEQ ID NO: 158208 - DNA, 1000 bp, Homo Sapiens
ttttcgggaagcaatctgcaaaagactttattacaaaatacagcacggggctcacagacgcttttccaatattctctaacacgtacactgaagcgctgcaaaatccctggcggtgcccgcaatctaacgtctacaataacctcaacccccttagttacagaaaaactctgcaacaggcagtggaatggagagacggcaagtcgccgcggacgcctgggctctcagctgctgaacaatgacatcgttttctccaggggttgaaatccatgtccatggctgacaacccaacaaggctgggacccaaattcgtacagagatgaggcagagtggagagaaacaactctggctgagccagagtctccagccactacttcttattcctgggctttagctcttcggctgcattacgcaggaaaatgtaattttttttctggggattataaaattcatgtccctttgaccagtcgtagctggaagcgtatgcaaatatgtttccattgtgattgaaacagcaagctgagatgggctgatctaactgttccgaagtttttagttttgttctggcatctttgtcccagaagctgaatctaccatcagatcccacagttgcaagggtgccatgaacaggatggaacgcgattccatttaccgcataaatgtcctgaggagctgaagtgttggttccattagatcgatgacatttaaaggtgaagttatctttggcggggttcggggggttgatatagtgaatagcaactctcccctcgatacttcccagggcaaaaccagtaggcttgttctgtttgtctttaaaaatagccacacaccgatgctgatgtttcagtggagattctatcctcctgaattcagaaggttgattctctagctgatagacaatcaggcccctctctgcagttgccaccacagccatggggtatatcacgtcagcacagtaacacctttcagggagttgcaaaaccatcataggatttgacgatcg

SEQ ID NO: 158209 - DNA, 1000 bp, Homo Sapiens
ttttttttttttttttttttttaaaagccagttacttttattataatgaatgagaaatactatgactggagaagaggtttcacgtgactagattattcttggttcacacactatggtatcaaaattaattatggaaaaaaaaacccacattggattacacacatttttattgagttttgtctgatgatagggaaacatttacaaaggagtaaatgttacgtaacttctcacggtatgtaagttagaagctgggcagcaaacatggttaccaagagtcgtctagttcttcatgagaaaagcctgttaaactttcgactttgtcactagattgcagcgtgtccactagggagccttcttggaccatcttttttgagctcttatctgccgactcctggtcttgctcctgctggatgattttcatgtatttctctaaaggattttcactgtgagcagatttgtcttttatttcttgattactcatttctaattcattttccatttctaattccttttttattttaatcttcagtgattcttcaatcatcttcctttcctgatacagtttttctagttctcttcgttccctttctaaaacttcttgtaggttactctgccttctttcttctctctgccttcgttctttcacttgctgttcccgtattttttcttcttccttttgttcttcaatttgtttctgatctacacttgggtgctgatatgagaggggcacagcagctgcagcagcgtccacatgagacatatccccggcaggagaaagcccgcccatttccaactgccttggcatgttccctgcagattcaaaagatgattcaaactcctcattatccttaaaagctagcttgtccacatctgaaaattcacttttgtcttgaagttcagtttgtcttcgataaagacccactttctgctccggagggctggagacaggagggatggagaggctgtgcctagactcagtgggtgatggtaggggcattct

SEQ ID NO: 158210 - DNA, 1000 bp, Homo Sapiens
tgtttttttttttttttttttatagatatatatttaatataatatgtgtgattgtggttacagatacatatttggtgctttatttatccagaagcatgagtcacatagtacataaagtattgaatacaaaattctaaagataaacacaatttttcttgaatttaaaatatatgggataaatgcttacaaatggatttataaacctttcacttctacttcattctcctggctgtgtcttccgaagatgagttgctagttgcaacattaaaaaaaaatagctccttcaaatcctgacactatatgacataaaaagaacttttggcaaatatttattcagattgcttgtctccagtggcaaatttctcagcatttctctttgttttgtctatgccttagcctgtgcatttttctagaaaggaagttaaatgcttttaatgtattaattattacattattgaagttggacccaaatatgttaaatatttcctcttgcaaagggagaagaggaagggaggaacaggggcaaggtggggaggaaaaaaatacctcaggtgagagaacaagtaacttgcaagaggcttattaaactgtatataaatgttgaagaggctgatttgtagtttctctactagaaaaataataagatgtattattaaaacgtgagttgagaataatattccaaatgtttgttgttgtcgttgttgttgccgtggcctgtgactctctgctgtaagtttccattcaaagccaggagtcttttctcagttggaagagttgatctttttagttttgggatgtgtaagtgatgctgggaaagcctttctttaaatagtcattgctctcgtttgcctcagaacctatttggtgaaaagtgtgtttaacacaaacagtagctgctaaattgttaactaaagagccttgtgcgaagcaagtgttcgatacgtgcttgtctaatagaatgaagagactataagccagagaggtttaatagcagttgagc

SEQ ID NO: 158211 - DNA, 1000 bp, Homo Sapiens
gaggcaattatcaattgactttatttcctttcatatggtaacaccagcagtgtatgatatttgtaaataaaatacgtcataaaaaaatttaaccttattacctattatcagttaggttataccatcctgaataaaaaatatttgggccgggcatggtggctcacgcctgtaatcccagcactttgggagaccgaggggggcgattcacgaggtcaggagattgagaccttcctggctaacacggtgaaaccccgtctctactaaaaatacaaaaacaaaattagccaggcgtggtggcaggtacctgtagtcccagctgcttgggaagctgaggtgggagaatggcgtgaacccaggaggcggagcttgcagtgagctgagattgtgccactgcactccagcctgggcaacagagcaagactccgtctcaaaaaaaaaaaaaatggcgtctgtaacagtttcctggtattttcaaccaggttctaagaacaaattgattttttgaagtggtgacatctagtcacattaaaataaaatccaaataaagtaagttcaatacagttaccacataatgaatggtagagtttaaagaaaattattattagcatcaaatcaattgttatgaataaatagtaatttgatattacaagttctttaatgaataccttggtaacttgctgacaacttaaaagataataccactgatattcaaatacagtttataatcaagtccagtggcagatactgaaccgcccacctccacctcaatttgtgaaaacctgtcttttgtagggttggctaccatgggtaattacgcagcactgaataaaaaatagaatatttttctaatacttctacaaatataataaacacagtaacagtttttgctgcagcgattttctttacaaagaatatttgggcccagtgctacagaaaaacatgaactacatcttatcgtcacaaaatagccattataaaatgaattttgcagcctctgttt

SEQ ID NO: 158212 - DNA, 1000 bp, Homo Sapiens
tttttttttttttttttttttttagttaaaagtttaatgtagttcccaaatacatttcatatgacaatcttacataaatgttccaaaacacatgggcgttatctcgttgtactcgtcactagctggctaaggcttaaagcagagacgtgtgactgggtctctcgggagggcctctggttcttcccgggctcaggcttgctgggggctgggggcagggctctggcgacctagaggtgtggacggcacagctgcaggaggccttctcttaaccctccgagagtgggactgggagatttcctctgaagtcccaaagaggccctgtgcccaggggacctcctcctcggcctcccaggtgggtggtgcaagctggctcttggccatgctccaggctcgggtgggcacaggcgtccactccagtgtgctgcgtgcttgtgagactgcctgttctgggaccagcccctgggctcttccaccaagatttggtgagggtccccctctgcctctcacagaagcccctggccctggactgtcctgggggcagggacacctgtggctggggaagggatggccaacagcgggaagcagtttgcgcctggtgcctgatgatggtgaaccacgtgacagatggagacgggagtcaggggaccctggggacccttccaggtccagtgaccttttcccagacaggcactctccaggcctaggacagacagggccccaactcctcatcaccccatgacttggcctggaggaacctggggtgggaaacaagtagtcccccaacctcagaggccagaaccacaggtgggggacagggacctcgacagagctgtgcctgctcaacgctcgagagcatcttaacctaagaaaccaaaacaaagccttcgaaaataaaaagaaaaaaagatgtaaaatatacacccccaatcagagaggggaagtgggaaatgaagatagtagttaacagcacgtccaatgggcccagtgtctacactcgtac

SEQ ID NO: 158213 - DNA, 1000 bp, Homo Sapiens
tttttttttttttttactttattgcaatgtctttattgcattactggagcaagttggccagactgtcccctcttggggaaggtattaaacaaaaagaccaataagtatctcctctcgcctttccccctaccctccccaacaattgcacagcaatgtctgaacacatctggtgacaagaacaatttgtaaagtggtctagcaactacattatgaactgtcccatcacaagacatacagttggctttcttgtgagtcagatatttttacgtaaactacacgaattttcttggacacatcaaagacaacagaatagatttttcacaagtaacggcaccaaagtcacatgctggaatttgtaaggaaacgaggttgtttgccacaagtggctggagctaaagcaggtttgagcagttggcagcagagggcccaagcaggccccctatctggaccctctggtttctgaggccactgaagcctcacagaggcctactctgggttgttaaatagcagcagagaccaccttagaaaacaggaattgcccaggtgcaattctcagtttaagagaacacatggggctgattacttgtagcaaaaaagagacccgtggaagacacattggctctcaaagcttcttcaaagcacatgaggcctaaataagtggaggtcccatcaaggcttggagagggagtgaaagtgttgggagggcctcattcttggccagatcagtggtaaggacgcaggcagtctatccaggcccgaatcatggcgtgccatctaaggccaggtggagacaacactgttctgtgatgaaagcttcacctggaaacaatgggcctagtacctgtgtccagccagccccaagctgcttgcatgtcagtagctgggttctctagccaggggtataatgaacccctctgatcttggtctctctttgccctctgcctcattgaaactgcagttaagatgccaagacagtcccagggtccagatcatgggacag

SEQ ID NO: 158214 - DNA, 1000 bp, Homo Sapiens
tttttttttttttttttttttttttttttttttttttttttttgaagagaaaatctctaataatttattgaccttcagtttcacattgtgaaaaaaaaaaaaataacagttttacaaaacctcaaaatgtagtcatagcaaacaagtacatatgaacatgaacattttccttcaacttatacagagttttgtacgtgaaccacatggtcaatagccaagagagggacattatgcagctctaatcactcttattcaagacaggtgtcaagcccaaagaaaaggggctacacaattataccagaagtggagggctgccctttgttatatgtttctacagcaaccagcccacaaaataagaagaaccttctctgtcttatgccaaggtttttgtgtgtactgtgctgtgaattgtatttgcttcaaagtgtgggacgtttcacagggtgagaatggtcaagtagtgagaccaaatgcctatatcgattcaaagagtgggagtccagaaagttccctacaggctgggggcccaacccttaccacagctccctctggctcacacacagtaattaatagaggattcaagaacagaccccaactttgaaacagctgcagaaaattcatcctgctttcagaagccatgcagtgacacatacatctctcttggcagatttgcatcataaactacagagctgtaactgctacaatataaacgacactgactatgcccactgggggacaattagacatttgcattgcttagaacacatctaggaaccagggactgactgctggaaagtactgtgattcttttcttccaacagctcatttatttaggcccaactacagcccactcattcatggcatggacggacaaacacaattagtctaaagtactaaggtggagagaaatgttaaggatttatctgtcattagacaatgcaaacacagtcacaatgtaaaaggttgttatcagtcttaacccctattttctaaaatacag

SEQ ID NO: 158215 - DNA, 1000 bp, Homo Sapiens
atagtaaatatttaattgtttccatcagcaattccagcacaagttttcctggatggtaggcagaatcaagctacccaagggttcatgatgaggtatgggggtcactgaggagacccccagagtcactgacccctcccgccacctccacacaccaggtggccctgcagaatgagggttgggctgatagaatgtcaattaggggagacaggatacagggtgagggaacagggtctagcttgtatatttgcctgcaggaaggagggagggcaggagagactctgcatagaaggactggaactacacatttaagttttcaaccccaatatgcagggggaaacagccaagccactctccatctgtctagtattaggaacctctcttcaagtggtcttttgtcatctctgttcttcttcccaattctgtattccagattccaaattctacaattgaaacccaagttctgaattctaagttctaccttccgagttcctgttacgtgtctgtctcctgcccctaaatctttcctggctcccatccctttccccagcccctctgggcagaatgtctgaacctcctcctgaccgtggtgacgaggtttgtttgtatttgtttttttgttttggcagttccaggcttttctccagcaggagggacttggctcagactgtccagcaagtgggtggcccagtggaaaccagggaattcctgagggcctggcctggcctcctctcttcccaccccacctctagccactggacatactaccttttgtgcaactaagctaaacagaggatttccaagggtgataactggggactggtggccttgagatgaggaattttagaagatatatgaaggcctaaaagatcactatctttcattcagggaaatcagaaactacttctagcagggggagggaggcaggcagggaaagtagaaagggcctgggcagagctgtaatcctcagaacttgtcagccttcagttcccccttgtctgaa

SEQ ID NO: 158216 - DNA, 1000 bp, Homo Sapiens
aacttcctgaaaactctttataataatgcaggacaactgtatatagcaaacgccttcaaaatttaaactctttaaacatttaattcttcagcattaatacacacaaatgcggtaacaggggtcaggggggtggtgcgggggcaggtgggttacagcctccactgggatcagggtttcaacagtgttacttataaattatattacatcaattttatttactgatctaggcagccagagggtggaaggatatacaatgtggaggaaacacattcataccggggtgaggagtgctggcgggagacacggctctttaacatgaaaaatgtataaagtatttagcaaaagttacagaaaacagatcaaacaagcaagtttattttgttagaaaattccactttcatagggtttgccgatgtgctcgtgtctgtgaaggggttgcttccggtcatctccttcctaacggaagggaagggatgctaagttggggcccctgtcactaaggatggctggcgtccctttgaatgtctgtccctgggtccacacagctgcctggaacccacgactcccgagagcccgtctgctgcaggtgatgctggaagggaagcgcccccacttgacagatgagtgcacggaggtcccgacaggggatgtgacttaacttcaggttatgggacaaaggaggccgcagagcagggccagtcctgtgctctccccctgcatagcaggctttccctctaggtctcccagtcaccccaccccgagagagcacccacgtgccctgaccttacattccactgcaatcccactaaagtttccctcaaacaccaaggaacagtcctgaacaccacacgcaatctccaaaggccatcgccccaacctcaccccacccccagagacacctcccaggaagccctcctgacagccatgccccagcatttagaacgtggggagaagcgaattggtttttgccctctgtctgattctcgctctaacctgctgc

SEQ ID NO: 158217 - DNA, 1000 bp, Homo Sapiens
ttttttttttttttttttcaagcaacttaaaacaaaaaggtagatttaatgcagtaacaataatctgaggataaataaatccacgacagactttaaagtttgcaaatctgtttcctttctttgcagagaaaatggttttctgaaagcacacaggactgaagatgtcaaaacaaaacttaatttcttagtctccaggtgacacaggcttggtcctctctgctgccctccgaacacttgtcactggccaagatggtagtttctcttgtttagctcaggatggatgttagtttcaagaataactggatggtttgtttcctgaatcatcttcttgtgagcccatactcttttgtacaaactgagggttcactgtgatctcctggtccatggctttcagccgctcatccagctcaatgcacttcagcatctcctgatcaatgttatgaagcatggctgggttattatatttttcagggttatcatggaaactgaccataccgtccttctggttaatacttgcaaaaatctcaccatcttctatcatgtgcagaacgtatttctctgcctcctgaggtccagacaactgcacacgacttgccatatcttgtaatgatagagttaaaaaggtctttgttagcctctgaatattcttcttataaagagatgacaagcattgcttcaccagccccatgttgttatcgcgagtgaaggtttcactgtgcttattcaccaggtttcggagttctgaggggttgttggttgaatacacttgtgctaactcgtggtatgcattgctaagaggcttaatgaatctacccacaatttgagatgtatattttggtagctgttgtactttgccaagtaatatcaaagacactaaaatatactttttatatgattccaacatgatatgactgaccgccatggcaggagtagttatagcctgttcataaaagtagagagctctttcaaagttcttcagcccagtatagatcatccctcc

SEQ ID NO: 158218 - DNA, 1000 bp, Homo Sapiens
ttttttttttttttttcgattattgcactcttttatttacagaaaacacagataaagcatttcaatttcaatgttcatttagcaaactgatccactctttttttttctttttggcacaaagaaatatcacagatggaccccgagatcaatcagaagctcataagattcatcagtcatcactggtccaggggcggccacgagactcagacagacagacagcatcaccacagactggaaacagaaacaggtccacgttcacctcacagtaaaaacctgcctcaccgacaggcaagggcgggcaggagggggcagtttcgctgctctaaggggggaaatgggcgtcaggggcaggaggcagggatggggaaaggatggacaccattcataaattagagacaagtggtcctcttgtttgtatcctcttaccttgaatagtaagacagtgcaaaaactagatacccgaccactcacccattcaaaagcttgagaagtcgcctcgcgagtgcccgtgtgcgtgtgtggatgtgtaaatgtggtgcttgtaaacattgtcaccgtccgcacagagacccaacatccatgtgtctgaatggggtggggggggcgggaccctacttcaggcgccctctgccccagtgattcccgtccaagacgtagtgcaaatttcagagacaaaaaaggggcagaagggagtggggtgagctgggggcaggaaggacacgaagatgaggtgggagagggaggggttaataaggcaacagttaaaaacggtccattttatcaaaaccgacaccttgcgcctcccgcccccacccgcaccgcccgggtcacgagaaggggcggaagtcccgctcctccaccaggctgaccgaggggttcttcagctcctcctccgaggcggcgatcttgtagcccagctgggccagcacctgctggcaggcgttctgggcaaaggccacgatgtcgtaggagaggcggaagcgccacttctcggccgtgg

SEQ ID NO: 158219 - DNA, 1000 bp, Homo Sapiens
ttttttttttttttttttttttttatgattcatatgctagtttatttatcttattattgagagataatttcatgatgacagttatcaataatcaattacaatatcaagaaattcaaagaacaaaatcttgcagagactatgcttttgtatttggatttaaaaagtatgtgatctcattttcacataccaagctgagaggccatttagactatctctttgctaatttttgcttactgctgtagggaagaagatttccaatgaactttaaatatctcattcatgtctaccattgtcgaaaaagagaaggaaaacgaggaggccaaaagaagcagcaggacagagaaaacgccacatggattcaagagttgagacaactgacagtaaaatatatgctctttggttagcaaagcaaaaagggggaaagtattgcatacatgatagatacacactagcattctaaagcaggagacaagaatgtcaagagtgtattctacccccactgccagatggaagggctattattataaatgaaaggcagcagtagtggatgccaggcacttttgttgtgtgccagattctaaagtccagatgtaagcaggttacccctgagacaggacaggcttcagttcccgcagcagaacagagccaatcacagttttctcagtgtttatgataagctgggctgtagagccttccttcagttccactgtgactagcatcaatgacccactgtgcacagttttagctgcaaacctgtgtatattatcctggccagaagggactgcacctacattggctacatttacaaccttctgaaagatcacagagggagtgaaattctgtggtgcagcaatgattacagcagaagtttcattcattcctgttagcactccttgctctttcttaaaatctttctctgacatggccacaggtaaaagcagttctccaacaggtggctgaatattaacattgaagcaatcatccttggtacacaactgga

SEQ ID NO: 158220 - DNA, 1000 bp, Homo Sapiens
tttttttttttttttttttttttttttttgaaagggctaaaatgattttatttttaaatgtggacaggcaagcagaggtggttggcaaaggcaaggtggctgacgatccggaagctgtacaggagagataagggcactggctgccagagtgccctatcgaagcatcatccgaaccctgcggtaggggtggcccacaccacggcctgaggcccagtcaatgccatatttgtgggcggcagcctcagacactgcatagcgaccattgagatttgatcggtaacaggatgcataccaccaggcaccgtggacaatcactgcacagttgctgttgcttgaatcgtggtcagcgtcataggtggtaaagggcctcccactgtggaggctcagggaatcccctgcagtgccctctgagaacttgcccagtgccagctggtagtggtctacctcaccgaggaggcggaaggtcgcatagtgggcgaaagtacggttaccattaaagtcttccagctctacccgcagctcccagttaccctggagagtaagctggtgcaaattctcatttcccagccagaattcagactcttggttcccaaaacctgctctgtaggaggaccaagagcggaagaaatccacagaaccatcctggcgcctctgaaacaccagccagccgcccccctcggtgtccatgtcacaaaagactgggagggccctgccctcaggtaggcacagatggtaccagccgctcaaggtggcgccctggctcaacagctcccggcagtttctggggccttcctggcaccggagcaggttcactggatctcctggctcacccttggggcccatcttgcctggtggtccaggtggcccttgaggacctggggctcccttctccccaggacttcctggagctccgggacaactgggcaggaggacaactttgctggcttccagttccctgggtcctgggcagctggggtgttcctgggtcttcaggcaggca

SEQ ID NO: 158221 - DNA, 1000 bp, Homo Sapiens
cttccacaggaaaagaattattttattaagtattttaaaacaactacttaacatttactcatagataaaaatatttacaattttacaccttcaggaaggctccaaaatataaacactgtacctctccctagagaaaaaaaaattattcttctcttcaaaaacaggaatacattcattttttctcactgtgtgaatcaagtaattatacaaataaacatctgaaacattttcctttttaatatatttatataatatatatttataacagctttacaaataaaggcaacgacttaataccaaaataaaaacaggaaaagaaaaagttaaaacacgatcagcaatcaggcatagtgcatcttgaaaagctgctgcggagctggctggacacatcgggaaaacaagtactctggaccaaaaataaaacttctttgaaggagacggaatcctttttagcaataaggacactccatatgccgttgggcaagaggaattagcctacagaaaggatctggcggtgccaaggcttggttaggcctttgagaagctaagcttggttaaaaggagttttaggatggaattgaaaactgagtctagttctgtttgaagggggcagctttttactcagctttgtgcactttggggtgctcgctcggggtgtccgcatttctcagaccttggtttggttccctgcacagtaagtactaatggttaggcctagaaacaggtgccagaagcccagggaactcctccctccctccggggcagctcagcttgtacaaggggcccattttcagttccttagtaagctaatcactacgaaagcctgagtagggaactacattctctttattcttccgaggcaggggtggggagcagacctgcggaaacctccccaaaccactaccgtgctatgccagtgcctgctacctccccatgttagcagaaagctcggtctgactgctctctctccccgacgtctggtgagtcacgtcgacaataa

SEQ ID NO: 158222 - DNA, 1000 bp, Homo Sapiens
ttttttttttgcaaattataatattttactgaaataattaagtccatcctcaaatgtttctttttaatcatctaaccacaactttcgggtcaactgaaaaaaaggtcattttaaacccccttctgttgtctatggatttaaattgtgaggaaaaatctttaaaacttaattttggactaattaaaatgaaagcaagaaagaaaaatcagcttgcagtcagatatgaaatgaaggccaacaaagttcttaaaaccaatcaagagttacatcaggtagaactcagagactggaaactccagttttcttctttcctcattcctgttggtaattccagaagtccacagcctgcttccctaagtttcttattgttattaacacaccatacacagatctcacagtgcattgtactccacacatttggatgggtctgtaggaaagtgtttctggcaaatggtcattaacctcttcaatccctgaatatatttccgctgagtttcgtcatttaaaacatgtgcaacatgcttggaaaaaatcttttctctgccagttctggcatggataccaaccatagtgacaccgatgggccaaggcgcatttccaatggccatctgaagataagcatcatttgccttcacgtattctctctgcaacatgaatttaataatatccgttattgattctttaatatcagcaggaagattccttttccgtagctttctaaaaagtggtcttaggtaggactcggtctgtttctgggtcgcactgttcagtttaccctgcacactgcgtttcacataatcttctctggcattcaattctttagcccaaacgccaagaagaaacttcaggaatttggtgatgatgtccatgtctttatgatcatcgcctttccctaaggactctccaagcgcctctaactcttcaattgtggtgttttcctcatgaactttcagatcattctgtgtgtcttcctctccaggctcctgaccgccgacgattt

SEQ ID NO: 158223 - DNA, 1000 bp, Homo Sapiens
tggagaccaggttttactgttgcccaggctggagtgcagtgtcgtgatctcagttcactgcagcctcaacctcccaggctcaagtgatcctcccaactcagcctcccaagtagctgggactgcaggcgcacgccaccatgcctggctaatttttgtattttttatagggacagggtcttgccatgttgcccaggctagtcttgaacctggactcaagtgatcctcccacctcggctgggattatagccatgcatcaaagcagcttggccctattagtacattttaatcagagattaaactatgttgcattttaaatttcagtttaaaaaaatgattcacacgttatacacaaggacaattttaatcctgcattttcctggagtaacatccactgctggctatctatggattgtaactgcatttgctaagaactgtgaacacaaagaaactttacatgaagtcacatgttgatacaggcacacagacatctttcagcagcaacagactacatacataacgcataccagatagtctcgatggataaatctgcttcaccagtaattctatttagtaaaatccacagttaatggagaattccattttttaattttacatctttactacacatttttctaatactttatttttaaaaaacactcattcaagattgtaatttgcatggcgataaacaagggttccatgggttctaagtttcttaaaagtgtccacagcaacttaaaacaccacaagtcttctttccaatttgcagcacctgacttaaagtttaaattcatcaaatacatcattaaaactgtcattttctcttgtgagaagacatgtttcaattgctatttccaggactatatattgagcatgggtgtacagtacttttaactggttagcacaattttactcacataatttatagccagaataagaacctctagcctctctgaacggccttccactcagagcagatgatgacgataaatgtctaaaa

SEQ ID NO: 158224 - DNA, 1000 bp, Homo Sapiens
tttttttaccgccatgaaaatatttatttgtggatatcatacaagtcaacaggaccagcacgaaacagatgcagcctacacagtgctgtaggaccgaggctcacaaacatccacatggcacaagcagggccggccactccaggcaaacgaagccacccccgaaccttgcagaggccgcactccctcagcagggggaccacggaggcgacaggtgctttgatgcctccgaagagctgagctccattccacggagggagcgggctgcgccgccgtcctcccattggtccagttttgcaatcactagatgaagctccggttaaagttctaaatcaggaatgacgcagccatgaagttaaaggcatccagaaggtcaccacacacctggcaccctccaagggcccacgcggagccagctgaggactcacgtccatgctccagaacgtcagcacctctgcctcccatcaccaagaaggggcttcagacacctcatggggacctatgacggctcgagcttgacacaggttctcccagctgctcgacacgctgtgggatgtactggaagggtcttccaggcctgctgaggcctctttttgtcccaccagccctgcacccaccctcctcctgccaggggctgggtcttgggttagaaagtcactcgagggcttcagagccgctgacccagcttgcagctcaaaatgaggacaaaggcgcttccatccaccttcacggagatgctggcttcgcaggccggtgggcgaggcgaggtccatagttttacttaggacaggtttcccaggcagtacccaggtcgtgtgggggatccccaagcagaagcttaggacggcattctcccctctctgttcccacccacctatccgccagacactgggcttgcccttgctgtccgtcccagcactgacgggcaggacagagatgcatggggtgagtggccctgtggcactggaaggcatatcccaccagaaatgggtttcctgttgga

SEQ ID NO: 158225 - DNA, 1000 bp, Homo Sapiens
gggagttgaggacatttatttcacattcacacaactgtacattttctataaataatgtggggctgaaatatttacagtcatttcttgcccatacccaggctgtctctccctcctgacaccccgtgcctggagagacagcctgcagacagatgtgcaaacccagcttggtctttcctgccccctccctgatgctcaggcagagcagccagcggtccctgggactccactagcctcgaccactccatcctctgatgccgaaggcgtggcaggccacagggaattcgccgctccactgcagtcacagaggctgtggcaggcagcagccaacactgcgggccctgggcagtagctgccggcttgggaatgcagaaggaagcagggaggctgccactcactccggctgccccccaattcttcccttcctctctgtgcccttcctctgagagggtgagccccagggttccctcactcctcacagagtgaaactgctccaggcgcccagtcatgccgggtcacagagaagggagagccagactcttgcagtggacagttataacgccagggacaaggacaaggaaccacaacacaaatgtctcaaggacacaaaatagtgggttcacaccggccccacagactgtacacattcttgagccctgaggggaaggcagtttggtcttctgggagtggagagggagaaggtggacacgctcaagacacactcagagggacacataaccggtaaccaaccaagccacagcagggggcttgcagaggacacacgagcatcatccactcctcagtcacagcagcatcgtgcacttgggaacagcaaggggccaggggcgtgccctgggctggggcagctgcgtagcccctctccatcagctagagacaggccggggcggggttctgagatcttcctcactgctatgaactgcagccacgtacgagaagagacataatacggagtagcagatttcgtgggccattggtgtcttgt

SEQ ID NO: 158226 - DNA, 1000 bp, Homo Sapiens
tttttttttttttttttgaaacagagtttccctctcgttgcccaggctggagtgcaatggcgtgatcttagctcaccacaacctctgcctcccaggttcaagcaattctcctgcctcagcctcccgagtagctgggattacaggcatgtgccaccacgcctggctaattttgtattttagtagagatggggtttctccatgttggtcagtctggtctcaaactcctgacctcaggtgatctggccacctcggcctcccaaagtgctgggattacaggtgtgagccactgtgcctggccacgcttgtctttttaagttcctttggggaaagaaccctaacccctagaacaggggccctggccttccctctccttggcccctaactgtgccctaagcctgccccggccgcccagctgagtgggactgaaggaggtgtcaccaggtgccacctgcccggggttgggggacactcgaatgcagcagggctttggggaaccggatgcagtccagggtctgcacaaggccagccacagcctagaggtccttcctggtcccaggcccactccaagccctggcctctcgctggatcccacacggcctggctggctgggcacccatggaacagaagatgcgggcaaaacccaacgcagcggccccttgtcacctatgcaggctgtggccacagcgctggcggcagacaggcccttgttccatgcaggtggaaagccctgggctactgtcagctctccgtcgccacagtggggacccgccacctccctcacaggctccagcaggtgtgaaggggagaggggcagggaggacgctgagggtgacctggctgagggaaagaggtgcgcagcctgcggacccgcgggtacccaggatggcggggcgctcctgcctccaggaacaaggctctcgcggaagccaggtcttcccaccacacacacgctcaccccgggcaatccaggccttactggagctgaattccctgcacaact

SEQ ID NO: 158227 - DNA, 1000 bp, Homo Sapiens
ttttttttttttttttttttttttcatttataattgaaaatataatttgcataacaacagtaaattctacacatgaaggcaaacgtccgtggttgacagaaattacactggccagaatccccagtccccatgaggcttgtccagacgcagtgaaccagtcgcagctgataacacacagaccattcccgatcccagaggtgcatttcaggattcattctatttcatcaggtgacgttttaacagaaacaaaaccgcaggcagcgggtggggggagcttatttataaaatgtaatttattttttgaactttttcctcttcagagccttccattcgccttcctgtgtagccaggctgttaaaaagctgctttactttccgctttctttccgcatcccgttccatgatttctgagagttgcatcctcgccaggaactgattgtccttgcggatttctcgaacggcccctttaaattcacgcttgtgtttgtggatcagcctcttcctttcctgttcctccttactactgccttgttttcttccaaactcgaggactttgaccagccggggtgtgaaaagcttcagtgggacaggcttgctcttctcacaggtcagcggccggcagagctgcttctggctttccatttcggtcagtgtgctctgacacagctcctggagctcctgcgggtggctgcagtccgccaggtgatccgtgaggagggcttggagaggccccatgatggcgtggaaggatggcagggacccgtacatgagcacgcagcgcttcagcagggccaggcccacagccaggcaggacagtcggatgtgattggcctctgtcgaagttggggccctcagtctactcgcccagcggagggagaggctgctctgctgccacgtggccacatcctctctagcagacaccacgagcagttccgagttcttcccaagcgctctgaaagggtgcaccagagtggaaccttggcttgctttgtttggagttg

SEQ ID NO: 158228 - DNA, 1000 bp, Homo Sapiens
ttttttttttctcctgctgtactaatgtattccatctttcaaaaagaaagacatgattttaatattacttaacaatatgttaaaaaagtagccaggcaggcctccgtgttaatacagtcgtacactctataacagacttgatggtgtgagtactgggtgggcttgtttttaactttctcgttctgcaagggatcttacacaagctggctacaagtcagggggatcaaacacaaacagcgcaacgtgtacactcggagacagtagattgtggagaacaaaggaggcctgccccgcccagcccgcctagggtgagacgcaggggcacaggagagctgagtgacggccgataccccggtgaggacacatgacaggacagggcgcaatgcagaggcaacggagccacgtggatgatgcaaactcctatctggccacggcccaggcctccgaggccgcggtggtgggaggacttggcgggaactactgttccaatccgacagcacagagctacaatcgaaggagtctcacgcacagactacacgcacacgagctaacggcgtgggccgagcatcaacttctcggtctggggtttcaggcagcaccagctccgcacagcccttggcaagcaccacggctctggggcgccagcgaggggcgtggctcttggggtggtgcagcctggcctgcctctcgcgtgtccctctccagggagtcctcattcagtgggcagcaaaggtggcttttttcaagctaaaattggaccagttgatagacagtctttgtcgggtctgtctagcagaatccaagcagaaccttttgaaatattccacttccctctctgtctcatccatatccacactgtctaggtcaatatctttaggtagaaagacatcatcaattgaattgttgactctgtctcctttcttcttcttatttttcttgttcttgccctttggctgaggggactctgccagcaccagcttgctgttctgctgatgctcac

SEQ ID NO: 158229 - DNA, 1000 bp, Homo Sapiens
tttttttttttccacaaaccacttttattacccagtgggcgggctgggctgtgatgttggagaaccttgggggtgggggctgcggaatgcagctgagcttctcctggctctgtctgctggtctaggccagggtggggctgatcaagggcagagagctcaatcttgggggaagaggaagagaggatagagaggccaaacaggcctcttcccctcctcttcacccatgccacagcattaaataaacaaaaagcaactctttacagcacaaactacacagggaagtccttcctcccagccctgggcgcacagcatggaagaggagctcgggaggacagggttggggcctccagggtctgacaccaccccactcctcttcctagcaccatggggtagggacaggcagctttgaacagaggaaacaaaactccaacttcctccaaactcctatgcaggcaggtccatctagtctggtacttctggcccaagggttttctgctccttccaaacctttgagctttctcaggacgtgagcttagctgagacttctccaagaggggctggagccctggtctctgaggcacagtgggcctgggaaacaggcaagagtctggttccaaagtttttcccagcccaggcctctgccttggcaagcaggaagcagggccaggtgagagccggtgagacccaggctcagaggggccgcgtggtgtggttatagaccaggtgctccgtgtcctcggtagtggagacagtggagctggcaggggtgggtggtgggtggtggtggtgtccgtggaagtcctttctctggttcttgaagaagcagtaacccaagatggctaccaccaccacaatgcagatgaccaggaacactgcgacagccatctccacagagcctgtgctgggaatggggatttcccgcctcaggccaaacacatccttcttggagatgccgcgacaagactcgaggcactgctgctcttcctcaaagttgttcttg

SEQ ID NO: 158230 - DNA, 1000 bp, Homo Sapiens
ttttttttttttttttttttttttttttttttttttttttttttttttttgttttttagaaagctgcagtttgtgaatttctcttgctttttaaaacagaatatttccaaaacttgggcatcaatgcttggtctttttaggtgggggatagaagactgggccatcttcacagactctcagaccccggctctcggcggccccatttgccagccagacttcctgcttgggggacggctgctcccccggctcggtgcagttttgcagctgctggtcttgcttagtgaggcacagttctatctgaccaattgtctgtacttcctcatcctggcttggtggaaggcactggattttgggtatcactccatatactctggcaagggcatctttaaaatctgcaacttggtagtaattgatggatggttttatccccaattttagaagcacactgttgaggtccagctccctgtagagttccaggcttctgccaaagtacttcttctgggagttgagcgcatccacctgggcggcgcaggtcccatgcttttcccactcatgcttccagaagcggctgcgattgggaaacgagtgaattacgtcaggccagtatgccctcatttctggcaaaagatccttaatctcttctaaattgaagggccacgatctattacatccttcacttttatcgggccatagtccatgtattgtccagtaatccggagggtctctacagtcgttttgaattttctcgcatactgtctcaggccagtgctgaaccataattagttttttccactcatggttgtcacgcaggcgcttgtccgcaccgcccaggcaaagcaacgccaggcagaggcagcccagcagggccccgcgcagggctgcagggcgcatggtgccgacctgcggagagaacgctgccagctgccgctccggctcccacttcccacctgctgcccgaggaagacttccgggagaaacgctgtctccgagcccccgcgcc

SEQ ID NO: 158231 - DNA, 865 bp, Homo Sapiens
tttttttttttacaaagataatctttattcataatcacaggccacaggggtgagacctgaggtttgggttctgtggtgaaggagaacccctgtcctcctgtcccttgccctgggcctctgctggctgaggagggacaaggtgagggggcccccatggtgctcagacaaccagagcctccctggcagggcaggagtgtgggtgccacagagacaagccccttgcagagctgacctggagcccaccatccccatagcctgtgtgagcatgaagcgaggacccccgggtgggctgtgcctgggcttgtcactgatgccagtggaggctggcacctgcccctctcggcacctgagacagtgagggaaggtagctgctgccgtgaagaacaaagatgctctgagcacacacttgctggggctgagctgaggggcacacggaggcaggccctgcccgtggtctggtcagctgtccctgccgccgctacttttctggtctggggctgtagccttggtcaggttcccagcttccctcttgagaacgctgagcaaagtctggaagctctccaggatcttgaggtaggcggcctccgtctccgcgatggtccggtcgaactcgttgcgagaggcaatcttgcgtgccaggttctcgttgacgcgggccagcttctctgtcagctgcctcacctcattctgcagccgctgcttctcgtcctcctcctcctggatctgccggcacagctcctcccgcttctggcacagctcctctatgcacttgaccagctcgttgttgtagttctgcagcgccgcgccctgctgggtcatggtcaacgccgcccggggccccaccaccccaaccgccgcggaagca

SEQ ID NO: 158232 - DNA, 1000 bp, Homo Sapiens
ttttttcccagtgaattatttttttattttgtagagacggggtctccctgtgatacccaggctggtcttgaactcctcggctcaagcgctcctcccacctcggcctcccaaagttctgggattacaggtgtgagctaccacgtctggcctgggataactcattgtaaaactggtgaagacctgggaccttcccagtagacaatgggacagagtgattgacaggatgagttctggagtacatggcagaaatgtacagagaagtctcccagagaaaactaactggctggaaacagagcctctcctttcttcttcgagaggatgagagtgtcactgtcttggatgccatagatccccagacccaaccagtcctgcaggacttggccttggaattccagctgctgctgctttttaggaagcccctgctggtcttcaatctgctgcttcagacccaggatgaagctgttggggttgatggcataggcgtagctcccaccatcaggattcttcacgaagacctggatctcggaggggatggtctccagcagatagatgtgagtgtgggagaagatcccatatttggctaaggagcacctgctgctgagaagctgcctctcactgccaggaacctggaaggacagacgctgcaggccagagtagcccctggtcctccggattttctctttaaccttccttatgggctcataagggttcacgatgaggttgaaatctgggtaacccctctgctccactgtcaagtggatgtctcgtgccctcttcacgttccagctggagatggggttctccctgttgtcatagcaacagtcctgtttcaggcactgggaggccctctgagcaacgatgtcccatctgtacccttctgccacgttgagggtggggtcggccggatccaggatgatgggcctctcttttttgagctgttttctgacacaatcctcaatgattgcattgtggagtgtgtagtacttggtccagtagatac

SEQ ID NO: 158233 - DNA, 1000 bp, Homo Sapiens
tttttttttttttttttgggcccatttattgtttattttgaataggtaatacagtcacatggttcaaaattcaaaatgtacaaaagggtgtaagtgttaagacccttccctctcctgtcctcaacctactggttcccctcccaaaagtaatcagtgttacccatttattctgaataggcatacataagcaattatgtgtttatattctactcctttctgaaacacaaatgggaagtgcgctatacacatttctgtggcttgcctttttcacctgaagattattacatattagtatataaagacatacaattattttttagctgcatactattgtattgtaaggctgtatcagaattgatttaaccagtcctttagagaaaaaagtttctgttgtttctcatctcttgctatttctttgtccccatccccaatccagacctcaggagggacagcagtgatgggaatggagcccaagcctggaccaggccaggccctgccccacccaggccaggcccctccccactaggccagacccccacctcacccagggcccagctcattcgcatgcctgaatgtgattggacagcccctcctggctgggtggctggagttgtaggggctttggcttctcatctttgatgcccaccctttgtttccactccagcctcccaaacaggctgttgcagaatacagagccctggtacaaaatggccattcttcattatcattgcacccccaaatcacttgaaatgctaacttgagctgctgctgtcacgatgaccatcctcctctatagagagcatgaggcaggcagacacaaatgcacagaagcagctgtcctgaaacacacccagccccaggacaggggtaggagcaactcctactcccaataagcaacagacacaagggaacgacacacagggattggccactctgattaggggtcccgtgaccttgagacttccatagggctggagaggagacggaacttgactgaaaa

SEQ ID NO: 158234 - DNA, 1000 bp, Homo Sapiens
ggatacaaattgcagtttattaaggctccagagtgagaaatggcacttggttctgggcaggggcaggggcaggggtgtcagtggaacccaaaggagctgggtccaaacatgttggagggacctcctccatccccctacccccaataaataaagtctcagctccatctcagggtgctggtgcagggcagggatccctcactgaggagaacccagggctgctacctccttcatatttctccccacattggacctggtcacaggtcagtgagcaacagggcttctgtggtcctagtactctgagggggctggggagttcagggtggagagctggggcctggtggtggcctccccgtagccagtcatagtccgaggctgcccagggcaggctcagagtggggcctgcgttggggacactgtgcgcatcccaggtcggggcccagcctgggccacagctagatgtgcagctccgtgtcatcaggtggctccaggccagactctgcgctgagtgctgaggctgagggaccctgggccaccccaaatggtgagacaacgggtgagcgagcagccagaggagacagagagggtgagaagctgggggacatggcagctgaggacagggagccttcatggctgatgggggagcggtgagaagctggtgggaagatggcccgggctgcagctgtgtttgctggcttggggggcacagacttggctcctgggtgggccacggcagtgatgaggggtggtgggtcgatacggggagctgggggacatggccgagcttcatccttgagccgagcgatctctgtgaagacactggccagtggttggaactgagggcaccagctcagcaggtagtcccagttatagctgccacggagctcctcctcgccggccacaatggctgtcagcgcacctgccacacatggcttgccatctgctgggaagccatagtccccagtgggtgcagggctcaggccacagccccccaggaaggctg

SEQ ID NO: 158235 - DNA, 1000 bp, Homo Sapiens
cactatagcaatgctttatagaagacaaacagcttatttctaggctgtcagggacttctagaatattgatgttgttattagaaacaatcctctgtaatccagtcccaggttgaaatctgatctggccttcaccagcaggcattcactaggtcttctgctctgcggctgttgcggtctgggaaggggcttctggcttcatgatctggtaagtgataagatactctgggtatgcctgttctcctctgtagatgacatattcagcatatgccagcccattgacgctcggtctaccaatgactgagtggtgccctggaggcgcgtgggccattttcatggtgctaaactgcagaaaggatttcccaagggtcactctacagaagagcatttgtctgtgacatatatagcatgacctgtccttgtgtgtagggcagcctgttcctcctccaattccataaacatattggttgctttttgaggagttttcagcaaaataaatcccggccccaaacattcctcctatgtatgcatgtcgctcatcaaaccctttatgaataatggcattaatgaaaggagaaccatgaaacaacatgcgctcattgtgatggttgtgattctcctcagacacttccttctgtcggtggcagaaccgctccctcaacttcttgttgacaactttttgaattcgaatgacattgtatctgttgaagatgccgccagcattaccaccatctctgtgttctcgaatagtactttgcatctcttcttccactgactgatattctttatcttctggagcaagatccagcaaaatcgttccctgattaacacagtgaaaagtcaaataaggattggtgccttgttgtccacctaagagtctttctactcctttgattaatttgtggcggtgcccatatgcattgatgcctatttctttcaactcttcatgacccatatcagccaacacatctagtgtaatctgttctgtttcaaagatatcccg

SEQ ID NO: 158236 - DNA, 1000 bp, Homo Sapiens
aagtaacaggcattttattgggtggcatctgagcaaatcccattgccacctcacagtgtagaaccagtagaactaagaatactccagcctgtgcccccacccagccacctgccccggcccctcatgggaaatgacacatatcctggaaggacacagaacccacacccagcccagctggcaccagcacccacccccatccatgggccagtggcacttggggaatggccacaccagctccgggtggggtcccatgcaggcatcctggaggaagacccaacactttcacagtcccctaagaaccatccttgaaagtcatgctttacagatctctgaccactcagaatccaagcaggaggcatctgtgggaggaatcgtggtcacagattggctgcgtcaaaaaaagaatgggccagtgagggactggtccacacagagccactcccaggcagaggaggattctacaggcaacgtcctcggcccatgctgacgaacccaaggccaggcctctgggggctgggagaagggagggccaatgtctgccttggcctgtgtcaccatggcacagtggtggctgagctcctgcagggaaatcccagaccctgagactggctctaggagtggaggtctctacaggtagggcctgaggatcaaagggaaggctgacataggacgaaggcccatccaaggttttccagaatcacggcctaaaccggcaggaccatcccatcccacgccttggcaggtggcctccagcggccccccaaccccgccatgtggtgcagaccgggaatcacacaggcctcggccaaacacaggcacctggagtaaggcatgccagcatctaaggtgtgtggctggggacaggggcctactggcccaggtgggtctgggcaaagatacagtgaggaaggtagacagcccagaccagagagggcaaggccagctggtgccccctgtgccccacaggtcagtctgagttacactttaccctggacacctg

SEQ ID NO: 158237 - DNA, 1000 bp, Homo Sapiens
ttttttttttttttttttcatttcataaataatgtactttattttattgcatatggctattaaggagggcatccatgatcaatacagactaaatacaatgcactattctagtccagtttattctcgtctccagcagcatcacattgacccctatatacagcgtgtacagtggaagacagagcaagataagttaagtctcttgtcatatcacaatagcaagaaatatatttaacatcttgatatccagaaacaatacgtacccaaaaagaaaacactgtttaataactgttaaagtttatatagcaaaaaatattttaaatttaaggtaagtcaggcaaaatgtacaaagacccaatatacattgtgaagttttagcaaacataacatttatacattttggttccattctgtaaactaaattaaaaatgtaaatattgcatatgcctttttgtgaaatgtacaggatagaggaaaatttagcatattatcatctgtgtattttgcttgttttaagctgcagtatgaacacgaaccatctgtatagtgtcatgactactctacggatagagggcgagttaaatatgcgtcaatacactgctttcagcagggtccatattcagtccctatcgtacctggggggagttacaaagcaaataccacccattgatgcctattcccaaaactaaataaaaacttcaggatttttatacatcttaataaagtatatcatacactgaaattgaccttccagctaacattatatggcctatgcactgctgtgatgtataatttcagaaaagtaaaaccttaaaaatgttcagggagatcactttacattcaactttgtcttgcaatacaatcctctgttctaaagttcagcacggaagcaggaagacttttgcattgccattaaatatatttttaagacattgaattttttggtcttcctctaaaaaagcctcattttattaatgcattattctatagcgatagatatcta

SEQ ID NO: 158238 - DNA, 1000 bp, Homo Sapiens
tttttttttttttttgagggaaagactaaacagatatatattttatttcatctgctaaatgtcagagagcaagttagacacacattccactaagcatcaaaggccctcgtagtctcggtggaaggacaaactccagctccacatcactggtttaagtttcttcctcttcttcttcctcttcttcctcctcctcttcctcctcatcttcatcagagctgaaggtgccatcagggaggctgtagacacggatgacctgcttgttggggtccttgaggatgaggtatttgccctcctccagcttcatgcagatgtcaatgacgcagcgtaaaatgccccaggcattctccacgctcaggttgatctggctggcaaactcattaggcttgaactgctgggtgcctaggatgacgtggcgtgaggagtctttcacgtggtaccgagacacataaccaagcttgaggtactcagatccagccagcaaagcacagcaggtccaccgggccaacttgtagctgttgttcttcagctccgtggcaatgacagcccctcgctgagagtccagcttctgacgccagtcaacgccattacagtgcctggaatcccactcattgagtgtcttgatgttgatgaaggacacttccccgttggctccagtcatgacgccatcgtgctcacaacggacaataaggtcaatatcatctccaagcttccacctgcggtaacggtacgcaacagaggcgatttcattcttatccatgtcgtcctccacaaacgggtttgggttggggaagttgtatctttccttccccattctcaagcactgctgggagaaattgtggttgatgtaggttgcctccatggccaggttgcggggtgaattgaaggaattaccttcatcttgagggggctcattggcagtctcactcactgtcaggaggtcaaagtcagagttgtctctcttgtcaaagaagagtttggacccaactctctggacgacaat

SEQ ID NO: 158239 - DNA, 1000 bp, Homo Sapiens
ttttttttttttttttttttttttttttttaaacttgcaatgtttgtctttattttgttctttatattttcaaagtgaaaagaaatagtactgagtcaatttctttttgtttttttaaatatttgttctatgtatttacaagccttaaagttgctctaaagatttcaagagatattaagagtacttttctcagggtagcacttttttttttttaaacaattcttggagttctgtggtccacagcatttccttctgtttcaatgttatgtatgttttgattactattgtgattttttaaattttctgaagcaagctgagaggcaggcagaaagatttgatgccaaaaaaaaaaaaatctttcttaccttgttcaccccaaactttctcaaatctggactaaatgctataccttaaaacaaacatgaggtgcatcttgaaggggagggaaatttatttctctgcttttctattatacagttgtttacagaaactgcaaattaaaaaattacactggcatttgcagtccttaaaataaattaaaagttctcaacttttttttttttttgctaaacatttttttaagtatgagtccttgtttaaaaagaaaagattaaaacagaaaatattttctataaataatacatgtattttggttttagtgctcccgccctaaggtttgaagtttacttttatccagtacctttttcctccatgtacacctttttttctctttcccctctcccactcgtgcacacgtggggtttctgcgagaattggccttgctgcactgtgattggcgaagacgtgaaactttttaaaaaaatacttaaattgtttcttttgtttcattttgtgtatttgaagttttagttatcctcagactcctcttctgcttcccgcagccacgtgaagaatgccgtgacagatttcagagccacgcccttcccattctgctctgcagggtccttgctgctctcccatttgtagaaggcatcctcgg

SEQ ID NO: 158240 - DNA, 750 bp, Homo Sapiens
tcagagagagaatagtaagatgagaacgaggagaagcacccccactagcacggcgatggcacaccactgtcggcggtcactcgtcatgtgggatactttggccaacttcctgaggaccccgtccatgcgggactgggtgtggtccatctcttgggcgaaggcatccagcatgatgccctgctcgtccagctcttctccaacgcggccggacatgtgcttcagaacctggatgctcccagacaccatctccagctgttgatcctgttcatccatgatcagctgctgtgtggcctgctgctcctcgatgtagcgagatgtggccgagactgcgctggcatccagcaggtcgctgggtgacttctgggcagctggcttgcctgcgagtatctctctgttattcctctccaaaaatgctacggctgttgggctgaccatatggtccttcatttcctggactgcctctcgcatccgctccacgaacacctttctctcctgcaggtccccggctgggagcttgaacttgcctgggttggcttccactataccgatggtctcttccaggtcctcgaggtcccactcgatgctgcgcaggccattccgcagctcattggtcgtccagtccagctcctcgcgtccgaccgccgcgctttcctgcaggagctcgcaccagcgctggtacagcccgcgggccgtgttcaccgccttctgcacctcgcctcggactacaaaaaaggggtcttcgagagacat

SEQ ID NO: 158241 - DNA, 1000 bp, Homo Sapiens
ttttttttttttttttttttttttttttttttcagttttcagactgcagcaaatcttttattacaaataattaaatctctccataatgtctcaaacagtatcaaacaccatttcatatctctaacacagagcagagtcggcattcagtataagaaccaagtgaaaagtgttaaatttcaagcatctgatcacatcacatggtgaccaggtaaagcttagatgtcattttcccacattatccaactgtgcatctcaaacatatcctcatctcagtaaagacaaaagtttctatttcatattgttaagtgcaggaagttgagagagataaaaatccagtgaaaacacatcaatctcaattcaactcagttaaaaaaaagaaaagcaaatttaaattagtttttttcagagaagaaagggaaaggagtccatggggttaagaatcaaaactgaccagggctggcaactatagatggcatgttgtagctctggaaagtatctgtcacatgatattttaaaataaagtggcttttgtggattttttcttttttggtattgtaaacatgtactgtttaatattacccgaatttaatttaaaacatgtttgcaaacaaaacaaaattaaaagcctttaaggcaaacctccccctaaggaaaaaagtcatttgttataaaattgtgaggacacccaagcaagaccccacttaagattcgtcagcatgaacttgagagcttttgtccactgctcctcagagttaaactgggttttgatggaataggagccgccactgcctcctgtgtcttcaatcttgcctttctccacatccatcctgtagggaagacaaaaacgtgtctcgcctttctcaacctcttctttgaactgctgcacacagtccaggaaagccaccattgcatggtcaaacttgttgtcccagaaaaaccgcaaccccccagaacagtataacggcagctccttagatttgtctgtcagagactccagata

SEQ ID NO: 158242 - DNA, 1000 bp, Homo Sapiens
ttttttttttttttttgcaatacaatcaatcacctttattccgggttagaacaaggccgtgcacactgcagacagaagagcacaagataggggcaatctcacagcaatataaggagtgggtgggcaggttagtctttttagattattttgccttacagagaaactactagactctgctgaaaagaaccctgtctctcttctcccatttcttccataagaaaggctccttattctctctctcactctaacgtaacatatcccaaatggaaggacagttcatgctcattccccccacccaattctacaagtatctctctcttcttaagggagaagccagacagggaaagggagacttgggaaggtcctttaaggcaaaactgtggagtcctagaggtgtgtgtgttaaggcaggtgtctgcagcagtggccagaggggcagggcacgctaggctgggctaggagttaagagtactgtctaaccagtctggcttcttccttcttccagcagccagccctcccctcccattaaagttttactcccacatcctaaaagctcctaacttgaactttgtctaaatagtctctgagactgcatgtgaatttaatgttttttgaaaaagccttcttttttgtttggactatgtagcaatttgattctgccactcccttcactgtggcattcccctcccacccccgctctggcctagacaataagttaatgctagacaccacaaaaaagggcagacatggcagtgcagttttaatatacatatatgtagaatatatatgtacacacagttagcacggtcagggtggggaggggcatcttggggtaggcaggaggctggggtcactcactgtactgtagtgatgtggctaggaggtgttcacaagcccagggggccaggatatctagtaaagaagggtttcctaagtaagtcccttccgggattgaattggggtggggatcggtgcaaaggaaaacactgtagttaacttc

SEQ ID NO: 158243 - DNA, 787 bp, Homo Sapiens
tttttttttttttttgattaaaccagtatttattaacagcatgcctgattctgtggaaagcagacttgaaccctggtcattcctactctcaggggcagcatgttaaggatagcagcctgcaagtctatctcttaaactccacttgtgtgtacaccttggtgatgtcattgtacctgccttcagggggttggtagttagggatcggtggtgtgtaatgtggcccttccttctcaaaggggaacaggttaggatcccgcttgatggcctcagcatggagcttcggggattccagttgcagttcctccagagcttcctgctgggcttctagcatagccctgatggtgtccctctccatcttacgctcttgctgcttgtacaaggaccacttcttcagaagcagagctctcctctcagtctcctcaaaggtgagctccacctgaggccgctctcttgctttatccaagaactttagaggggtaataaaatcttcaataggaattagctcttgagtagccttttccagttttcggatcttccttttcaagcgctcctttgcttcttggtcttttttaggatctaccttcttcttttttcgaagaggttctgatctcatgggaatgagttcccagaaagacaacaatgacgctcgctggtgagtctctctaagctgcgtctgccaagttcccagaagcccgctagtcgggcgcagggctagcgagatacttcgcagcacggaggccgtcatggctaccctcgccgcttccgggcgtgcgcccctccacagtcc

SEQ ID NO: 158244 - DNA, 1000 bp, Homo Sapiens
tttttttttttttttttttccattcacgttttttactaaagcacccacacaagtttctgtgcaatgtacaaacacaagccggccctggggctcctgcctcctctctcagacagggaggcgggaaccagacttactgatccaagccccacctgcctcccatgcaaaggccaaccccaagatcccaggcagcgacacagcatcccctctggtcccctcctggggctgctcctcagcagggggcgcaccaaagcttgccccctacaatgttgaatgaaaaaggtttcccctcccctgggagcaagggggttcccaagagctgagaattccccctggaagagacactgccccctagacatacctcccacccttccaggccctaggggactcaagggggggaaactgaggcacagagaggtggagtgacctagcccaggccactctgcgaggcagtgcaggggctggcccgaccctgacagtgactggggctgggctagggggagggggtcgggaaggagggttgactccaaagagggccacacttgaagagcctgcccaggcaggaggccccccaaagtgggttctgaaacttccaggtgtagctagggggcctagtgaagacccttggaaaacagagcccagtctcagtcctggaggtcctccacagagcagctgccagccaggctgtggtcagtcctctggcaggcaatcttcggcaccgagagcctctgtccattagtgtcagccccgagggggccacgacggaggccgcccaatgtccactgtgatattggtgaagagtggttgccgagacacctccaagacctggtaccgcactgacccaatgccgtcccgcttcatggtcagcttcgtgttttgaatcttggtaaacctctgagggttaggttcgttatgcttgtcgcggtcgtgcttgatcatgcggtagcggccgattcggatgtctgggcgtgagatcttcatcccagtcagggagatccggttg

SEQ ID NO: 158245 - DNA, 1000 bp, Homo Sapiens
ttttttttgccaggtacttcagctttcagtccaatgagtcagtagcaaattccactaatatttcagctggatcttgaactattgttttataccacaagcttcttctgttttatccttgaattaagaatagatagccttttatgcccctgatatttatggtgacacactaaaacaaaaagcaataggctggacatactaaagtagctcaagtacttcagaggtcagagttcctttgaagcaccttaacacatcacttacggatcaaggacaatgtggcataatggaagtatttctcttaaaagactgtgcagtaagaccagaagtatctctgttgggaaatcaaaatgtcattagtggaactgcaaatttagacctcagtgaatatggtggtcgtctgtctcagttctgttgtaaaatgagattttccagttcatctgcagatcgcaataaaaatgcagctgattctcgatatcctgcaacaagctgtctcacggcattgatttcagttggactcagctggggtctggagtttgagctgctggaggatcctgagctagtcgccaattgtctcttcatgctgagatcagtgggtccactgctggaagcatcattcagatttagcagaccccctcctagccctctgtaactatggtaactataggtcccatttccattgatgtacagcacgtcctgtgagcctggaacagctgatgttgagtaagtggcctgggtcgcctctggtttacactgtttgtcagctggagcagactcatcctgctgtctctccagacgcatcctcttggcggcatttctactctcactctcacaagctgaagccaagatactctctgcaactgctgaagtaaggtgggaaggaataggtcgagacatctcaaaaccacttcttttcatccgcctgcaggacttgaggtaagtacgtatacgttttctggcacgctcttgatactcagggaattgtcgcctgcatgagtcaatgata

SEQ ID NO: 158246 - DNA, 1000 bp, Homo Sapiens
ttttttttttttttttttttttccgtgttatactttattatcattgcttaacattcggggtcccacgctgagtgtgagctgggggcaggcaagattgattcctgttttacttcactgcagtatctgcagcacccaggatgaagtccaggacaccaaagatcaaggtgcttcatgagtgaaactgtaagggctggctgtaagccccgcttctgggatgggagaaggtgaggctgatctccaaagcaggtcccccccaccccacactctatcaaagtacctgaggcagaatccccaatgatgcacccccagtggtctggctcctggggaaggcaatcaactctgccccagcaggtccagcagataggccaagtggagtttcagggtcccgtggatggacaggggttcagcaatagccgcagaaggaaccctaaggccatccaggttctccaaaagctggctgcacccctggtctaggccaggccgccattgggatcggtcaggcccagcaagtcctctgccaggctggtgagctcgttctcctcgagtgcctccaccaggcgctgcagcgtggcgcggcggccctcggcctgcacgaagcgccgcagcagctggaaggcctgctcgtacagtccctcgcgctcgtactcgtaggccagcgagtccagcgccgggtcccgcagcgcccggcagcctcgctgcagtgagcgccccaccttgcgccatttgagacccacagagcgcgcgaacgtctgttggtccttcaggctcagcggccgattcactacaggctgaccctggaacagaaaagtctgggcaggtggcggcggcggcggcggcttcacctccgacagagagggcaccgggggctgcaagggggccgaagcgacctccccgtcgccaccccgggcccccgagccgcacttcagatttcgcagcgcatcctccagctcagccagttcttcatcccggagccggtcgggctgctgggctaggatgcaac

SEQ ID NO: 158247 - DNA, 1000 bp, Homo Sapiens
gctgaaacagacactcatttatttccccagaaggaggcagaatggggtccttggggagtctctgtcccagcccggacaggcagatctcacttccagaagagcacattccagaaaagcagccagcaggggtagaggcccagggacagcagtgggaagagcagggcgccgtaggtgtggtgctccagcacaccctgggctagcgctgccaggaagagctgccagccctcggccagtgacagtggcgcctcctgcagctcccgccacaggaacaggctgccaaggagcgtggctgccgggctggtcagcaccagcagggcagcataaagggtccggggcccatgaggcttggcaagcgcagcagtgggcaccatggtggtggccagcaggaagcccagtgagaagttggtgagggcgatgcagcccagctgcagtgctaggtagatcagggctaccagcttcagtgccatccagcccctgtctggggcctgtgtgcttaccacccggtgggtattgtggggcagggccaggccagctgcataaatcgccagcagtgtcagcaccacagcctcagcctctgccactgggaagtgctgggtggcaacgtgttggcccagcactggcaggacatagagggccagtcccatggcctgtgagatcagcagaggtgccacgagcgaggccagccccacaccctgtgatgggggaaggggtacactggggccaggggcacccccgggctcctcaaggcccattccagcctcatgcagctgcatccacagttccagagccttgagaccaaggaccaggagcaagaagccgacagcgggcatgtagaggccgatggagacgaagcgggagaggccggggagcaagtagaggaagaaggactggtgcaggcgctccaggaggtggttgagcttgcggaacatgccctccaaagccttgcccactgccaccaggtcatacttgtactggcggaagctattgatgccacgcaggg

SEQ ID NO: 158248 - DNA, 1000 bp, Homo Sapiens
ttttttttttttttttttgacatactgtaatagaattttattgaaaaaaataacacgtacttactgaagttttttttttttttttttttgaaaccaagtctcgctctgtcgccaggctggagtgtagtggcatgatctcaccacactgcaacctctgcctcccgggttcaaacaattctcttgcctcagcctctcaagtagctgggactacaggcatgtgccaacacacccagctaatttttgtactttcagtagagatggggtttcactatgttggtcactatggtcttgatctcttgatctcgtgatctacccaccttgggttcccaaaatgttgggattacaggtgtgagccactgcaccaggcaaactgcgatcttttagtggtgcctcttctctcttttgacttaaggatgttgtcccttaaggaaacctggaggctactactgtgatacactacttgagagatggattgttgctctttcttctacagtctttacaaggagtagattataaagacagaagatgttaaccattgcattaatgtttggaagctgacagtcttctagatttctgctagcaaactgatatgaggtagagtcctgaaagatctttcagcaatttcattctcttgggataagtgagtcactttcagaacagtgtgtgttgtagaattttttggttgtggctgctctactcagattgcatagaggtttttttgttttctgttttctgtttgtttgttttggtcagattttttgaaacatcttcatagtgtatcatcctgaaaactgaatagtcactttgaggttattgctttttctttccaggtcagttagccaactaaaaaggccccgaaaaaactggcttcatggtccatgtctatcaagtgctcatttgttacagaaacaaaaattctgtcattttccttaagctcaaatattcccccttgatagatggaatagagtccatattctgcatctttagaccaacaactatt

SEQ ID NO: 158249 - DNA, 1000 bp, Homo Sapiens
tttgaacgctcccaagatgtcacgtttattgcaactgagcagagacaggctgtgcggaccttcctcaatcccgtccaacccccagcccctccccaagcccccgctgcaactacgccggcaggtccgcagagtgttgcttgacagcgcgtggcggtgcccggagtcttaagacaccgccagtctctggcgccttcagtcatggtaggggactccagagggcacgcccgcctcttgaagccctaagtccggcttggaggcagcggaacctccggagaggtcagaggtagagcgaggacactgtcggaggcggtggcgctggtctggagggtaccactaggggcgggattccagcccctgggccgggcaggtcacccgatgggcaccggccctgggggtcggcaggcagtggcttccttgggggtgggggcttggctggcccctgagacttagtgcctcgtgccagcagggccctctgcggaggtcctggccgttcagagggaccagattgggctgccctgtactggcaggtgggtcccttgagctggcagagtcgctggtgcaggcgggcacggtaccagtagctggcaccaagcatcaccaggaccaataagaccaggaggctgaggagcagccctgtggtcagggagctggttgctttgagctgagtggtgcagtcagggggtgcccagccctcctcacagtagcagtgcctgttgctgtcacagaccccatgtccatggcatttgcttcgacattcctgtgcccccaggagatccacacgctggcatcgatggtctatacacaccaggccagggccacaggctgtgccaggcagagtcaggaggggctgggccacatcactgcccaggtccaggtgcacccagctgcagttcagctcagtcccattcacatctattgtctcccagagtagatcccggatggagcccagcagaggctgggtcctacctgtctggcactggagctgcccacaaatggcatc

SEQ ID NO: 158250 - DNA, 1000 bp, Homo Sapiens
gcggccgctcgactttttttatggagattttttttctttattgggaaacgtaagacttgggtacatcaaataaaaccaatttctgggggaaaaaatcaaaacccacaataaaaaaaaagttaacactgtctgggccacagcagaacccaaagaacatattcgtataattgaaaaattctaggtgcttcataattgaccttttgatacaaaatgacctattaaatttgcaatttgtaatccttggtgttgaggtccataggacaagctaggaagtcttcaaaccttgagttgaattccataaggggttatttggcttttgaatcggtttttccttgtctaagaggtagcagcagcaacagcgcccaccttctgggcagcttctttcttggcatgatgagcctgtagaactgctacagcttcatccaccttggagcggagagactcgggggactctaacatgtgcagcagctcagagttgtctatctccagcagcattcccgtgatcttcccagccagatttgaatgcattgtttggatgagtgggaacaagcgttctcccagcatctgcttctgttcctgggggggtgctgcagccagcatggaggcagtcagtggctcctgcccctgcacatggaccgcaggctggggtgcctgcagaggctgtatggcaggatgagggctgcggacactggaggcgtatttgtagggggcaacagcccggggagcagcagcagcaacagcagcgcgtggcgctaagttctgcacagctgtgggaacgcctccagactggcagctgtcagtcagcccttgctgggcggcaccagccccaccaaagtccatagccaagcggtccgggcactcagacccagttggagccagatggcgaagagttggacgaggcccagactggcgtatagcacttggcattccttggaagccttgaggtctcccaccttgctgccagcgtggattaggcctcatctgtgctaactggttaggt

SEQ ID NO: 158251 - DNA, 1000 bp, Homo Sapiens
acacatcaggctgttgactttatttagcttggttgttggtgacagtagggaaggctgaggttaaaaatggggacaggaagccggtattaatatatttatttttttctttatattgtattgttttacctttgaaatatcatttttaaagggaattcataaataaaactttaaaatgtaatcctaataatggagttttaaattaataaccctttgtagggcaattaagcctgggattttagggcagggattctgtactgtctctggtgggtaaagggtatatacttcataaaatcaaattgcatcttagacaagtaacaaataatccatgaagaacatgaatgtgaaaatggcttccatcagaaatacatcataccttaaggcactgttataaacaagaataattactatcctttaaaagtggtttctgttaacaaaagagacataaaaattgaactatgtagcaaaattcaaactttttacttgtattaattaaaaaaaatactgcagtgtcatggagggagactaatatttacccaaagaaccttcaataaagctttaatactcacggattttatataaaaaaagtcaaagcaacagagatataaatatccttttatgaaacacatttcttcttgaaaaacagtcacttacatgcttttattttgaagtaaatttaaagatggtgatctagaaaccacaagtatttccgggtaaggctgaagacccatttgtttgttatctttcaatttttgtactataactttggcaaattcttctccttggatgtcagtagtgtctagtaattgtctgacttttgaggtccttgtaggcttggtactaacaagttcatagtcctctttcatgatcaagtccctggacagaagggcatctagcgactggttaaggcaggcttctgtcatttggttcacaatgtcttcccttttgctctggatccactgctgggctataccaggctgcagacgttctgagtttcctgcag

SEQ ID NO: 158252 - DNA, 1000 bp, Homo Sapiens
tttttttttttttttttttttttttttttttttttttttgtgatatggaagttgtaaagctgtgttttaataggattaccttaggaataagaggactgctttttaaagatacgagatcccgctgccttggcaattctgttatcagaaagatagtgattttgatacaaaacagtaagaaactgtagaattgcaggacccataatcctcacaaggaagatttagagagtgctgtgtgtcaatcactcatcagcacctcacagatattatctcaattcgtcctggcaaccatcactgcccctacttagcagtctcagagaggagactcaactcacacaggggccaagagctggaccacggccaaccaggtctccccacccccaccccagccatgcctctccccaccacgcaccccgcctgaccctagtgtccaggtctgtcccggtggcctccaaggaaatgggacaaaacatcctttctgccaactgcaggggcagcagaacgccacagtggttgagcatgggctctggtgaaggatggcgggggttcaaatcccagttctccacctctctgcttcgctccgattcctgggcctctgagctggtctcctccgctgtggagtaacagtgtgactgctcatctgcacagattccttctgtgctggacacggttccaactttccaactactcccgcaggagctcatttagtggagacaagatcttgctcagtgtcatagtgaggaagaaatggaaatatctgtgcagggcccaagcccggcctggtgcgggagaggcattaataaacgcagcttgagttcagaagcaggtggtctgtggctcactcagcctggcttcctgctgggtcttcacagtgctgggctaccttcctggagagaaccaaagtccaggctgtgtagatgcctgtggtccaccagcgcaaagcagcggcccatcaggacgcttcggaggtagatgcgtctgagttccatgacatcggggacat

SEQ ID NO: 158253 - DNA, 1000 bp, Homo Sapiens
ttttgactcatgcaaaagtgttgttttttattttctttcttgggccagctgcagcttccaaccaagaaaacctcaaagcattagggaaggagcaggtgtggggctggggtggggagaatcccctaagctccagggcccagggtctaacctgagaggtcggggctgcaggaagctgggggaggctcccggggctgggggaagaggagcctgcccccagcagaaacagcaggtctcagcggctacatgtgctttagagcttggctgggggacaaaagtgggagagagagagaaaccggcctcatgactcagctggtcaggagatagggggccagatgctgaccccaaatccccggcagcacccctagcaaataggtctgtatcaaagattctgtacagctggttttgggggtgaagggcacctatgggggcttaaataaatggacagggggcaagggatgtagcgagaacagagggtgactgtccggccagcagcctgggcctctggcgcccctgcatgctgacccccggtgccacctgcccactgtggcccgcggcactccccagatgggaaaggagggaagctctccagcaagtctcggccccacctctctctgagcagatgggacaggaagacgggcactggggggctgggtggggcttagcgcaggtcctcctcatcgccctggatggtcttcttgatgcgcagcagcatggtggtgagccactggtccagccgggagatggagtcgtattccttcaccgactcggtgtagctgtccacattctgctcctcgtgggcctctagcaattttttcatcaacttgcattcccgggaatcagagaaagctgggaacagctcctcatacttttggacagccagcttggcgttgagcatgtcgatgcagaagtggcagagggccgccttgaagaagtagtctttggcgctgtacttgaggagggggctgtccatggcattggtccccacctgttcgtagatgtc

SEQ ID NO: 158254 - DNA, 1000 bp, Homo Sapiens
gaaatgtatttgtgttcctgtttattaacatgttggtaaacttaggtgtcagcttttccataagtcccctctggaggtctgtagtacttggggaaagccatcagctgtagcatgttgaaagcatactttctgcatttgatattcttcagtacattctctatgcggcatccttctcttctcatgcaatccagcgctcggataaagaagtccttgtgtaactggtgctcatctctcaagattgagcattgttcaagtgtcactgacatcgatgtcctgtctttggcacttttacaacaggtgaaacgaataccattcagtttgcggcaaatcgttgcagccagccacataatttctacattctttctttttttggattggatattttgaaggagattttctagcaatgcttttaaatcattttgttcctgaaaatgtgaaatataatcaggaggcatcttttccataaatatcttgtaatattcttgtagaagttcgaagttttcctgattaatactttcttgcaaagagacatctccaaacctttcagccagagtttgctgttcattgattccaacattaaaaagtactggatacacatgaagcaactgtccttctttaatctgtagaggtagtgactcaaacattctggctggaagcttgacctctaccacgtaatgttctcgtcttcctgttataactggcaatacatcattggatttggcttcaattattttaaatgcaactttctttaaatcggaaatgccaacgggcatgtcctctaacattccaatttcatcgctgtatgtacttaacaatccttcatattgtactatcaaccccactgtgtgaagctgctgtaggaagcctgggtcatacagacttgtctgtaatttgatgataaaaccacaaaccaatccagcaagtgcttggctgaagacgatgtctcttcttagcgtcagcatcagacactggggcaagctgtacgcaagttcctgaagga

SEQ ID NO: 158255 - DNA, 1000 bp, Homo Sapiens
ttttttttttttttttttattttatgaaaatgtttaattcaactgtttctttggaatgtagtagtcatagtttggaatttaagttacagttcagttctatgtggtttttatgctactcagtgtctgagaatacaaatgtcatttaaagttaaggcttcgctgttcattttgaaacaacaatttacaagtgtcatattgtcatagaaaataataatttctgtaaaaaaatctgcacaaaatcttatgatggtacaaaacatgaagcaataatataccagtaaaatgaaaacattttactacagaaagttttatagatttccataaagaaaaaatatgttattttacacctttaaaaattacaaaacaatctaaaacaatataaactgaacattttgtaacactgcctttacaaattaataactttatagacatataatttttaaatatatttatcagtgcaagatactttaaattttaaagttgcagtatcatttttccttggctgaggacaactttaagtctgttgcctttaaaaacaacaaacgagtgtttcttagtgctttccttctggtaggattatatcaactaaatgaatgtctctggggacaaaaaactattcttctttcatggtgatcaatattttcctggaaacaaaaggcattctcaatccaatttaactaagatgaatggactgtctcgtctatgatgcaaatgtgactcccaacaaatgtctttgagtgagacgtctagcaatgtgggaaggaagatctaaaaaatctcatgtccaacatggcatgataaaaatccaccaaaaccaaccaaagcttctttgggttaattcataggctgcctggtaagatatttgcttccctgtgctgttagaggcttagatgttgccagccctaaggcaggcttattctttgtgagccgctggaagtttctagaagcattcatttaagtctattttttcaaggttgctgttatgaatttttaaaacatt

SEQ ID NO: 158256 - DNA, 1000 bp, Homo Sapiens
ttttttttttttttaaagagatgggatcttgctatattgcccaggttggtatgcagtggctattcgtaggcacaatcacagcatgctatgaccctgaactcctgggttcaaaagatcctcccacctcagcctcccaagtaactgggaacacaggtacccacacccacacccagctaatttttgcatttttactagggacagcgtttaccatgttggccaggctggtctcgaactcctgacctgaagtgatctgccctccttggcctcccaaagtgctgggattacaggtgtgagccactacgcccagccttttggtttcttatgtgtaggagaggataagtttctttctcagagtgtgctgcagccagacataatatttctccttggcagaaactctgctgttccaatcatacatgtagccattgagttcaatgtgaagatccaggagtgggcgttttctttcttgtctcagtttctgggagaggcactgcaggtacagggacggtgagctgtgagactgctccagcagggacatgtccgcagtacacaggctccagaagaagtcagcttctcggtgaactgtgcacagccctcgcttctgagccttgaattccacattcttcatcgctggcccatccacctccaagaggctgctgttctccagctggccctctgacaccacatagttctgaataaaaaacatctttggcttccctgctagataagggcatgaatctcccatgaacatcctcctgatgtgatgcagggggagccctgagtgagtctgatccacaccatacacactctgggagcctcctcggctcaccaggacacacacaaagctgtcgtagtctcggtgctcgggcatacaggcaaattggccaagaatctgggatataccatgcatactgagatgcaagaatttctggacttcatagcccagggaagtgaaggtgtctcgaagaagctctgtctcattgccaatgcaatcgattatcag

SEQ ID NO: 158257 - DNA, 1000 bp, Homo Sapiens
ttttttttttttttttggaagctttttaaaatataatttaaaactattttgtaccagtacaatatattaattttacaaatgtaaaatttttatcagctgttaaagcatttgcaaaaaccacacattctacttcagctttattgcacaatatctataagaaaatattaatttttaaattagaaaacataaaaatgctttcaatatagaagagacaatctgattttaaagacaatactctataagaatgtctactcagaaaataacaaactttcacaggataccagctggacagatgcttcagcagatccggtacaaagcactgtttaaaaccagtccaagatacttaatccaaactgtatcatgattcttcattagaaatctagacaccactcatggtggtttcttacactttaaaaagttgaggcattttcagtgtgagcattctgaatatctcttacatatcaaaaacaatacttccaactcaatagccatttgcagggttctttttccttcatgcagattatcactggcaactgtttttaatgactattcatgaccattttatttatgctgatagaaaacatcaagttaaatacgcttttaaaactttgtcctttacaaaaatcagtgtataaatttgcatcataaaaattagtgttgagaccatcaagatggccttcatttatatggttgtatattagttggttttcccagagttgggaatggcagatgtctcacttttctatgtagtgtaatcaggaaataaatccaagcactaaactggaatcccaagacagattaataaggttgcatgatggattttagggggttatgaccctggacgcatatactaatgtgggtgttaaaatactgacagcaaaccctggtgggaatttaatttacctcagacaataaacattatctggagagacataaaggaaaatgttcatttgcatattatcagcgtggctgtgtgtatcatagaaaagaaaaagaacct

SEQ ID NO: 158258 - DNA, 1000 bp, Homo Sapiens
ccatttaaaagtattttatttttttccagtcaaatgactagttaacaagaagagtaaacttattaaacatgctctaattataaatcactgcattaaggacaatgaaaataatcaatttcggttatacaatatatacagttgtgctgcaaccaaagtaatcaggtgaatgaactgaatatcatacatctcaaaatagcatcctaagctgcatattatgttatccaccccttaacagatcacacagttactcttagtctgtgtacatgttctgagccatcatcccagatctgatggagaatggcatgcaaaatgccagaatcctgcagctgcagttcatgaaacataaactttaaatataaatagatatctacaatgtttttctttctcttagttgcttttttaatttgcaaggagcaaataactaagaaaggatattagcagggtcgttaatataatttctcctctggtaagagtactattagttactgcacaatagcaccaaattgtagactggaaaaatatttcctaggtatttatgtaccagtgaacctgacagattagtttgggactggagttctaatgttgatatgaatcaactttattccttatatagctggcaccaggtggtcaaaaggctgactataaaatacagatgcaggaggattgttaaaatagacataagtgcactgtgcaaaatacatctgtttacttaaatctatgagaaaattaaatgaagggttcaaacagaaattaacaattagtgaaaacagatgtagtgctttaaaaaaaaacaaaaacaaaaaactacagatataacacatttttacccggaactttgaaaggtaaaaagcgattgctatacaacatcataaaacattccagtttgttctgtcttcctttataacaaaaacaaaaagtacaatgccaaaaaaaaaaaaaactctacacagtcttgcataataaagacaagctgcttcaatcaaatgcaccatcacaacaa

SEQ ID NO: 158259 - DNA, 1000 bp, Homo Sapiens
gttcctcaaaagtttttattctttttcatctttttaaactggcacactgcctggtatacaccgccaggtaggcattcagaaaagtttcttttttttaaatacacaatttataatactgggaagatttcatttcagtgtttcccaaaacattattcctggaaagggtgtactctcccatgactctggataatagaagttttgttctgattttttaagtcacctcagacagacactggaacacgttagatctaacacttaagtgctttgaaagggcagtaaaaaatccccaaggaattcaagaattgtaataattgctgggaagactgtggtttctgtagcccagggtggcttcacagttgtcagaggtcacagattctatgtccctctccgaccagggacctccaggacagcttccctggttggttctcgagtctttcagcagaaggcagaccaacagagaagggttgtgaccttctccaaccagcccaggcctcacgccgctgcatcgcagacccagtatcagcagcagagctacggagcacgtcatcctgggagtggatcctccgtgggtcacaccaagcagcgcagcagggaaccagaatgaggttcagggccaccatcaaaagagtgacctcccctctccttccaattagttacctgtattcaatgtgcagtgtaaacgagcagaagttttacaaattaaattactttcttaaaaatcaatacaacatcgttacatacaattctctttgagaagtctttccaattcaattcttaagtttcatttacaaaatggtgtgcaaaaacaaacactgacctcaaataaataggaaaaaaaaagtgggaagagctaaaattttttttgtgtttttaaattaaaagttaaaaacatgagctgcacttcaaagtatctgcaggatggagaaatacatcaagaaggctgtcaaaaacagctctcagagttagagttgcattttcaactgaggttttctgtgttcaa

SEQ ID NO: 158260 - DNA, 1000 bp, Homo Sapiens
gacataagaaaaataatcagtttaataattacaacagtgtagcatcaacattgtagtagtcaacactaggacattgtctgtgacatttaaattaggagtttctccacacttgtcaacaggcgccctgggtgtcccagagaagtgaagaaatgattggcattaaggagtccacacaaccagggcaggcattcaaggtcccagacgcccagcgcatgtggacaagcacagacgccactgagtgtgaaggaacgagcttctgatgctacattccaacatcgctgaaaactgaaagtgcttcacatctacaggataagaaatggcttcatctcctcatccatacaaggtgagagcaaaggagtaaccctcgggcaaatcgtggcccctttaaacgtttatatcaagttcccacccccttgggaggtcacacggtgaaacagacacagttatatacaacagggcaggtttttaaaaagagttgctctcagacgcatttttcctgctccctaaaaagccgaggaagatactggatccacagaaagaaaaggcaatgccgtaacatgaggccctcatggccgcaccgtccaggggaagggctgttaaaaacacaagtattcttgtgaaatacttcgatctgagcattaaggcaggtctgcaggagatccgtcctggggactcggacagcaacgctaccggctccgagaggacagttaatgtcgcctcccggcagaggggcggagagatcagacaagagttgttcctgagttaaaacctgctacaacagcaaactccaataaactcaagttgaatggtttcccactgcaatgtcttacgcatcaccaaaaaataacttgtaaaactcaagcttaccaaaaaagaaagtgttgatctttgcttgtgcccgcatgagtgaatgatctgctaagttgaggaagctggcaattctagtgaaaagtccaggtgaggccaggttctgcagcatggggcaggtccacgctgagcc

SEQ ID NO: 158261 - DNA, 1000 bp, Homo Sapiens
tttttttttttttttttttttttgcggtgaggtggaaggcatttatttgctttgtcttgctaaccctcaaaatcaaagcctgtcccagcctgacagcttccagcagaaagtgtcagaaccagaggcccagccaaggcccaggcagggcaggcggtcctcctgggccctggcattgttcttacaaatggagggcatggccatcttctctttcagggacaggctggcctgacatggaaggtgaaacaaggcagcagcccctgcctccaggagaactctgcagactgcagtgccggggagctgaggggtcctgggaaggagctatggagtcccatccagcaggttacagccacatcctctaaatgggcgcgatttgtcctgccacctagaaaaagttcacatgtggacagtgagcagccaaggtctcttcagagggaccccaggccagctggtccagcacaggctaagcaagggacccccagagcacaggcctcaagagaaggcctcagcaggcccactgccgctgtccagcttcctcgggccacacaccccgtcacatctgggtctgagaggccttgcgggaagacctcatgggacgcaaggactccctgggcagagggtgggcccctggtcctggaggcacagaatcctcgacccacacgactatgtgacctctttataactggggaagacttcgatgatgatgtgtgatctgggactggcaggttattaatcgagatacacttgttaggagggacagggttcccctaaggcacttttaaagatactctgtaagaaccattaacaataaacttactgtcaatcatttctctctatgcaaacgtcattggttaaagtgctgatgccatttaattagattgtttacaaatttaacaggatggctacaaagagatcttattttaaaagcagctgatggtttggaaatgagagaactacagtggtgaagagaccaggaggcagctctcagtgaaaccaacattgc

SEQ ID NO: 158262 - DNA, 1000 bp, Homo Sapiens
ttatatacattgaaagagttgcttcacatggaaaaaaactgttcttattagactactcatattcactatctgaaaactgtttaaaattagttatgccgaaacagtcttggaaatcaagtattatcaaattaagaacagaaaggttaactgttatagcagcagtacaggtctgaaacagtggtcatgtataaaaggaaatttcactgttaatgcaatggaagtatgccaaaagatcattgtacacacatgcagtttttaatcaaacagaaggaaaaaaaatgaagatatcaggattacttgtgctgaaagagccaatacaataaatggaaaagatcctccaatctaccactatactgcaaggggggaaaaacatgccagtgtttaaaaactcaatatttcatggggaaagcttatatatttgtgtatatgtatcttaatttatcattgctaagaaattatgaatcctttaaatacccacatatccaacttaccgacacaggaggtttcatatcatttattgtaaagcacaaaacaggcattttaaaagtgaaagtatacattgaaaaagtacatttatatcacaaagcatcaaccacataattgcaaatacatttgctggaatgtgtacatctacactaaatactaaaaacaaaccaattttcatttctacacagaaatattaacctcctatcagtagtgatagatattttgtacattttcaaaaaaaaaaaaaaaaaaggaaacactattttaaaccaaaaacaaaattaagatcttcatcaagtcgtctgcatccatatatttaacaaaggtttttttcccccacacaatgaagcaaatactgtattgtccacttcttattattggccctgaggtgctggaggatgctgtggcattccctggggacttgtctgggcataataggctgcttgttgtctataatactcagcccaggctgcactataatctggctgaccacctggaggagccccagtcggag

SEQ ID NO: 158263 - DNA, 1000 bp, Homo Sapiens
ttttttttttttttttttttttttttttttttttttttttttttttttttttttttttttttttttttttacaccactctcttttaatattaacatatacaagcagcagaaagagccaactgctctctgctgttccctgagggaaagccggagcacaaagctgttcctctggccttcctccaactgccgggcctgcttagctcctccctaggcagaagctttgttccagccccacttccacatcccaactccacagtcaggatgggaggcacatggttgctagcaggggaaagaatactgtagttccagcctctgctcctttcagtctcagcctggatggtggtcactcatccctctgcagctagttcctcacttgtcccagcccaggagccaggagggcactcaatcacacccaaaggagcaggcagtgtgacttcagtcatcttcagatgactcctcttctgcctcttttagccactggatgaacctctgcagctgttgattcttgcgcaactgctggcccttgtcagttgtatctctttggctgaaccagctcagaattgtttcctcagccaggatctccagctggtagaaagccatcagtaccttggccatggaaataccaagagcttcatgctctaggaagaagtcctcaatggctgctaacgcttccaaatggtcggctgcgcgctttatgtagttcctaaaaacagggctccaggcctttagcagaggaagcagcagggcacagtagcggcttgagtcaagcggggaatccatctgttgcagggggaactccaggaccacgtggctcagtacctgcatcacctcctttagacttacgttataggcatacttgagagagttgatttccaggacgagattgtcacaagaaatgttctcctctttgccccgctgtagtgttcctaaaacttcattctggaacactttgatgtcatccatctgaggggagcctccccggctgtccggctcctcagaa

SEQ ID NO: 158264 - DNA, 1000 bp, Homo Sapiens
tttttttttttttttttttgccacctaaaacactatattttatttttaacttttctattgttttggtcacatgtaaagaataaaaatgaaaacacactactctgtcacatcaagaaataactttatccaaaaggaattcaaatgtaagatatatttagcatcaattcatatattagtaacttacacatgtattgtcaagtatgacatccataaaagcacaaaacagtttctaacacgttccatcaaacttctggcgtactttatgtgtcatttccatgactactaaccacatatatagagactaggggatacttagtgaagacagctttccaggaagtttacaaaattgaagaaaaaaaaagtatgtccaaatatggcataagtagcaatggggccctgaatttactttggaaagattgcctaaggcaccactataatgaacagttgtaaatctctgatcagacttcaaatttttctggtcttaaaattgcaattctaaccacaaggttaggtgactagattagctggtatattatttcctctgtgccagcatctgtaagaaatattacatctatcctgggcaccgtcactccgatatatatttgtaatagatctgattatatgaggtgtgaaagtcaatatgggtaatttttctttaaatgcattttaagaacaaacagcacttaaatgaatggtggcacaacagggaaaaggactattttaatgtaaaacaatattaaatcagcgtatgatgaggttgagtgctgaaactgtgaaaactgataatttagaaattgtaaatgcttttattcaaaactgtaaaaaggcaccaattaccctagtttgctggaatcacagttcttatgaataatagcatctactgatgaacatgatcatgaattaaatgttttaaattttaaaacaattttaaaatagaataattctgataaaatcagaatataaaataatgaagaccaaatccaattgacagtgattacct

SEQ ID NO: 158265 - DNA, 1000 bp, Homo Sapiens
ttttttttttttttttttttggtcttcactggtctttattgaatgagggttgtcaggagcaaaggtgggatcaagagcagcaaaagcagaaacaagtataaaagtatcaaaaaatacaaagtgctagcactgaggagagtgagaagggttgggttgtggcccagagggacctctgggacacaggattgaggacttgccacagcctccaagggaacctaggcctggggggcctgtgcaggatccttggctgagggtggaagtggcttgagcggggcccaaccctgggccctgaagtatgagaccagttgtgtgggcacttctgcgagcacggtctgtgccaatgcctcccgaggggcattctggaaccggcggtagggtacaaactgcacaatgtcgcgggcagcagcctgcccagaacgtgtatgcaggggtccaccatcagcgtccagctgctccatggcctcaaagtcagcaccacccacacccacaatgatcactgacatgggcaggttcgaggcacgcaccacagcctcacgtgtggcttccacatccgtcacagcaccatcagtcagcagcaacagcatgaagtattgcgaggcagtcccctgatgtgcagcctgggctgcaaacctggccacatggttgatgatgggtgcaaagttggtagggccatagaggcgaacttggggcagggcttggcggtaggcatccacaatgccctggatgcctgcacagtaggggttactggggttgaaattcaaggcaaattcatgcgagacctgccagtcagggggaacctgggccccaaatccaaatgcagggaacagcttgtctgagtcatagtcctgaaccacgctgcccacactccacagtgccatcaggtactcattgacccctgttggactcaggtagtgtagggagtcaggtgaggaggggtctccattggagccagtgaagtccacgcccacagtgaagttgatctgacagcctcccatcacat

SEQ ID NO: 158266 - DNA, 1000 bp, Homo Sapiens
ggctttcctcacttctcaggctttattgggctttatttgtgggagaagggggctggtccccagtttttgcagtgcaaagccagagcgccacctgctggtagccctcaggtgtaggttcgaagctgctggggccccctggggtttgggacacaggagaatttcaggctgtgagtggagacagttactgccacgattccacaggcaagttgttcacctcaaagatctcctgcaccgactggtgaaagtggtcgtaggtgaggcgcagctttagccgcaggggggccttgttaggattgaggattctgaagagctgggtgataggaaggccaccccgagctggaactgtgttcccactgggggcctgcagctgcagctggagactcttgggcacagcagcctggcagatgaaatgggtgacatcaccctctgagaagttggtggcagtgatggtgattaacagcaaagcagggttttcagggggtcgaatgaaagacagattcagctgtactccctcacgctcaaacactttgagatctgggatgggagctgggggtggaggtacacagggaaggtcaagcaggtgtaccagggcacctcctggggaggggtccagatggggaggatgctggacatccccagaagccccatccaggagatctagcagatccaggagctgtgaggcctggggctctgtgggcactggggctgcttctgaaagctgggctgcttctttgctttcctttgcttcctcatcagcctgagggccatctcgctccacaagaggcattttttccaggatggcagccctcatgtggtcgtatttccggaagagtgtgtcatactccacagcccgctgctgcagctccacgtccaagcagctcccgtagatggacaccacctggcggatgcggttgttgtccccacagaggcgagtgctgagcttcatgagggctgtgagggcatatcctcgagtggctggcagggacatgtgggactgcag

SEQ ID NO: 158267 - DNA, 1000 bp, Homo Sapiens
gtctttggggtcagcttttatttttattttttaaatatatattttttgagacagggtctctctctgtcatccagactggagtgcagtggcatgatcatggctcactgaagccttgacctcctgggccctcatgagctcaaatgatcctcctgcctcagccttccgagattacaggcatgcaccaccacgcctagccgataaaaatatttagtgggcccctagctttagcaaggctgatagaaatttgctttgtattattgatagtttaaaactatttttcatcttctgattatatttcatcattggaaaagccgtattttttttggattgttgtcaaataataatttattttaaaaaaatctcaaaacatgttcaaacacattcagtagcaaagatccaccattggcacacacattaagaaagcacacacactaggcttctagttgggctaattaaaatctctatggctggaaaggtggttggttgtacttaattaagcttttttgaagtgcaaagctatgcataacagatgagcttgaaagctgcagagtttaagatagacttaatttttcatgattttcccaaagccagtcatgatatttatttaatttgtggtcttcagggtgcacctgcttccactcattgacacaaaaaattcggtaagagtcgttgccatatttaccaatcccatgaagctcaattggatacttccactgctttgtcaggtattcatctgagaacttgacaatggtttttgcccgaagatcgtagagaccaagaggtttaagaagttctgacacatctctccagtctgcggttcttgctacctcagctgaaggatacttctccagaaacttccaaagcacaggtattgccattttgcctgaggtccgattgagaaatatagtagcgatgagaagcttccatggatcatgaaaaagtgtttcttgaacgagattaaaaggtgaccgaggaggtgtccatttcttaaaggctttac

SEQ ID NO: 158268 - DNA, 1000 bp, Homo Sapiens
ccaagcacatccacccatggtggctttattcagtcacgtccccacgcccacggctccctccaccaggcagacagaggggaggccaccccactgcaaagggtcccagccagtgggcaccaacctcaggaagacgtggtccccacctggagcttccctcggctgccctggcccttgagcccgtcctgaggatttgtgctttgactctgacagggagcagcaggaagctgccagcccactgcctccatgcgggtccttggagggcagacggtggagcggcgcttcctcagctcccgcggtcaggccccatcagggatggtcacagtccagccacaggggcgactctgcccatcagtccccctggggcagcgaccagatcctggctggggcagcaccgggacaggccctctctatgggcctaaggtcaatgcaggtgggggctcgctgggcccaggccaatgaacccacccgtaggagccctcactgggcagcagggccaggagggcaccagggactggccgcagagtccactcggggcaggcgtctgtggcttggaacctgccctcgccaaggcactggggggttaaggagcagatccctcagacggccttgggccagaagctccctggagagctgggcacctcgaggagcgtctgggagcctcaccctgtcccagtggctcctggcacccctgggagcgtcagcaccaccccaaagctgggtgcctgtgtcgccactaaacagaagggaaaccgaggcaggggggccggctggcagtggagcattctggcagcgccgggcgaccaagtcccgactggcagcggctggagtttggttttcagaagcgaaggctggcgttggcacacagggaaggctgcccgatgacgtgcctcgactgtgttacatttactgaaggagagcggcctcctgggcatgccactcaggcacggtgaggctctgtggcaccaccagccgcatggcagggcagagagtggcgccgtcc

SEQ ID NO: 158269 - DNA, 1000 bp, Homo Sapiens
ttttttttttttttttttttttttttttttttcttttcaataatgtctgacatttattgaaaataaggaaaagactttctccaggtagtgtattagagcagagcagaatgcaggggttactgtgttgaacaaaaggcacacatcagagagacagttgcaaactcagaatactgcgttatgggcaaaactaactggtccacaagagaaaatgagagactcgatttggctgccaggaacacctgggcctaggcaagaacacaagaggtttctgggggtggggaggaaataggtctcgctgaaggtgacagatcccttggggggcggccagctgtctggatcactgtccagggactgtggccagcccagatacctccgaggtgagtccagatcactaggagcagcagtctgtcggtgggatgcgatggatggcgatggctgtggcagcgcaggtctgtgggcagaatgatgtagtcgtctggcagtctggtggggaggagagggcttggcagcggcggcagtgggtggtctgtccagtgtgtaacaggagcccagcttgcagctggagcgcaggacagcgtccaaatgtacatgggaggggctggctggctggaaggagagggcggcggctcgctccagagtgaggcccaggggcggcagcaggagcctggagcgctattcctggaacaaaggcaagcactacgcgggagggaacaggagcgcaggggacatcgcggcggctcgagggggagggaggcgcggagggagggcgccggtggcgaccctggcggcggccagtaacacagcggaccctccccagagcacccgcccccaggcccgagggtctcccggcctagaagtcctcgtcctcctcccatccaaagactcgcttcatctcggccagaaagccccggtaatcattgaggagggggctctccttcttgatgtaggggatcacccactgcagggcgggccctgtgaggcgggtgatgaggaacgtcac

SEQ ID NO: 158270 - DNA, 1000 bp, Homo Sapiens
ggagatggagtttcactcttgttgcccaggctgaagcgcaatggtgtgatctcagctcactgcaacctctaactcccaggttcaagtgattctcctgcctcagcctcccaagtagctgggattacaggtgcccgccaccacgcccagctaatttttcttatttttagtagagacggggtttcagtatgttggccaggttgatcttgaactcctgacctcaggcgatccacctgcctcagcctcccaaagtgctgggattacaggtgtgagccaccacgcctggctcaggacccaaaaatcttaaaacatttttaaaaaattttaacaaacttcccaggtattcccgaccagccagatttgggaaccactgacttaggacacttatttaaggtctatcacagaacttcaggcctcagagtttagtaagaatatcgataactttgggtaggttataaatcaccatcctagagataatttaacaaattaaacggtctagtagtgatttgatactaaaaagccctgcccaatttagtacttaaattacctaatgattttctgtctatctactttcctaccccaggctaggacctgcacataatatgtttcctatgactaagtgcctacatgttcacaaagttgccccagtggaggttgttaacttctctcttttcttcttccattcagattcccaaagctgtgaggagcagacctatttcgaagcatcacagccagctgatgtcacttgcagtattatgcattaagacatcaacccagaaacctgcaaatgggagacactaggcaatcctatcatgaggattaagctctttgtggaagaaaatgctttcattgcatgagataggtagtttaaaaatgactattcttttttcttttttttttgagacggagtccttctctgtcacccaggctgaagtgcggtggcatgatctcggttcactgcaacctctgcctcccagtctcaagcgattctcccacctcagtc

SEQ ID NO: 158271 - DNA, 1000 bp, Homo Sapiens
ttttttttttttttttgcaaacaattaaactttatttgaaccttaaaaatttgcagagtggaacattattgtaagatctaatggcaatagagtacaaattcagtacagagcaaataatcaagcaaaatgctatataaaatatgacttacaatcacctttgaaaaaaattagctctctaactgttcacagaaaaacaaataaaagctaagcaaacataatgagaccatagcaattagcatattttctaacaagccatgttgtttaaatttatattaatgatattattatgatcttgaagagtatgtgatatattgtcaagggtgtaaagaaaactctccctggtttgtatacaaatgatttcatcaaatgaatataaagcagtcatgaattgaaagtaatgattatttgtcctgtcactccagttttaagtcttttctttcctttcttatgtctcccacctatattcaagttttaaaagaacaaaggccggtggagatctgaacagaaataacaccttatttctgtattgtcactgttcacgagactatctggcttggaactgttggtcatcagttggcaaaggactccctctcctggattaactgtaaaaggaggcagaaatctagatgctttccatcatgggcgagtttgtgccatgggggaagggtttcaagaggttttgtctgcaatgaaaagctgctgccatctactggcctaggactaaaaacttcttttcaacccaaagcacaaacccaaatccacaaaggctacattgtcatgggaaacaacggcttttgcttttcagctgctcaagttttgaaaaccagtccactaaagtcgtctttggttgtctaacttttgccaagataatttcagtctatttcaatggcactatatgaggaaaaggtaagaactgcacaaatgtaacttctgaaaactttaacttcacaatgtctctctatataaacttgtttactcacaatacctaaaatcaaatttc

SEQ ID NO: 158272 - DNA, 1000 bp, Homo Sapiens
actgagggttgcagacacatatatttttgaggctgggtgacgagaaaatctagagacatgagggacataaatgggcctggcagcctcggctctttgcggctgctggcaggactgagctgtccgggttctccccacacttccagcacagctgtgctctgtgtcctgcctcggcgctctcgcaaatgaagctgcaggccaagaagccccttgtgagtctgtttttcacactgggcctggggaagggttggggcgaactctcggctctgcctggaagggtcgtggagcaggtctcaggtggccacggatatgtgcgtgaaggacagctgaccagttggcacggagcccttcacactgaccaccagccttgggtgacgtccctggcctcagagtgacctcaggggaacctttccccggcctgggagccccgtggggactggagacctatgcggttcttgactcacctgccctttgcatcccctctgtgggtggaggctctggaccatccacccagtggtgccagtggcacccttttcactccccagctgtgattaccaaaaatgcgtctgcacattgcccgttgtgcagagagcacagccactcactgagtccctggagaccagctgcccaccgcccacccagggccggggagcccaaggaagcgggcagggaggcccaccaggtggtcaagcccgctctggcctgcactgtgtcctgggcagctgctggccaagtcctgccaagttggccacccagatgtggggttgggtgcaggggttcacagcacacaccagacagacacggccagggcggtaggcgccgcggggccagccacgacacacacgtcacagcacaggaggggcgccgtgggccctggttgcacaaagctggccacagtgagctggaggatgcttcagggaacttggggtgggggccagggccggggctggcagctgatggactcaggggtccgcctccatgcacttctccagctccttgagtt

SEQ ID NO: 158273 - DNA, 1000 bp, Homo Sapiens
ttttttttttttggaaatgcctgttttacaactttattggatcatcttgacacaaaatcatgacagcagcgtgatatgtctctctctttatacgggaatgtcgatagcaaataaattcttatgtaacacatcatacaatttcaaatcctggaatcactgcatgggattctgtaatggattacatgctaaagtgacagttttcatcaaaaggagaagataaaatgtcattatctctgaagaagggtcagtcctgtgcccacgctggccgtggggagtgagcggagtctccttgccctgcctggtgggggctctgcctgtgaggtggctctcacaggtcctgcccaagggcactgggcacactccttcaacacagaacagcccaggtccgctgcttccaggccctgcctgggccttcctaagggtgctgggaaggatgtggggaaaccttggtgcgcatagtggcaagcaggggatgcggaccaccccaaacccaagccgagatgcacttctgctgaccaggaagacgggtggcagagaggcctcaacccaccccgtccacggttctgactgcaacctctctttggcgtccctggccccgccctgcccacagcctggctggcgcgtggcctgggatcccaagacccagtcaccagcccacgagcacactgacaatggacaacgcctggcaagaccgctttcccactgtgggttctgggagagaaaaccttggcgacagcggcccttccttcccctcccccggacgcaaccgtcaggacctttgggtcaaaagcaggcgaccccagaggaggccacgtcagccccgccctgtccaccaagtgcccctcacgtggtgcccatcaggccctggcccaggacaggagcccctgaagccacattcaaggactcggcccccagcgcggggcagggcacagacccaggtgggggagtcccttgctggtttgggggcgagaaggggacttcttgccaaagagaatgggaa

SEQ ID NO: 158274 - DNA, 1000 bp, Homo Sapiens
tttttttttttttgccacacacagcactgggtggacttttattttaaagtcaaaggcacagcctggctgggctgaggcagtgaccatggatgcccagcccagacccccaaggccccacccccagccaggagtagctgtgccaaagaggaaggggtgggtgagaagatggcctcctcttttaggagccacctatctccttccttagccccaacaggggagaagcagatgacataaagtgaggcagaaatgcttcagagggtcccccagggcctctccttcagtacccccaacacgggtctttggtggacgtaattgcacagacagtccataaagtgacagttgaggggtgcccctcccaggaacggggcctcaggggagaacagggtagggggtcccagtttaggagttagcactcctaactcagtgcttagaagtgggggaggggctctttcctgttggagcagtccccctggaggggccttctgcccagaagaggcagtgtcctgggagagggccccccaaaccccactccccagcaggcccccccttccctgcaactctatctggtaagacataaaaaattctctgcttataaaaatacttctgctctgtctgggagtggggtggggtaggagaggaaaggacagtcccttggggatcaggtcagccgcaggcagaggcctccgggagtgagccgggctcccaggtcacagcccctatgagggaagggggtcacagtggtggggattaggaggggggcagggggccgttggctcggcggggggcccctttggaggcgacgggggctcggcccgggttggctggtgcaggggagccccggcgggaggcggtggcgctccgcagcttctgcttccgccgcttggccaggggtgcattctccacgctcttcaggaagaagccctcccgcttgccccggttgaatgccatgaaggtggcgttgagacccgagcgcactgcgggcccagaggactcgagcacg

SEQ ID NO: 158275 - DNA, 894 bp, Homo Sapiens
ttttttttttttccagatttccatagaaaggaggaaaatatttattccaaaagatggcagaaagaagaaattcatcctgaaagtatagtttggtgcgattctgttgagatggctcttccctctgaacgtgctctcctactgaccaccccactggagtcttgtttgtcttgcagcagtttctaaacacttcactgattcccacgtgagaaggcaggagccatcttcaaatccacagattccaaggagagagtaacgtatctctcagaagaacagcatcttctatctcagaagagtacataatcgttttgtggagtcggcacagttcaggttatggaggcacgtaattcaccaaagtgcaaaaaaggcaaaggaaaacacgctgcattgtagaataaggcattcaaatgtgctgttaacgtttaaggcagctaatggccaaaacaggcaagtcaagaaaagtggtctggtttggaggtgattttgcatctagaaggcattctcttctcgtgacctcaaagactgagcactgtagagcatgtcttcttcctcaaggccaatgatacttcagataccagatggtttcatttttcaattgcggtccaaagagagggttgagttgggccagaattgcaatcagccaaaagagatagcagcaaactgaacaggtcaccaacatggtaatgataactccccggttaggacccttagggatgaaccaaggcaccaagaagccgacgaagccccagaacacgctcatcacaatgagaggcacagtgaggccgtgatacgccatggtcgccgcctgagcgccaacccctaccccgtcgcctcactcggatcccaccaggaagtgtcaatagctgaccgcgtgaccagcgtgtgcaagccccgcct

SEQ ID NO: 158276 - DNA, 1000 bp, Homo Sapiens
tttttttttttttttttcattaaaaaatagtgctctttattataaattactgaaatgtttcttttctgaatataaatataaatatgtgcaaagtttgacttggattgggattttgttgagttcttcaagcatctcctaatagcctcaagggcctgagtaggggggaggagagaggactggaggtggaatctttataaaagacagagtgattgaggcagattgtaaacattattaaaaaacaagaaacaaacaaaaaaatagagaaaaaaaccaccccaacacacaactgccctgtccagcccaatacctgacacagaatactttgtgtttgtttagttgcccccccccacaaaaacaaaaacaaaaacaaaaacaaaaaactgttccaggtaattccatcgctgctacattcctgtaaattgtcactgatcagtgctatggcagagcgggagcacccggggtggcagcagtccagcctctccaatgacctccagcctcccccacccaggcaggagggagggctgtgcagggctcggggcagtgggacctggtggctctgctctgaccacgaggcgcctgactggccaatacttactgggctgacattcccagtgctcagctgggaggcatgggtttccgccccccctccccacttccctggctgtgggctggcttggtgccctccagtgagtccctcagcctctccacccatccaggctgagtatgtggctttcctatgctgggtccctctccatgggacagggagcatttaaggcgaatctcttagccagacatagtcaggaggcacagagtagaatcccctgtcttctctaccaggagcctgaggtgaaagatgtcccgtctcctccatcctcccgctccatccacccaggtacaggaaggtatagtatgagtaggaaaaggagaccagctgaccagcccatccatcccctccaaatgttgcttcccccttaaaacggaggaagggccctgggctctc

SEQ ID NO: 158277 - DNA, 1000 bp, Homo Sapiens
tttttttttttttttttttttgcagtaacattcccctttaatagcctggtgggacctccagaggtggaggggtgggttgcctgggcccagctacccaggcccgttgcccacccactccacagcccagagtgggggctgaacaagcacccagcaggggggctagacaagccaattcatttcccatcgctgagtgggtcgggggaggcagcgccgaccttaatcacatggtgttaaaaaaaaaaaaataactaggggcacgtggcaggaaggggaggcaaggccaaggcaggggattcccccaccggccgccccccaaacccctacccatggcccccaataaatatttgcaggggatgccagggcttgtggccgtggcgggggtgggtatgcgccaaccctatttcaggcagcgctcaaagtaggtggagccgatgtagccaccccgcatggagcgctgcacgttctgctcaaacagccgccggttgttctgcaggacctctgcggcctccttgttcagtgggtcctcggggttgggctccaagaagagatactgcaggccataaattatggagtttatcgtaaggactggcttccagtcctctctgaggatgttgaggcagacgttgccctcgaggtcaatgttggggtgatagaccattgtctcacacttcaccttggggggatcatgcgggtaaccctggcccaccttaaaactgaacacaaacttcccactcttgtagaagccctcatcaggacagatgaccagcttgaagttgaggaggtcgtctggatctgagaagctgatatcacacgtcttgggcaggttcagctcgtttatgtccttctggatccgcagctgcgccgccgacgccttcttgctgctgcccttggtgccgcccgccgactcctcctccttcttctgctgcttcagcgagaacagcttgatcatcctgccgccgccgccgccgctgccgccgccgcggggcccgggaccccggcc

SEQ ID NO: 158278 - DNA, 1000 bp, Homo Sapiens
tttttttttttttttttcagaaacaggaaacgtttatttaaatagtgtagtcttaatttctttaatataaaacccccccaaatctgatgaaaacaaagttttatataccatataaacaagatttgtcagatttgaaagtgaaagttaaagtaatttacagttagcttttaaccctctcgggacatttagatacatcctgataatccatcttgtattagtgtgtgtcaattttacaatacactggggaaaactcagctattgtatttaacggtacagtttcatttatcaagtgtttcccattaattccattattagtgacagctaacaagtgaccccatcaaatgaagtgaatgacattagactgtggcagagtaaaccacatctggattgctttctataattcaccagtttgcaggaagtaaacattctttgatttgttcataatatactgaagttacctataacactggtgcagtaacacagctagttcctctgtattgttatggtagaacggattttgtaatataaagttaacaggaaaaaatgctcacacattatgtggtgaaacttatctcacaaaagagcattaaataaaaggatagagggaaaataaaccatgcagaagagacggcttccccatctccacctgtttcccatgggctcactcattgccatacatcacttgccacactatcaagtgactcctttctgctttggtgacagaaggttcaagtggaagatcctctccaagaagttctgattctccaccttcatcacccattcggaagtcgatgtagccctctcctccactgatgacaagcatagacttcaagggcgtctgactaccaggctcctgtgcagatggccctgctttgtcacccgtcagatccgtgccactactgctactttgtgggctgatgacttgacctgggactgccacaaagaatttcacagcatcccggtgcccatggaagcaaagctgtgcatgtgccattgaaca

SEQ ID NO: 158279 - DNA, 1000 bp, Homo Sapiens
ttttttttttttttttttacagtttcaatcttatatttattctcttgtggaatgctaggtttaatgttacagtatggttgtcaaagctaatgaaatgtgacaaatgtctaaatgctgcagaacagtataattttaattaaacaaaacacctgttattgtacagctgaggtctgatggttgttaaactgatgcctatgtgtatggccagccacaaaccttggggatgtttattacctgtacatatatatacaaatatatcccatacatatgtatgcacacaggcatgtattaatttatgcgtgaaacttataaaattatatatacaaacacatacatgcacatctatctacatatacctaccctcaccattgagtaatcagcctcatgcccaattattattgctgcccagtataactacatgattttagtgccaataccaggcacctttttgggtgcaggataggtacatctatgcatatagatatgcatattcatgtatgtttgtgtatataaagaaattctctctcccttttatgcttcagccatgcattactacaataaacagtctttccactgtaggtgttggaattctaaacagtgtaaaatctatttctggaaaactgtgtatgttcatagttacaaaaaatatattatatatatgattgaaacctattgagtacatatgttatttgaatctggctatatcgtagccattagataaattaaaaaaaaccaccctctaaataggatgttatggtagccttaaatataccattacctgtatttagaatagttgatattatatcttaaaagttgaaaaaatgatgttaaagatttgaaaaacactatgcatctgcattaaatatataaatgtttccaccaagggcccgattaaattcattgtctgacattttcatgttctaagactgaccaatatcatagtcattattcttatattcttaaaattatggctcattaaggcttttatagaaaaaaagcc

SEQ ID NO: 158280 - DNA, 1000 bp, Homo Sapiens
tttttttactggtaactgctgccaccaccatgaaagagtggccaccacatctttattgcatactcaggtgaataacttattatacaatgaacactcctccattaggagaccatgcccacttacagaatgcagccgtaaatgcggtaaatctatttacagaggttggggtgcaagatgagagaagtatcagccccaggaatttgaagtgagaatgatctacaaattctcctgacaaggagcaaccgggcttgtgctagtgaggtctgaaagaattcctggcagagcgtagggggagattagatctcggaattgacagcaagtttggggacagtgcaagaagagaggggtgacctgtgaattggtgctggggagctgctgaggcccaatgtgaggcagcactagagagatgagtaaatttagggtgatctttagcctctcctacccaggcaagaagggttggggagcgggggtgccagcaagttggcttccagtgtagattcaggccagtgggctgagagaggcttttgctatttttgctcagatatgcaggtctgctctgggccacagagcctcacaaaacccactgtgagttagaggagcaggcccctagagctgtgtgagccagcgtgagctcagatgaccagacctttagtccatggaaaataacagcaagattaagggcctaggctgggagctgtggctcacgcctgtcatcccagcactttgggagatggagatgggaggattgcttgagcacaggtggtcgaggctgcactgggctgtgatcgcaccactgcactcaagcctgggtgacagagcaagatcctgtttcaaaaaacaaacaaaaagagtaagggtctaaacttgagttgcctgagactcccacttaaaagaagtatccaaaggatgagacaaaaaaaaaaaaatactacagcgcctctaagaactggagtcttactagcccacatcagccccagcatggaagaattgtggttgaggc

SEQ ID NO: 158281 - DNA, 1000 bp, Homo Sapiens
tttttttttttttttttttttttttttttaaaactatgtcaaacattttatttggtgtttcatgctatgttgatttaaacaaattaaacaagtttgttgaacagctttcttttctaatataatgactatgtgtacatggacaactgaaaacagggaaaacccccaaattaatgttttcacaaattacaagccattactaaagaccatatgcctggattaaaaaaaatagtccaatagatgaagtctctcattcaacctagcagttcaaccaatttctcttttaataaaagctgcacattacagtggtataaatttatcttttaaacactccacataaaaacatgtgcaccctctccttctacatttaatcattagtagtctctaaaatggtaaaataaaactgaatttatattagcaaatgaaagtgcaagtttgtacagctaggctcagcagcaaaagtgaagaataagaatgaaaggtgaaaagctgacagatgccacgcagagcaaggacttccatgaaggtccgtgtcctgtgtgccaaacacagtcaacattccatcattttctcattgctcttaaacgagcaaaaccaaattctttttctatttaaagaaatattaaatctttattttccccaacataatttgtgatcaggtaaggcaaagataagtccaccatcactggggacagcagcaacatacagacttcagaaatagccctgaatcatcagtaacattctatcgtggtaacatcagaaggaatgcagctaacaaattaaatttgtaatgttgtcacattattctaatttatttgattagtttatctggaaaaactttataaatacattatgtaagagggcagtaaattattttcttgctttgaaaaaataatgttttttcacattttaaaacattttagtctgcttttgcaaaaggagttgcaagaaaaatgtgacagctgggtttgcagaatgtccatgtacaagctgtatttataag

SEQ ID NO: 158282 - DNA, 1000 bp, Homo Sapiens
aggaacataaacttttattgtcatccagcacctgtgatagtttcatgtctctctaaaggagacaggaaattggagcattgtgggcccttttaaaagaaaagaggagtaggtaggcacacccaggtgcttctaaaacaaccaagcccaaacctgacatgctcctccccacagtcaccttcattgtcccctttaaaagtctggaacagtatgtagcaaaacaaataaattacttttcatttcaaaaagtaagttcaaaggttgaagctgcctaggccaggcttctggacaggtgcctccaaagaagtgagctttccttttcaacttccttagctctagccagtagaccagaaacccctgctttccacatcaggattccagatggtgtttagttagacttgggatcccgttgcttgggcatctctcctccatcttccaaatccatttctgcagcaactgacatacacaggacctggaggtaccttgtggcagaccccacgatccttcggaggtaaagcggtcgcttatgttctggcactctgatgatgaggaagtaaaagggcaggcctgagagggcaatggcaatgccgatgagggagttgatagtatcactgtaaagtggaacagccaccaggaagatggtgcagaggcagaagacaatcgggaagaaaacgctgagcttgaggggacgaggtcgatcaggctccttccagcgcagataaagctgacccacaatagaaagccccacaaagaaccagtagctgaagctgtagtagttaatgagctggaagatgtcttccacgcacaagtagatcaatgccatgataccattgaagagcagagaaggcactggtgtgaaccgctcaacatggatcatgcagatggcatcagggagatggccttctcttgagcccacaaagaaaagcctagaagcagccacaatggaggcattgaggccaccaaaacaggataatgcaactgacagtggaattatccagttaaa

SEQ ID NO: 158283 - DNA, 1000 bp, Homo Sapiens
ttttttttttttttttttgacatcagaactttttttattattgttttatatttgaccaaaatattctggtttagatacagatatttacagaaagtagggaggaaggggaccaagccagagagggacaggtatatgtacagggctgagctgcagagggctacaacttccatataaggtaggtttttttgtggctgttttccattgcatatgaaaatgtccatttctggtgtgtgcagacatggtggccattgcccacccaggtaccagcagcagaagactatctgacttggaaagaatgggggtttacaggagtccaggaggtcctttccgctctcctaagagccagtatgttcgcatctttccttttcccttcatttccacatccccccgaagctctagctggaagcatcctagctcatctagggcatccttggtggtagaggagacatggatcttcagcgcttgaccattagactccattcgagaagcagtgttcactgtgtctccaaaaagacaataacggggcatcttcaggccaacaaccccagcacagactggcccagtatggacccctatgcgtagcctcagctggtcatggggtcggtggcggatgcgaaaggaagaaactgcatctagtaatgctagggccatacgagcaatttctggtgcatggcgttgaccatttcggcctgggaggccagataccaccatgtaagcatccccaatcgtctccaccttgtagacatcaaagttgtcaattatggcatcaaagcaggtatacaggtcattaagaagtgtcactacctgcatgggggtgctctctgctgacaatgctgtgaagccaacaatgtcactgaagtagatggtaacactgtcaaaggcctcagcctgtacagtctctccccgttttaactgctctgccactgaatggggtaggatttggtagagcagagcttcagccttgcgtttttcctccagataggcctgtgtgcgttcctcc

SEQ ID NO: 158284 - DNA, 1000 bp, Homo Sapiens
gcggccgcgtgaaaacaggtcatttatatatagttcttgaaagaaaagaggaaccaaaaactgtgactggaattatgtgatatacgttcctttttatgttctgaggtagtcatcaaaaatgatggcagaatactgatgtctatggagcagaagtacaactgacagtaagtcagaagttacttgccaatcccattctttcactgtagtaagcttgacagaagaattgtggaaatcttgttgattcatcacacattttatatattagattagagctatgccccccgcccccacccacagagttaattttactgtgtcagtgaactatagattcttatccgttcaaggtaagtctaaaatctgttttggcctcaaacacctgtgagttttttataaaacacgctcagtaaatttacatttgacaatctatgctatagtaatgtctcctgtggcctttattaaagccttcaatataataattgctgttaatggaaatatttcctcagtaaaaactgaacttctaggaccacagccaccctgtacagtactgagtgggagtctgtagagtggttaatgcatatccttaggtcaagctcaagtctcctgttctaaaggtgagcctggaacaaacagcagaaggtaagcatgctcccatgatcctgccgtctctagggcaagcttgctccaatggggagtgttaagttccatagcctctggcctttaacctagccagactgtagtggtcttatataaaccagacctgcaaattgtactgggattaaggaccaaggccactggtgatgacagggtgccagctctgctcttcttaatgtctgtgtagcataaggtatgaaatcggcatgctggttagcagtagtgttcacctggatctaaaagggtaattgaggagaggctgctattctcggtcgggggaggcaaggcaagacgcagggagactgccatttgcattttatactctgaacagtgtggtgcctctactggg

SEQ ID NO: 158285 - DNA, 1000 bp, Homo Sapiens
ttttttttttttttttttaaatgtcatcatcatagtcttttaatattttacataaaaaactgtatacacagcttatagaacttttatgtaaacatcataagctcaccattttgtcatttgtcagtttatttaaaaaataaaaaacaagacaacaatttagtagaagtaccactgggagggaggggaggggaaaaaaggatatacaggggcaggtgtattctctgtacagaggtgcagagaaaatttcacatagctttagagaatgccttgtggaaaaaaaaaaaataggccccaatacttgttactgccctttatcaaaactgtgtgcatgacctgcacaaataaaatcacaaaacagtgttgccacattcttcaaggaaacaaagcaaaatttagtgggtttcttttccctctccttgttaaaagtcattttttaaaaacatcagaagtagatgaggttacagcgtacaagtgtggtcagaatgctactgtcgtatgcaaatgacgagtgcattaagtgtcaaacaatgaaacaattgtgcaaagaataaaaaaacaaattttagcctttaaataaatcaaataacatcagtttcttggactgaacaattttcacttctaggacaggcacaaagttcgcttatggcaaaaacaaccccacagcgcatcctccctcctccctccggtagctggtggagggttcgcagcgggctggcccgcaggagaggctgtgctgaagctgtgtcctccccaagtcagttgcaaatgtcttccccaggggttggaaagatggtcaagtcctgttcatgcttgggcgggagtctggcccagcctgggccagagcgctcacccatcaccacccttaaataacaccatcttagctccgaaaataaaattatatctatatttatataacatccccccatcctccccagcagccctcccctcccgcagtacccggggtctatgttacagacaagggatatcaagctcccgctgg

SEQ ID NO: 158286 - DNA, 1000 bp, Homo Sapiens
ttttttttttttttttttttttttttttaagagatactgttttatttttttaaaaagttatcctcaaagtttcaggcgtgactgttcacctacacataagcaagccaaaaaacagtgtgtggtaaaatcagtggtggaagagccgaaggttcgtatgagcgaggatgattcccagttcgtcgcaggcctcaatcacaactttgtcagcagcagaaccggagggagccgcaatgtacgccacaccactccttttagctctgtctacgttatctcggaaagggaagaaggcatcagagctgatagaaacttcagtcagtttctcaacccattccttcttctctgcctcagtgagtaactcagggacttcctcaaacagtgccttccactttatcaaatcttcatcctcgccaatggttccagtcacatattgatcgatggcattggagatttctgctctcttcactcctgttttaaacttcatcgaaagcacttgtggatggtgtctaagccaccaatagtttgccttatctcctgcaaggcgagtgcagtgtatacgagactgctgtcctgctccaatgccgataacctgcccgttcttggcgtagcacacagagttagactgagtgtacttgacagcaatggtggctacgatgaggtctcggagggcagactctggcaaatctttatttttggtaacaacattgctaaataatgacttgtcgacgacaccattatttctcttctggcttaaatgaagaccaaagagagttcgaacttcattttcatctggtttgtaagattggtccatctgaaggacacaatagtttccatttttctttttggaaagtattgtcaaggcttcttcttcatatcctggggcaattataccatcagatacttctctggaaataatttttgcagttggtacatcacaaacatcggacaatgcaacaaaatcaccaaatgaagacatcctatcagcccctcttgctcttgcata

SEQ ID NO: 158287 - DNA, 498 bp, Homo Sapiens
ttttttttttccaacaaaagcagcttgattttattgcagggaagctaggaaggaataggacaactgagggtctccgcaggaacaccatcacccggcatgactgccaagtcccaggtctgtctggaagccagcgggaggatcagcatcctgccccctttggtccatcctgtgggctgtggggaccaggcccctgctactcaaggccaaggtaggaaacagtctttcctgttttcttcagggttgcaagcagagtgtccatgctgtgctcagattcaatgcagaccttcttgttgggcaggtcaatgtcatacttaactcctccaagcttattgaggacccgagagacagcttcagcacagcctccacaggtcatgtccacagagaactcgtgcttcggcatgactgaggcagcggcggtgtggcggcggtgtggcggcggtgtcagcagcgcctctctggattcggagggcgggttcggctgcgcttccgagagtgcgc

SEQ ID NO: 158288 - DNA, 1000 bp, Homo Sapiens
gacccagacaaataccaagtttatttcacaaacactaggaagatgggttgagggtggaggtgggggacacaggtgcgcagctgcacagagtcagcagcagcagcctgctccccgcactgaggactcggcctggactgcagtgcctccaaatcaacacgcagcaagaggggagtgcagggagggccctgaacaccaagcctctgaaaggctaagggacacagctccagctgtcccaggaaaaccagcaataaataaaagtgaggcacggccccacccacacatatcatctagtcacccatcttcactctggaggtctgaagaattgcgacgatgaccccaaagaggccaatggcgctgccaaagatctccacgatgagaatctttacaaagaggctggggttctgagcatcggccagggcagccccactgcccacgatgcccacgcagactccacagaagaggttagacaggcctacggtgaggccagccccaaacatggagtagcctgcatggtagttccgatggccgatggccttggggtctgtggcactgaaaggctcagccatgttgctaatgacaattgccatgatgatgccgtagatggccacagcctcacagaagatgatgctgaccaggttcttggtcttgatcctgggggccttcactcctccaccaatgatggaggagccggtaatatagatgccccaggctgccccaaccacagacagggagatagctaggccaatgcccaggttggaccacatgaagggcgaagtctccgtcaggaaccatgccacatcaaagcggaagcccaaatcaaaaatggtgtagcagactcccacggccagcgcgcaggcccagaaggccacgaagaccccggagtagagcagtgctagccccgtcatggcggcgacggcggcgggggtcggaacggcggggccggagctacaaacgcgtcccagcgtccaccgtccgtcccgcagtctgtccgcccgccccg

SEQ ID NO: 158289 - DNA, 987 bp, Homo Sapiens
taagagataacacatcaagttttatgatttatttaacttgtggaacaaaaataaaccagattaaccacaaccatgccttactttatcaaatgtataagaagtaaatatgaatcttatatgacaaaatgtttcattcattataacaaatttccaataatcctgtcaattatatttctaaattttcccccaaattctaagcagagtatgtaaattggaagttaacttatgcacgcttaactatcttaacaagctttgagtgcaagagattgaagagttcaaatctgaccaagatgttgatgttggataagagaattctctgctccccacctctaagttgccagccctcctagagctacctgtggagcaacctgctcagatacatcaaacatggagacagcactcaaagtagaattataaagaagatcatgtccatgttaacattattataaccctacattttgtgcataaagtgtaagtgtataagcatatcaatattaaaaagcaagcaagcagaatttggaattcatccaatccaaatgcggcatcttcaaacctccatgatgctgcttacatgtctcgatcccacttaactatcttgggctgtgacaaagtcacatggttcacacggcaggcatactcatctttttcagtgggggtgaattcagtgtagtacaagagatagaaagaccagtccttgctgaaagacaagtctgaatgctccactttttcaattctctctccattcttcagtaagtcaacttcaatgtcggatggatgaaacccagacacatagcaattcaggaaatttgactttccattctctgctggatgacgtgagtaaacctgaatctttggagtacgctggatagcctccaggccagaaagagagagtagcgcgagcacagctaaggccacggagcgagacatctcggcccgaatgctgtcagcttcaggaatgcccgccagcgcgacgcctccacttatatt

SEQ ID NO: 158290 - DNA, 1000 bp, Homo Sapiens
aagatttatttttttttccatttccagttttttaaagtagacacagatttgcttagaataaagctgattttaaaagcacacaaaagttgaacacaaaggagaggattaaattcaccaatgcagagtgataaagaggaaaagatactgagtaggtgccttcagcagaaaactgatcatccagggtgatcacctaataatcggagacttaattccttataatgcaaaagcaagaagagtttagtgtacgaactgtacagctgagtttgtagctctatcttggtttctgttgattatgaacaattagcatagttatatataatctttctttagtagacaacctgcatccatttaaattaaataatactttctacaatagtgtgatatataaggccacaatatttattttggacaaaccccttaaagtagcgattttattatcaatgttattcattcttttgaaatataaagtacttcagctgaattaaggttgcagataatttttaaaatacaacacacatcatgactagtatattaaaattatttatattcagatatttatatctaatatcaaatgaaaatttactaccaaattttcacagtagacattaatcagtctgacatgcttattgatcccataggtgtaattatagatcaacatgattttagtgtctattcttttattttactaaattaggaacgcagcatttacagaacaaataaacacaagtgacgtggccaccccaggatctaacagctcttcagtgagctatgttgcaagctcagaagtaatccactaacgaaccaagtcagactccagttcttcatcaaaaggtgctggtggaggttgtcagacgccttccaatatagatccccaatccgatggccagcaaatgagagagcagcagagatggaaggaaaactttcagaaattctgcagagaatatgccccctttcttcatgacgctcgtgttcctcatgctgagggtggccgtgcgcttcg

SEQ ID NO: 158291 - DNA, 1000 bp, Homo Sapiens
tttttttttttttttttcaataaatatctgtctttgcctttatccacagtgacctgacacaatagccatagaaaaagtactcacaccaagccccagctggggactgggaatgctagcatatggtatctcaagttggctctcagaactaaacagggataagggcctagaatggaagagggaaccagccagaccctcagtccttcctgtcctggactgggagccacagatgtccctgtgatctgtcactgccctgatctgggtcttcagccattaaagctcagtgtcatcttcagtcaccaacgggggtcttggtgtccttccaaacccctttggccaggacagctgactgttttcctcactccacggtgatgggaacatcttccacatcgcgggggactgcactctgaagctcacgcctgatttcgggcgatagctgtggatggggctgcagccggagcagttctaagagggcctctttctggtctgtggccaagtcggccttgtagcgctggaccaaagtcaggaggcactggtgccacagcacaggcagttcacgcttctctgtccggaaccccaggaagtggaagactagggcatccagcacccggtaaggcagtgcatacttcttatccagcagcagtcgcaggaagatgctgttggcaccgctgtattccatctcagcaattttcagcatggccgcactggagtgcaacacagggatggagcacttggtgatgatgctacccacaatgatggcttcccggagggtacaagtgccagactcgcacagtggaatcaggatccctttgaaccaggctccaggtttgaaaagggccttcttgagagccatgtagagatggaagttgagtcgtttgtattcagcaacgtcatctcgtactcgagggagcaggacaaggttgtagaagcgctgggccatgcgttccttcaggttagaggcaaaaatcctggtggcctggtacatggcagctgcagtccaggc

SEQ ID NO: 158292 - DNA, 1000 bp, Homo Sapiens
gacgtgttacctgctatttttattccccatttgccatcttctgattgggggttgatgttttacagatttttttttcaaaggctttatttcagtttctgaggttaggatgcccctgtgcccctcgctccacacctgggcaggtctaaacttccttccaggatggcctccacacacagcctcccacctggggtcacctggcttcctgggggacccgcaagggaggggcagggagcagcagtccgggtgcggggatcgggggacctcggcgggggcatccacaggggctgcaagacctctggtcagcatggcgtgggtggggagagcgtttctccctggggtcctgagccagtgactcctgttaggacctttgtcccacctccgcctggtggaccggcagggacctggtctagccagtcctgcagcctccattcccccacctgcccctccccgctctgtggtgtggctgcccaggagagaaggggcccagggaagggaggtctccggcaggggtggggagtgacaggccagggcagcagggctgagccggagctgctcacagctgccaggcactggtcatcatggccacgaactcctcatccgtgttcatggaggcactcacgccgctgtagtagtcctggaattccgccagtgtgacctgcccgtccttctcagaggagtcgaagttgtccaggaagcggcgcagcacctcgtcctcggtccactccccactgcgcaccttggggtgggcacggccactgtacaccccgcggaggtcgtccaccgtcacgacgccgtccccactgcggtccagcttggcaaatgcagctgcgatgacagcctcccgggcctgggacatggggggccgcagcgcccgaaggaactcctccagatccagcgtcccgctgccattgcggtcccacttcctgcacacaccctctgcctccgcctggtccagcaccagcccgagtttggccagaccctgccggaactcatcagcgtc

SEQ ID NO: 158293 - DNA, 1000 bp, Homo Sapiens
acaataactcactagcagttttattgcttaaatattcaaactacaatattttttctgcagttatttgaaatgtctttgtctttaaatgtttataagcagtcagtaaatactttaccaacttaacttttaagtacttaggtgacttagaatataagccaaatatatctatatacatataaaattaaggagagaaatagaaaaatacctggcaatcctgctctcttattcagtgtgatatttttagtcataagttgttatgaaaacacactacaaaagcagtttgatacaggtctcctttctatatccagattttatagtctgcagtaatagctagctattattgattggttttaagaaaatatccacttgggtcaaaatatgtgtacctgaaccatgttaaagagctgtgttcatttaagtttctcttttcattttgcttatataatcaatacagaatggttagagaacgaatgttgcttttggtctaagtatcagattcttttattgagctatggaatttgcatatctgtacatttagtaggcatggttagaactcttaaggttttaatccacattatctcctctttcctgagtttctaagagccatgattatgaagcctcagcagtgtttttaacaaagtacactgtaaattgtaaccagaaggcagcggctttaaaggagtgcttatttgcctaaatggctgttgacatacttaatagttttgtatctgattctagtatgctaaagcatttcagtattatgagaatacaatttacacactggatccccttgtactttttctttcagttgtcaaaatgttaccattattgctgggattctaagaaatctctacaaatgcctctgatgacatcagaaacaattggttctaatcctgtgaactctcttgtgaagaaagcatgagactccttcggtttagaagccatatctttcaggtcatccagaggtgcccaagccacaccaacagagaagatagtgatt

SEQ ID NO: 158294 - DNA, 1000 bp, Homo Sapiens
tttttttttttttttttacctttgtaatgtaagacatttattttggctaaagttctggtgttttaacactgatttgtgatacaacggacattaaacttccttttaaaaagaaaaaaacaatttggtagctctcccttttctgtccagaaaaattcactctttcataatcaaattaccctaaaatttggtggcgttaagaggcaacaaaagttaagcttccaacgaatctgttctctcaaccggaaatgtcttctatttccaatcaggataaaaccttgacttacttgcaaggactatcacggttagcccttcagtgattcctgacaccagttctgtgaaaaagaaaatttcctgcgagaaaagctcatgtcttcatattgaagatcagtacttttttttttttttttcctttaaaacagtagcatcttaacttgtggcacaaaaggcaccaacattccctttccaaaccatccatcaccatgggtggaaggcagcgccacctgctggccatcatattatggctcacatacccataatttccttgcggtgctgaattccaagtggggattattagagacccctcagagccaaaaggggaccttagaggtcttctagatgagtcccctcatttgtaggtggtggtttctggataactcagagtggcagggacacagacgagcctgtggaaaggtatactgctttaagattgagaagaaaaccatttggcgctctaattttgcctggatggtgctctgtcagtcaaagaaagggaacaggtctggggagggggtaagggcaccctgagttcctgttccatcacttcccaggcagtagaaggctgtccaggaacagctcccatccgcagctgggcatgtgttggctcttacacaagagactttaattttacttgaagaactaagagctaaatcttgttaagtaaatacggggtttcaggggtgaaggactatcaagaaatcccaagttatcagcataaaagtag

SEQ ID NO: 158295 - DNA, 1000 bp, Homo Sapiens
ttttttttttttttttttgagacagggtcttgccctgtcacccaggctcgagtgcactggagtgatcacagctcactggcctcaagtgatcctcctgccttggccccttaagtgccagggttacaggcatgagctaccatgcctggcagaaattcaagatttggataaacttacttctttgccaagcctgttcttcaagttattcagaactgggtgtataccttgtcctcatatgtatcttgtccctgctgtcttttaggttagcaaggtgtatgaatacttttaagttttgtttgttcttttcctcgtggtatcagtgaaatactgatctattctctggctagggtcaatttacaaaattgccatggaactgagcaaaaggcccacgtgggataaaaatcactcaccatcgacgccaccagtatttttcaagttatggcttttgaagtataacaaatttcagtaaacaaaatcaaaagaaaaaattcctctgcgtacaacaaagaagcacctgttatattttgaatgcattcttcatgttgccagctttctaaacttgttttttttttgcctcaacagacagaagtgaaaattatatgccactcttaagtacatccaggttctcctctacatattcccaatatggaatgctggctagcaatcatggcactctctcagaaaccagccactggaagttaaaacttctggatttcaaaagctagtacaggctgctaaatttaacaaaggaacaaaccttcataaatggtacaaactacctgcccaacacactcttctattttccagaccctttaatattgagtagtctagtcttggattgactatggtgggttaggtctaatctaagtatcttaatagctatctagggataatgaataaaattaaatacaactggtacctcaagtatcataagagaatataatgtgttacctatgaaacttattatgtacgaattagttcttaaagacagaaatgatggaaa

SEQ ID NO: 158296 - DNA, 1000 bp, Homo Sapiens
caccatggtacaagcctgggttctgtgccctgaacctgaattctggaaagggagagactacagcatttcacagagaacagccagacccaagagctttcagtgtaggatgggcctgaagtgacagttcaatagccaaacctggggaagccccatcactgactgaactaggtcatttgaccatggagggggggcagtgtaaaggcaacgtgtaggtacagctcttttattattaaatgtgtaaggtgatcagctgattaacaggctccgagactgtccatttcagtctcccatccagtgcttcttcctcagtaaccttcaggccgttatttctgcccactctctgacacacaggataaaccaagactcccagagttatgttaccaaaggcaaaaaggcaactgggtggccttggctctgctttattgacctcagagcaccctatgagtgcagttaaaaaaaaaaaaaaaaaaccacatacaccatgggaactggaactggatcccggtcagtggcacctgaccccagaagaattcgtggatttgtacaaaatgcagaggaagaaatgaggcaatgtggtgctgagtcgaggggtagccgattggcagagtagtagtcagcaacagtgcagtcaggtcatgcctctttctcataagtgcgagtgcaaactgcagtgccgtgggtgagtgtcaggatgagttttccatcaattagctcccgcacaagtgtggtctcttgcccgtcccatttctgcaggtgaacaagtttccctccatccagtgtcacaatggacttgaccttcctgtcatctgctgttgtctcatcgaactccacccccaacttaaagctgatctctgtgttcttgaaggtgctgtgtgtttttagggtgagaatgtccccattcttttcgatgattgtggtaggcttggtcatgctggccacctgcctggtagcaaaacccacaccgagtgacttcatgtagtcatcgaaattcttgctgtcc

SEQ ID NO: 158297 - DNA, 1000 bp, Homo Sapiens
ttttagagtgatcttctaaaggaatatttatttttatttaaaaatatgatacatcaaagtaaagcagtcagattttaaacaaggagacgtataaaatattccatagaattgggtaggagggtaatttgcttaagttcactgtcactctggatgccaggaataaaaaccatcatcattttcttcctctgtgagcatcaagtacgaagatgagaaattttagttataaattagtgaagtgttaggatttaaattttacttagaaattaaaacttctccagtgaaataccttttatccattttgttctgcatcttgtgaatgcctgaattcagggatgttattatattttccgagtttgcttcttcaggtcagttccaatgtggtttagaaggaatttattttctcatatcctccccatagatttctcaatagtataattttctagggggtatctggttcattttgggaattctggaaaattttgcttactgttttttacaaaatattcacaatctaaaatttctgacaaaattaaaaataccctacagaaaccagcatgttgtacagcaatgatttattactatataataaacaaccacctttaggctggatatgaaaataaaaaccaacacaaatatggcagatccccattttctaaagaaatatatctttattgaccttttccattttcttacaaagcagttaaaaactcattcttacccttgcatgctattcaatggttatgatggctgcctccttatgagactgttagtggagctctagtaagtttccttaagcaccacagaagatcatcattgcttggtcccacttttataggaaagaatccaagtttcaccagatagtgtatacttagctctcttgaagaagaccagtttagtggattaatgtctaatttacatatagtaataaagacaaactttgaatctttacatattaaatgcccactttataccatggtgtaattgtttgttatgggtgagt

SEQ ID NO: 158298 - DNA, 1000 bp, Homo Sapiens
ttttttttttcacattttttttggatttatttaaagaacacacaaaaaagtgcatctaaatgattttttttttttaaaaacaatgtctttaattcctcatatgctgacttggcaatccatatgcagcctaaaaggtggttgaaagatgtctgtggacttctacacaaattgtttaagattattgaatttgatacaagaatacgtgaagtgtcttcttgagtggtaatgggcaccctgtagttatttgctcagaaccactcacacacccttcccctccccacacacacttttgccagttccccctggtgaaccataatacacacgtgggagacagctggcatcatctgagtcttggaatagctttcttgtttgttatctgcaaaaagctaggtggcctttttagtatcaaatttcaatcttggcctcactggaaccatgctctacagagctttcccaacagtttagcaagtaagcaaaatcagcttttgctcttcatatttcgtaggtgagactggggcttttaaaagaaatatttcataaaaaagacaaaagcataaatgagaaattagagggattttagttatcattaaaggaaaaaactcacaaattgatcccatttgttccatggggaagaaaagtattataaaaggaaataacttgatttttaggtttgaagggggtcccaatctaataataaaagtcttttgataaaaccatcataaaaataaaaactaatttaaaatataactgccagtgttttttaggatttaaaaaggtgagatgttccaggtttaagcaaatggttccttgggttgccaaatgcattcccatgagtgtttcttaggctgagggaatagagagccatgctcaatctgtttacccgtaaggactgaaattcaactacatgtacacatttaagacttgccctagttcaatggtcagctcaagtactggagatttaggctactggctgtgtaccggcatgggaagctgtcttcaa

SEQ ID NO: 158299 - DNA, 1000 bp, Homo Sapiens
aatgttaacattttatttaaaccagtacaagcaccatgcttaacaaaagactgtccaaaataaacatgcaatatgaactagcagagactgaaaccacagcttaaggagttgtgtcagttgttggttttgttaaacgatgacagagaactgttaaaattcacaagactaaaccattaatgtttcaagcctcctgaatgagattatcttggaccatctaaatcagtgggaactgccctggcatgttaatgatctcaaacaatattcaagtaattatatttatatgaattataatccaaaaagcaataaaatacaatttctatcacaagtttactgtatatgagcactgatttgaaatgtcaaatggcataataaaaacaaatttctcaagaatattcagcttgggagcattggttttaagcggtctagaagattactacattcttccagaaatacaaaataagatttgtccagaaatgtttgaaacacatcctcacaaaagttgtaatggctcaaactctataaattccagtattatcagtctattgaacaaatagggaaagcaaccatagtaagaatacttgaattgatagaatatgagttactctctacttccaccaaatatcagcatttaaactcttatgaaaatatctattcatcactagtccacatatggattaatgacattgctcaggttttaaaagcagtccaaacattttttaagtacaccttccttaatatctatatgggttggggggaacagccaaatttaatttggcaataaactcccctaactggaaatttttagctaaagtgtcagacaaggatacagtttatggctacatttgactcctgaaaataggagataaaaaaggagggaaaagtgctgacacacattttgccacacagattatttagtaatgacagtaaaaaatttagcaacacacacttaaacaagagtatgtttaactgcactaggcatttagtaaacttttagaactag

SEQ ID NO: 158300 - DNA, 1000 bp, Homo Sapiens
ttttttttttttttttaacgctgagtctgctctttaatggacaccgcccacttgtctgcacctgactgaggcgggaacaggaggggtctgggaaatggtgccactgggcctgggtgccgcacagtctgctccctggggacagaaacccacagggtcgagccctgcaggcctctccttccaggaagggccacaactagcagccgcctgcctcctcagccccagggagggcacacaggctgggtggcacccagtggccaggccccttagctgggccgcaggcagcactgagccgcctggaggtccgaggtccgtggaggtggggagggggtgcagatgtcctggaggccaaggttcacccctcacatgttggtgctcatccgggactggctgttggctggagtcagctccccctggctcccttctctgggcggggacttgacatggatctggttgcggagcacagctgcccgcagcatcatggccttggcgcggcgctggaactccttgcccatcaacagagacttctcaaaggtggtgctgcgctgatccacgtcccgggcgtataggatcttgctgtgtgagtccacacgggcactgatcagcccctccaggattagctgcgtcagctcgtcctccagggcggccaccgtggtattgaaggctgccgccatcctatgcatgtcggctgacacgtaggggctgaaatactggatgagggcacggttgcgaatctgggtgtacagggtcctgacatggggggccagatacatgtccaggagcaggttgtccttcatctcgtccagcatcttgagacatgaggcgtacttggactcgtagaatttgaagatgatgtctcggacctgtggctccagctccaagaacaacttgaaggagctgctggagatgacattgcgctgcagctcctgccggtcaaaggtagccaaggcgcacaggccaccgtagatggccacgttgctgggggacagcagctcagggaagt

SEQ ID NO: 158301 - DNA, 1000 bp, Homo Sapiens
cactacaaactctctccttttattaacgttgagtatgaaaagaaacgtgatcacctgtttaaaagaaaaacaccgtttgttctttgacaatttcaaaataaggaactttgggtttttattccttttaagagtttctgtagttgactgtttttttcttgctatacaattctccttggatctgtattacctcagctccttagatacggcaagggtagagagtcctcacttaaaaaaatttcctaattgtacacattaaaagctaatatttaagaaaaaccctcttaatcctccaacccctattcctactgtgaataatctggtttaatacaagttaagtctataaataaatctgttctttctcctcaaaaaaacagttaagaaactttacaagccttacaggtttaaaaaatttaccgagagaaatcaaagtactgtcacttaacccctattaaacatacggtgttcaagccttccagtatcagcgccttttgcatagcatcgctgctagcctttcactagcatgctggctaggagtcttcttagtcactcttttcttctccttgatagtgtctgtactctggcttcagctcccatgtgtttttgtggatcccttttacattctgaacaccaatttcttttaagatttccttcaggtacaccacaggttgttttgtgatgtccaccaagtccttaagattatagtattgatgtttctcaaaggctgaaaatagcatgtctaaaacatgttgtttatcagctcgagctcgctttccgtcttctttctttttcctttcatattcgatattgtattgatgattagcaacaggtttgtaattggttgttacaactttgtccagctgttgtgatagcctcactggtttggaagactcttctatttgcaatctttttaatcgcatgtagttttcactggcagctggtcggcattcagctctttgtaccactattccttccaatgacagcttatctgatgagctctcag

SEQ ID NO: 158302 - DNA, 1000 bp, Homo Sapiens
cttttcaaagtttatttttggccaaaggtcagctagctctaaagaagtgtgaaacgcagctcaaacaaggcgcctaatttcatgggtctgagatgaccaggcagatgacacgcaggttaaacttcctgcagggctttctctgaagtcacagccattagttctgcagaggcaaacctaccggggctacatcaatcccgggccagggcagcccaggctgtgctgactgcttgctcgttacattcgcagaaagggtcagggactcgctggatatgacagtctgcattttgaaccctactttgttcagaagaaagaagccaggtctaaatgagagattggctttgctttctcattcctgccttgaaggccctttttcttggggagggtagaagaggggaaaaggaaagggagggtgagcctgttaaatgctccctgtgcttcttagcgtgtcctgtgggaaccggggccgggagtgggggtgggggagcttcattttaacttggggtatgtttgatttcagcagcggggggcagaagcagtggaggctggagatcatcagagtggggaggtgaacccagatgccactgagattctgcacgtcaaaaagaagaaggccctgctgttgtgagccatgccaccctgattcctgagaggccagagaggaagtttgttcaccagagacaggcttcagatggctttgatttcggcaagctggaatggcccaccagcccatcccagatcttcctttattaaaataataactctgaaagcagatggagaatgttgtatttgtggtcctctctgatacctagacgtggatggctgattctgttgagtgcctcgagtgtctgggctgaggaataaagatgtgatggtggttcccgctgatgctggggattctggagtctgcatttgcaggatgcctgtggtggaggcagtctctgtgaacactgattttctagaaggtacaattgggtaaggaaagcaaacatactatgttgtg

SEQ ID NO: 158303 - DNA, 1000 bp, Homo Sapiens
ttttttttttttttttttttttttttttttttttcaagatgctttctgtatttatttaaaaaaaaaaaaattccagaatgggtaagagaacaatcatcaaggatgtaggtgccagacacagggcagaaggtagctagaaaagtatgccttagggaagttaaaggtctagcctcattcctaccttgttttaatagctgtacctaatataaatagctaagtttcccattgttctagattcctctgccccatctacaaacatggcacagccagcttgacttgcaaggcctcagttgaaggaccccatgtacatacaggccagtacagcagtactaggctaactagaaggatctcatccccatatgtggtctcatttcaagtctatggatgactaccttcattgctgtgtgcgagatggtttcaccccttgaaaatatggtcacttcagcataaaatagttaaatctttataatgatcaattcatcctacctccttttacatgcagctgaaaaatgacaggctagggacatagaatattgtgaactttatactgttagaatcactgtccattaaatgatcactagctaatggtcactaaatttacaaattaaggaaattatatatagaatactgcaaaaacacagtaaaaagactgaagttcgcccatttctgctcaggaagtctcttcactcctaagcttcatatgttgtccttctggcttcaaaatttctgctattattactgtttttcctccttttgatcttccttttgttccccagtgccagaacttccagagccttctcgctcagatgccatctttttgtatgccatttcgaacagcttcagtgatgcctgctgaagagaggatgctgcctgtctaatattttctcctgtttcgctgtcttttctagccaggagctccctcattttggaaatctcttctttcagcttgttgcactcatcagcaggtaattggtccttgaattcttccatcttggtttct

SEQ ID NO: 158304 - DNA, 1000 bp, Homo Sapiens
tttttttttttttttttttttttttttctagggagaaggtgctttattctgggatctgcgtaccaggctggctggggtgctggagtgggaaggggaatccaaggagcaaaccaagaaggtcctagggccagcctaggcctccacggcccggccgttgatgacgcggatgtggcggatgacgtcctggatggcttcagatgttgtgccctggcccccgatgtccggagtgtgcatattctcattgtccatggatgccaggacagccttacggatggaggtggcataggagtgcagcttgaggtggtccagcatcatgcagctggccagcagggtggccgtggggttggcgatgttcttattggcgatactcttgccggtgttcctcgtagctgtttcaaacaccgcgtacacatggccatagttggccccagccacaaggcctgggcccccgaccagtcccgcgcagacattgttgacgatgttgccatagagattgggcatcaccatgacatcaaactgctggggccgggacaccagctgcatggtggtgttatccacaatcatgttctcgaaggtgatctgagggtagcgggctgccacctccctgcagcactggaggaaaagcccatcgcccagtttcatgatgttggccttgtgcacggccgtcactttcttgcgcccgctctcctgcgccagcttgaaggcatactcggcaatgcgcagggacttggccttggtgatgatcttcaggctctccaccactcccgccacactctcatgctccaggctgctgtactcgccctctgtgttctcccggacaatgaggatgtctatgtccttgtgccgggtcaccacgcctggaaggctcttacagtggatgacgttggcatagaggtccaggctggtgcgaaggatgttgtttcgagatttgtgcgacggtggcaggttatggttggtttcgatgttgcccttcagggccacgcggttccggcggatggcc

SEQ ID NO: 158305 - DNA, 1000 bp, Homo Sapiens
gaaatagcaacacttaaaaaatgcatagggttgagcacccgtattattgagggtggataatttaaatgtatagaagaaatcagttcagagtttaatgattgaataacattctctttagcaactatgagtgtgaaattttggttaatgataccgaaaatattaggttataggaagttacagtattacataaggtgagcaaaataatctaatccaattaatataacgccatctgggggcttgccagacagtcacagtggcaaactgctgaaatatgaaaggctgcatcatatgtgatacatattcccactgctaatacatggtgccacacaatcagttgtatcctgccatggtccatcttcatatgtggagggaaccttggctggattggacagaatgattgtgacctggggcaggttctatcccttgcagttagactaaggataaacctggttatatgacaaactaagaatgccaaatgtgtccagctcaattctgaagaggaattaatatacttaaaaggtccatttataaatgagattccaatggccacaattttagagtctaatctggcttcttatatttcaatctgctactcttaaaccaacaaacagtagtacacagttttattggtgcaaaactaaacaaatccaggaaggttattcatataagaatcttcaacacaaattctgcctttatttacaaaatggtctgataaaatatcgccccccccccatacttacaggtctcttccacaacacacttcacacgttgattttagcaatattaatagcaccattcgtatattatttaaaatcaagaagatttcatttcagttactatgttgattcatcatcatttacatccatggatgagataagtgagtatactgggactatctgctgctccatggtaaggattcctgggtccagcacaaaaggctttgcagttaccagttatgaaaggtatctatggtaagtagatactatgagaattttcgtgc

SEQ ID NO: 158306 - DNA, 1000 bp, Homo Sapiens
tcgggtgtaatcactttattggcttttggagagcaatggaggggattaatacctcatctttccaagttaaaagactaagactgtttccaaaagactccaaataagaaacttctcctcaaagtacaaggataatctgaatcatcttaaaccagcaataaaaaagtaaaatataaatttttatttagaattaaagcaaatacttcagtatcacaaacacaatattaaacttcaagaaatacaccgctaattcggagtgagcgtttatttgcacgattacaacatgcggacaaacccaggcgagatgagcgagtctacggttcctacccacccggctgacaaggggtggccccaggggccggatgcccagccccgaggcggccctactcctcctcctctcccgaagactctctctcgaacgtgtaggccatgaagcaagcgtcgggtctcttggggacaaggggatgccccggtctcacaatctcaaagcccaaaaagctgaaggttcggagcaaggcggctctgtcctcgcggttcttgtggaagcaaatgaagacatggtcggctcgcagctgctcctcagcgaactccaggagaactgcaaagctgtccttgctcccctcgggcagcgcgccgcccgggatctcgatgtagaggctgccgccactcagcactgttcgccagttaatgcgtttggcgtctgtgagcctggactggacgttgagaatcctcgtcttgtcgttggacgttagttcctctgttacattcagccgatcatcggagtagaataagttagctgaaagattgtgatccctctgactattccctcgcccacctgggatcttcaggggtgggtgaggggcatcaggagcaccaccgaggccccggacccgggttactacagcagtggagggagaccctggaactctcactgctgctgccgccgcggctgtgcaggcttaggagcggcatggtgcggctggcgtggatggtggcgctgggt

SEQ ID NO: 158307 - DNA, 1000 bp, Homo Sapiens
ttttttttttttttttatagaggaaaacaaaacactgtttattaatgaaacatcataacaaaatttaaaaggcaatacaagaatgagagaaaatataaaacagagggataatatctttaataggcaaagacatatgtaaaaacgaagcagaaaagtaggtgtgtgaatgacaattcatagatgaggaaattcaagagccaataaatgcatagaacactttcaccactaataaaagaaatgcaataagtatctgcatatgatacataatgttgcagatgtttataatttacataaaagatactgaactagggctgggctcagtggcttatgcctgtaatcctagcactttgggaggctgaggtaggcggattgcttgaggccaggagttcaagaccaacacggccaatgtggcgaaaccccgtctctactgaaaaatacaaaattagccgggtgtggtggtgggtgcttgtagtctcagctacttgggaggctgaagcaagagaattgcttgaatccaggaggaggaggttgcagtgagcccagatcatgccactacactccagcctgggtgacagagtgaggcactgtctcaaaaaaaaaaaaaaaaaaaaaaaagatactgaactaggcacttgacatccaagatgtccacttggcccttttctaagtgtacttcactttgttttcattcctcctctaaagctttttaacaaactgtcactcatgttctaaaaacaaacaaatgtctttcatctcattttttactcagcattatctatcaaagggactggatgtcccatctagtttgtactttagtttctagctcattacataggaaatgcaaataaaaaacacaatgagataccacttcacacccactaagatggccataacttattttttttaaaaaaaggaaaaggaaaataataagtgttggtgaggaagtggacagaaattggaattctcatacattgctggtgggaatgtggaatggttcaac

SEQ ID NO: 158308 - DNA, 1000 bp, Homo Sapiens
ttttttttttttttttttttatttataaccgtttttctttattctacttagtggggcacccagaaacttccctgggggaaatgcttgttcaaatagagaacacgcagaagatgcacttcaccggcctcctctggctgctgagcccgtactctctctttggctcaggctaggcctcttcttctccttggacttaacgtggcttaggtccctgagtcggccaagacctcccagaggagacctgcccagctgccaccaccaccattattgattggcttcccggtactggtgcagcaggtcactgacatctgtactttctactttcacccaaccatcttccttcatgtggtacatattgacaacgcctccagaatagctgtctctgtgagtggcataagcaatagccctgcggccaaggtcataggcctcttcagggctaagattaggccgatagccactgtccatgaccccgtaggcataagtgttcccactacccgtggagaacatatttcctgagagccgagtcccatgttcatccacgtagtagagtccaggacccttcttatcccagccacagatcatactgcccatagagaggcccatgccccggtactggcacatcatgttggacagcagcttggaggctgccgacactgaaatacgttctccatttcgcagatagtacagcctgcattccttggccagcaggcgctcccagtactgacagtctgctgcacagccagacatggtgccaagcaggtaagggttaatctcaatcaccttgttcacccgtaaggcactaatgtaggacccagctgaggcccgagaatccactgctgcaatcactccatgctggaacttgaaggcgagcgtggtggtgccatgggccatctcaatctgaacgttcctttctccgtccccacccagggactggaagaattctgtgggctccaggcccgggcatccgctggaaacaggggtgggtagggtcgtgtcatctaaa

SEQ ID NO: 158309 - DNA, 1000 bp, Homo Sapiens
acaaagtaaactatgatttttattgtgaaattttcatagatggaaaattgaatattctgtccatttcattttacaattatcttaccacttatttttgtaccatgtatttcaattgcctgtttagtgaaaaataaaaattaaaaaaacctattcatttttggcttgtgtttagcttaaattttatcattaaattaaggagcccacaacaaaatgtgttgccagcagccatatcccaagcccctgcgtgaagaatgttttggctgctatttcaacctaaggaaacaacgtttgacctcagtcaccttaaaatgccagtgtgggcagaagattttttattcctcacaattaaaaaccaaacaaaaccccctaggatcttgaaggtcctatttcagaaaatcttcatatatgcaaaatgtcaccaaaataaatacatttgcctcaattatcattaccacccagtattcatgttttaatttttagggatataatttctaaatttagagcaatcaaatttcctgcttcctatcttaatgtttaaaccctcctccaacaccaagttaagcaactgtggaggataaaatagttgaatctgactgaaagcatggaagaaaaacattagcacacattagtctgatcatttgccaattaggaaaggtgctgctttctacctctaccacagatgcatttatgaaatgttgatcaatgaagctatttcaaatggttttagagaaggatcagagataacgggctagatagcatacattctaaacttgttttacatatagtttgagctccctgaaccactgaagttggttaaatccctacacagcacagaagcccctctaggtcatgttattgggcatattatctagaaagcaaatactggatgctgctctaagataggtctagaataccttagtttgcattgtgcacacacaaatggctgtgttgaatataatgcaaggctctatttccctttaaccataagaatcaaaacaat

SEQ ID NO: 158310 - DNA, 1000 bp, Homo Sapiens
aacctgagcacctcaatataaaactaaacactggtgaaccgttttcctaattctgcattatcataaatgtacaagttctcctagcagtccaacacttaaatagattaaatcatctctgacacatggtagctttcatataatgaaaatacctaaaataattagtgcaatatactgaactgatcaaaataaaatgaactttggaaaggaaggctgcaagattgttactaacatattgcaatactttatgttacaaattacgggtacattgtttattatggttctagccatggaggaacaactgaagccccttcctgtcaaagggggagagagaaataattagctgttttagtaacagtacattttgtatgcttttaagcaactcttaaatattacagaaaagtaatacagatatggagactacaatgcagtaccctatttacagtacagctgaagatcgaatttaaaataatcaagtttgaatatacataattgttagtgcattgactatattatgtcaaaagggaacaaaagccccctccccaccccaaacaacaaaacctgtgtaatggccagcggtgattaattagaaatcacagacacctggtttatttcatttttgttaaagaactcacatgtttgaaaggaacactgaccattaaggtgcatttattagttctcaaaattcctaaaacaagatggggttgcatttgatttttaccccatttaaaaaaaaaaccagactgggtataattaagataccattaatactcttccccacccctgaccttgtatatgtgggattattttcttgtggttaatttattaaaatgtggaatgtacattttaaatacaggtaccaggagaaatgaacatttgcctgaatactatggctaagcatcataaataactttagaatctccttctaaacaaagaatgtttttgaaaagcccaaattagtaagttccaatttttttttttcacaggtgactactgtaccagt

SEQ ID NO: 158311 - DNA, 1000 bp, Homo Sapiens
ctcatttatattttatttaagagctgtgcccagttttatcatctcacaagaatgaagcaagggacaaaggtaagtgccacgctccctggccactgggttcctggcaagctcccagccactaggtgccaatctcccttcaatgtactccttcttccccagagtgcagaagcgtatgaagacagttatgacatggacacatgcatgagctattatacataattacaaaagctgattctgtcatcaccacatcttgtctcatcagtaggagcgaatggctggcgggatggtggcacagtcagcctcgttcaaagttttgtcgattacgggtctatattccagagtgaccttcccagtgccaacgtccacaaaggacagggtgtgcttcctccagtgctcctcaaagggcttcttctgttgcccctggatgggcttggagtaatcgtactcatcaatccgcaccttgtagtcttccctggcatgcgcgccccgtgactccttccgcgcctctgctccgtagatggtctgcagcgcacacagcatcaggttctgcagctccagggtctccaccaggtctgtgttccagaccattccccggtcgaacgtcttcaggtgctttaggtctccatagagcttgctgattttcccacaaccttcttgcaacacgcttcccacacggaacacggcagcatgattttgcattgacttctgcatgctgagtcgcagttccgatgttcttatgcttccatcagcaaatctcaatttgtcaagattcatgacagattcttccccagcgtttggtttaattggagggactttatctccaggcctgcatgactcttcgatgctcagggcacatgcccgaccaaagacaaccaggtccaagagcgagtttgccccgaggcggttggcaccatgtaccgaggcacaggcggcctccccacaggcgtacaggccgggcacaatctgatcctggccattcacgtgcctcaggacctgcccc

SEQ ID NO: 158312 - DNA, 1000 bp, Homo Sapiens
gcggcggcggcggtgggcggaccgtggcgcggggacgagcggccggttagcggcgtgtcggagccggtgtcacatgtgtgtggactcggggagggcggcggggggccgctcctcggggccgtctgcctgcaggaaggagtccacggacttgctgctgaggcggaagggcatcaggcggcggaaggtgccgggagagtagggaatctgcgtgcgggccctctgcgaggggaccaccgtctccccgggagacagccagggcggcagcctggccaggaggctgcggtccagggcctcgtccggagaaaacacagggttgtcaattcctgcaggggagtcggacgctgtgtccttggtgacactagccaggaactcgatccccccactcatctcctcatcatagttggggggctcctcggtgtctgaaagttccaagtctttctccttgatggtgaaattctgcgcagggctctccatgggcagcttcccattggggatgctgctgtttctccgcttctgggcacgctcccgcttgtacagcttggctgccttcttgttctggttgagccccagcttggtcgacttgaaggactccaggcgcttccgcatggtcctgtggaagatttcccggtcctgtttctcgtcctccgtgggcgtgagctcgtgtcggctgtacagatgcttgtactcctgccgcggcttgtacaggtactgctgtagcgtgtggtgcgtgaccatgtcctccgcgtcccggatgctccgccgtcgctgctccagagactgcatgtccaggcagacagcgctgacattttctctcaggaggtaggagacagaggcctccacggtggacgatcgtggcgtgaagtccacgttgaccacgttgtcggtgctgggggagcggatgaaggccagggacccgcggcgctctccctcagccacgtagctgatggcatccttcaggttcagctcgtggaagacattcaggatccggtctcgagacttc

SEQ ID NO: 158313 - DNA, 1000 bp, Homo Sapiens
ctataatgaacatgctgcctgggcttcagggggccactttggtggcaagatggcatccaggacaccccccaagtgcaccacctgcacctggtggaagccgtgcagctccagcaagcactgatactcgcccaggctccgctccttgccttcagtctgcaccagcatgttcagtgactgcatcagggcgcgctgcgccaccctcttctcctcatccaggagcgtctccaccagcagcaggccggcccctggcttgcagctctcggcgaccttgctgagtaacttgtggactttgtcgtctggccagtcatgcaggatccggcacaggacgtacagctcagcgctggggagggggtccctgaaaaagtcacctgctgcgaagtggatctgcactgcctgcggtccggggggttggaagtgggcggccagctcgataatgtctgggaggtcaaacacagtcacctgcatacgagggtactcacgggccagctctcgggccagtgcacccgtgcagcctcccacgtcgcaggcggaggagaagcgggacagattgaaggccgtggccacctggcacgcagtcagcttcgtcatgccgtgcatggcccgcatgaacctcagccgcgtctccgggctctggtagtacgcatcctggaacagatcttccgccttcttccccaacgccctgtggtgctggtttgttccctctcggatggcaaactccaggtatgtaaagaggttccatgtgaggtcattattgtgcatgatgaagccgtgcagagagtattcgccatccgatgccaggtagacgttcgctgtctctgtgttactgtaaccttgctctgtcttctccaggagccccatggcagcacagatgtccagaagcctctccattccacacgcagaggcgtccactttgctggcaatatccgcagccttctggggtgcttcatcttttaataaatcgaacaccttcagtttgcaagcggtgagcaggcccttggat

SEQ ID NO: 158314 - DNA, 1000 bp, Homo Sapiens
ggtactaagacatttattatatcataaaaagtccactgttgttctgtttttccatatgtacatgctcctgtgggcagtcccccacccagcccccacctgcctaccctccatggtgccagtcaactctccaaactgaccaactaattagtaaaagaggaagaactggaggaggtggcccagggctaatgggagtgggaaacaaagtgcagagtggttgggcttagttttcaatgcctgaccgtgggcaggcactgcagggccggcacacggatgcctccccagagctgccgggctggaggcagaggctgcagatgacagctgagttcactctcaggctgaacccccaggaatggagcgcagaggaggaaaaaggtcccacagctgattgggggtcttagctggggctatcaacattctctttttcaggtccccatccaagtggcagcaacagcagctctgacttggcctgaagagcttgtggcccgcaggacagccagaagtggggtcaaggaaagcctggtgggaagcactggtcctgatctctgagtgacctgccttagttgacctcagaggtgggtatgggatctgtggggcggggtgtggccaggaggggcactggtgaggtggcctcgatgagcgcagggttgaggatgatgggcagagtcataggtggcacgcccacctgcagtggggaggccaagggctgcaggatcagtgggggctgagccaagggtggaggcccgtcgggggtggggctcagcctgctggggcttgaggccactggtgatcctggggagctgctgctggcggctcgggggctctcgggcttctcaaagtcacaggcccccagctcagatggaatctctgggggcggtggatggccaggtgtcctagtgtcgccagcagcggaagtcaggtgggctgaggcgagaggcttttggccttgaggctccatgggcatggggtcctggatgacggtctgcttgaagagttcatctcg

SEQ ID NO: 158315 - DNA, 1000 bp, Homo Sapiens
tttttttttttttttttttaaggcttctggtagggacattttattttttggtaaagccacaatagatagaaatgccataaaaacaaacatgtaaacaaggtatcagaactttggttcactgaaacatctcacacctaaaacacctgaggtacaaaggcaccttgctaggcgctagacagctaactctgctgcagccactttgatcctagccttggggccagggatggcacaggctgaatggaagggctgggacttcagtcacacaggagtcgccctagtatggtctccctctgctccagacaaacattcatttctccaaaaatcagcctgataggaacatacaaaggaacatacaaaggtgtctgtcacgttgacatgggctgaaggaccaggaaggggaaggacagaaaaggatgtcagtcaacttctgttgatccacaaggtctcaagaactcctgtcctcgttcatggaaccacttattggagacccacttgcagcccacaagcacagggcaggcagcatgtcttgttcggtagtcaccttccccgctccgcaagaggttgtaccagaacacagctgtacccttcttaggccaaattgcagcccccagatcagggaagacggtggcaccaccagcttctacatcactcatgtagtttaagaaagtagccacacgattccccgtccctaaatgcttgaaagtatctcgctcatcattcctagagaagtcgaagtgcggttcatactgtcctcccactccataatttgcaacctgtaacaattctgcagtctttactgttaaccctgtgatatgctgcatccgacgatttactcgggccacaacagggtcatcatcttcctctagccaggagcttttggaaacccggtagctggcgacagtgaggactcctgtcttgggatcacgaacggtggctcgtgcaagtttaggttttgcgatctccttgatcctctcgatttcctcatcagacatgacatcgt

SEQ ID NO: 158316 - DNA, 1000 bp, Homo Sapiens
ttttttttttttttttttttttttttcacagtcagctcagttacagtctttattgtaaagaaggtgcagtcggaacatgggacactgaaaatacacaatctctggtctttcaggagagggagagagtgatatatacaaaaattgtaaacatgttcacttaaatatccacacagaattggtctaggctacaatgtaacaaggttgtcactcaactgcatctccagagggaggtgtctgtctgatgaaatgtggcaaccacgtttggtgttgacttaatgtgaaaagccagctttgagcaatgcatgagtagtcagctatgcagagggactccaacctgggactgggccaggaagcagggtgcaggtggagaggcagggactgggccaggaagccaaggtaaagggaaccacacaggggccatcttgtggggcacggtggccagctggagcctctgggcctctctcctgctgaggggcttgtcttgcctggcacccaggcatccttctcctctcctggcaaggtcttactgaagggctaggacagggctggtgtcttggcccacagctaccttgtgccttcctggccagaaccacccacacctgggcaggggccggggccacagagagaggagcagcttgtggagtactaggaggtgaaacccgaagactggaccatgatcacaacactgacagggctgggctgttctagcagcctgtgagagaaagtggagagtggctccggacgggacgcaccaccatgacagaaacgagacagtcactacccacagggacatgggatgggaacagtggccaggatccccagtcttggggcgagggtggtgtctttcccctgcccccgctttgtcctgggcagcccctgcacctgatcgtagagggcagctggacccccaaccccagagtgagcaggtgtggcccaagaggggaaagccttccccaggccagtccattccaggctagggacacacgtcctgggcagtgct

SEQ ID NO: 158317 - DNA, 701 bp, Homo Sapiens
ggaggacgtgcacgcacgctgggtggaggacgcaggggtcacaggttctggcagcactgcagcttgttgggcttctgtccgtccgtggtgggcggcacgctgatgtccaccacgttgttccccggggactcgtcgtgggcagcgcggtctgcgatctgtttctgtgacacgatgcggtagatctctgtgaggatgttcttgaatgcttcctctacgttagtggaatccaaggctgaggtctcgatgaaggacaagttgttcttttctgcgaaggcgcgggcctcgtcagttggcacagcccgcaggtggcgcaggtcactcttgttgcccaccagcatgatgacgatgttgctgtctgcgtggtcccgcagctccttcagccagcgctccacgttctcataggtcaggtgcttggcgatgtcgtacaccagcagggcgcccactgcaccacggtagtacgcggaggtgatgcggcggtagcgctcctggccagcggtgtcccagatctgcgccttgatggtcttgccgtccacctggatgctgcgggtggcgaactccacgccgatggtgctcttgctctccaggttgaactcgttgcgggtgaagcgcgacagcaggttgctcttgcccacgcctgagtccccgatgagcaccactttgaataggtagtcgtactcgtcgtcccgggtccccattgtccg

SEQ ID NO: 158318 - DNA, 1000 bp, Homo Sapiens
ttttttttatttgtatatgttttttatttttaactttcattttaagttcatgggtataagtgcaggtttgttacataggtaaacttacatcatgggggttcgttgtacagattatgtaatcacccaggtattaagcctagtaaccattactcatttttcctatcccaaagtcttatgagttgaatataaaacagaaaaacacccttcttcacatgcatacgtttaataacatgaaagccaagacagaggtaaaaacactaaatcaacttggtatccgttttactccctaatattagggggacagtgaacatataactcagcaataaatgcctttggaaaccaagaagggaagggcccaagtttgataagggaaagccaacaatggctaaaacatccatgcaacacttcgtgaagtcccttctgccagcggctcccgtgtgtccatatcttggagtgtgttaggctactgcttcaagaacagaccgtggacctggcttcctcacttccccaaaagaattcctacagaaggctacaggaaaggcttcttggtaaccttctttgtttcaaacaatggaaaacatgagaaatggatagcaccctctcatccccaaaacaccatcatcatagcaaggataatgactcaatggagtttcgaatctgtatagtgctttatatgttttcaaataattttcacgtatatgatcttcattagcccatgcaacagccttgtggtttacaatggagaaagcagacaccagaaggaacttgctcaagatcatgcacccagatagtgggacaagtgggcgagcacccagactgcaccgtcagcccagcatttccagccggccattaaatagctctctatcttgtcaccctctctgacttcttctccctctctatgtccaggctgcctgtcagttcacaatgctatctcactacagatacagatttcaaaagcagaaaaacacaaaccttctttgacaagtacatatagatataa

SEQ ID NO: 158319 - DNA, 1000 bp, Homo Sapiens
ttttttttttttttttttttttttgataaagtccttttaatggaaaatgtaaaacccctttcaactttaatgtacaaagccatatgtaacacttgcactttaacaaaagcaagccaatgttttaaaaaaatacatcattaaatgtatatatgtatatatttacatagcatattaagtttaatatttagctttaaaagttcacataaattttaccaaaatgagacaattttaaataaattacaccttttgaaaatgtttaattgtacagtcaatagcttcaacaaaatattgaagtgtctgtatttagtatctactttatatactttatactttacaaattttacaattatttggcagtaattttctgattatgacatgactgctgtgcgattcagcaatttcccagatgcaggcaatagctggtgtttgtgtcctattctcacagtaactgtctcaatgtagtgaaaaatatcagtaattttagtaaactgtacaaggtcacatttacacttgatcaacaatatagcatagaattttttattttttaccaaaaataaatacatcattttaaatctggcattttcacaaacatcatatacactataatacaaaacagctatatagtgctgcttttaaaattctgcttgttttataacattgaatcacaggagctgtgacatatgctatactgctgtggtgtcagtaacaagtaattactacaaagagaatttcttggcactgatggttttatgaagcttaaagtcagtgtgcatacatatcatcattcaaggttaagtaatcccagttcaacaacctaaaaatatcaaactggatcacacttaattttcttccatatcctctacttcatcctcgtgtatcttcaaggctctcaccatttctttgactgcatgatacaaaatatttttaacctgtagtttatcatcataattgatttcttccttcaaaagtctcagttcctgtgttaaatgaaatgactcta

SEQ ID NO: 158320 - DNA, 645 bp, Homo Sapiens
cagttcaaactcatttcccttttattaaagtccaagttaccattacatggcttggtactcaataaagggaaacttgttcaaaataaggtaatatgttatcatcagtatttccaggtaactgttcacactcaagtagcaatgtcaataaatccttggggaagcccatccatgcggtttacactttgtcaaggcccagttcctccggagtggagattcccagttcatttaaagttggtctaagttcctggatgacataggggtagatttccttatgaggtcctgctttgtccttaacaacctctaggattcgaactagactagcaaaatcatttaaccgtctgcatgcccgcaaagcagcatcaatgattttgggctctggaaccatatcataggtaacaagtgtgtttatccctttacgcaattcccaggcatctatatctggcttgttgaagtatgttacccagcgagcatcaaactcctcatctgtctcctgtgacccatgggaatagcagcgaactgactggatagccacggcggggccgggggtccgggcggagtgcaggaggcctcgagggtcggcccgggtggttgcggccacagcgcagcggcggagagcggcgcccagcatgacggcgatggcggcgc

SEQ ID NO: 158321 - DNA, 1000 bp, Homo Sapiens
gagaataaaattccttattttatttcaaaaaatgtaggggtggggaagtaacatgataaacattacgatcagctccctatgggttcattctgcctctgcgggggtcgggggcatacagtagctggggggcatgccattgccatggcaacccagatgcttagatgcaggtccctcctggctgcttagagctggggggactaggcgccctccccgaaagcccccattctgagttgttggtgcctgcccttcccctgaatctaagaactgattagtgggttagactgcaacagcagctcaggatcctcccaggacttccctccctcccctctcacttgcccgtcccctcagctaccagcacctccagcccccacctcctcctcttctcagctccaccctggtcctcatgaggtaccccctccccagcccctcagggcagcctcctcctgagactccctcccgctctgcctccctggccctccctgacagtcagggccaccgaggcaaggccatgtggtgaaaggcagattgtcacaaggcccagccctgccgccccctcctatcagaatgcatcctggagcaacaggttaaacacagtaagggcaggttcagacaggagagtgcctgaggcagcgccgtccacacagcagccccgagatggggagggctgggacgagacctcccagctccagtgccctcctgcagcctgcagggcccacgtcccctggggccaaatggccagggattggctggcactgcccagctgataacagagcctttggagaagggtcagattgctccagaatcttggacctcaggacaccctgaggaaaagctggagggtgggctgagcctccaggccagccggcccctccctgaacgtggccactgcctctgctgagtcacaagagacgagggactccccctttggtcccaaggtcacaggctcaagttggggaggcggtggaatggggcccgtgaaagcccagggtcagagcactct

SEQ ID NO: 158322 - DNA, 1000 bp, Homo Sapiens
gaaatacaaaggacttttattactgcacagtcatcttacaaattgttaaagcaggatgtctgttttaaaaattgaaagccttacttataaggagagcttgcctatatgatactactttcagtgttaccaaaaggcttatgagcctaaatctatcctcatattaatgggcacactttaggcactttttccaagaagtgcaaacctgttccttggaaaagataacccactaatccattagttttttcgctttgaaaaagcagagagctgatggaaaggccttaattggagaaagcaatccagggctgctgggtggaggctggagaatcccaggtggaaggctgggcatgagccatacactaggtgtctcaactggtgaggtcaatcaagtgggagaacagaccaaaaaaacttgaggacgccctaaagagataatctgcctcctattgccttcagctgtcctttctgaggatgttcttaaattacctatgtaggttagacccaggaaagcttaaaggagacaactggaggaagaggttatcaataatttagagtaggctgggcatggtggctcacgcctgtaatcctagcactttgggaggcagaggcaggtagatcacttgagccgagttcgaaaccagcctgggcaacatggaaaaaccctgtctttataaaaaatacaaaaattagccaggcgtggttgtgcatgcctgtggtcccagctactcggaaggctgagacagaaggatcacctaagcctgggaggtcaagactgcagtgaaccatgatcacaccactgcactccagactgggctacagagtgagataccatctcaaaaaaaaaaagtttagaaagtatttggggggaaaaaaaggtatttggagatttttttaaaccacatactttatttgatgtcaacatcaaagaaggaatattttaaaaagcacatagaaacccttaagttagtaatattttaaactgcatgaaaaacatattatttta

SEQ ID NO: 158323 - DNA, 895 bp, Homo Sapiens
ttttttttttttttttatggtggccagctttctttattcttggtaactgtgaggaagcactcctaaaaagttgaaaagcaggtgagtctggtgggaggcgaccaattagagaaaaaggatggaccctcaagactgcttaaggactgccaagaggctccttagaaacagatacattcggggacttcattacatctgtggagtctggggatgtctggtcctgggactaaaattagcagctgcactctttgggggcgcttctttgtagagcctctctctgtcatcagctgcttctcctcccacagtaggttcagtcagaggagcttggaggtcccacgagatgcagctggctgtgatttttgctacaggccacagtcaggagcacatgatagtagcattggcacaggccacggtggaccgtttttcagtgtacagttccagcaaaacctggtattctccctgaggaatagtaaattcaggattattgacaggcccagcatagtaaatctgctctcctttccttcttccacagaaagaaaacttgggcagagccgcctcacagatgggataggagaaattcaaaacagatgagccttgagacatgagagctaggtcaagaaaaagctctttgatgtcctctctcagaataattccaaatctaatgttgatatttgattttaattgcttggaacacttttcaacagaaaagccaaaatcttgtaatggatcgcaactctggtagagcacttccaagccgctgtcgctacagaccacgtgtgtgggccaggctttcccaccgccgcctccactgcagctgggaaaaatcagagtccagaggaagagagtggctgtgaaacccttcatggtgggggcctgtatgggacacacagaaaaataa

SEQ ID NO: 158324 - DNA, 1000 bp, Homo Sapiens
gctcattgcatgatttcatctttaattaaataagtcaagtaggccatcaggagttgggttcacattctattctgcaaagcaggccctgactgctggggctgccagctctctgaagggcagccccagcgtttccaggagacggcagattgtctgtggccatggcaaggacatctgggacgacagtgacagcaatggggctgggagcaatgtggaacggcgccagaggctgagcagaatgagctacatgctacacatacacacacgtggatgcatatgtacataccatggcagtgtatgctgtgaaggggtgtctcgtaccatgcagacatgaaatagcaaacagggctgaggtgttggcaaaaagacagtgtgcaggacctgggagggagcaggggagccaggaaaatttggactagaatatacagctgagatggagacttcagggggtgcccagttcaagccaatggcagaagacgcagaccacatgggtcattgtatccccccagcaaagcacctgatccatgacatgagctaggcctgtgaggatggcaccatgtctgtagccttggaaacacgtaacaaatttgtccccagtccagttacggggtgccgaaggacacgagaccaaaggatcttggagctctcgagacatgtgaagttgccaattctgctttgtgcttttgaggtaaagagcagcttccactgtctctgaaactgcagcgagttgacaggtgatgcggctgcatttaggaagccctggaccctctcccttccatctggctgcgccttgtcctagaagcttcacaagcaaacccaccaactcaggagccctggatttcagcagatggtccttctatcagcttgtacagatcaataagacacacttggcttgtgcaggcatctgcttccactcagccccaatttctctccccttagctctccttgcctcaggtatcagcccttgagatctggcttcgctttctgactttgggaatgggga

SEQ ID NO: 158325 - DNA, 1000 bp, Homo Sapiens
ttgtgtgtgcatttttataataaaactgaaaatactgtaaacattttcattcttaaaattatactcatggtaataatttgaaagtatgctgcttccaacataatttctcagagaacaaagactgaccattaatacaaaacaaccttcagaggggtagtctttttatcctttgaaagtatgatacagtatttaattcaaatttccaaatgtatatacatgttcatttttatttttctctagctctgttttataaatacatgtgttcaaacaatcttgattaggagcattttaatcacgaagccaacacatgttactgcgtatctgtttaaaatctggtagttgcttaatgggaccaacagcagcaatagctggactcctattataaatgtatttggtacatacttctcgaattgtctcagcattcacagcatcaattcttgcttcaagctcagggatgggaatccttctattatagcataacatttgcctaccaatatcttcacaaattggagttgaaccatcaagctgcaacaacatgtttgttttcagaagatttctggctcgtgcaacctcactttctgtgacacttgtacagagtcgcatccattctttttgaacaacatgtagcatgtctgcaacagtggatgattcacaaaccatatacagtccccataatcctgtatctgtgtaggaagtgttgaaagactgaaagctatggcaaagattgccatgacaagtgagctgggccagcttgctagataaattcattcctcccccaaaagagcgatcccagttgccaatcagcgtgtttgcaaccatgagacagattgtatctggatgtgcccaaccaacagcttcaacagctattgcaaggtgcgccaaaggcatcttgtcatccctcacacgaatctcacttcctgtgaatttgcagggaggcagagctggtatttctcctttgtgtgtgcataaagagtcaccgaaatgaaactttgctaagtca

SEQ ID NO: 158326 - DNA, 1000 bp, Homo Sapiens
tttttttttttttttttttttttttttttttttttttttttgagttatattattactttattttctttttttaaaatgtagcattaaagtcatccaacatacagatattcctatggctcctggcacattttactctctctaaagtcaggtattttaattatgagatgaagaaaatcatctcattaaaatggcaacatttctgataaatgtttcatatttatgtgatgggtaattgactccccatctacccctccagtccagagctacaaaagacagtgcacaaccacagctaacaggtggtgggggtgcccaagtagacagggctgcagaacaacaagcaacggggttaaacttctcaaacaacaagcaacttctttatttgtacagagtaagaatatagaagaaaagcatcattttcctttttagcccttttattagtgttttgcctccacccaagttactgcataccaagcagctaataaaaaccaactgacttaaagtctctgaaatgcatgcaacttaaaattccctaaagcacacatcggttccgagtctgatttttacagggcagaggctacggtgctgctgggttaccaggggtgtctgtcatgctgctggggtttgaagtcgctgctgctgtggcttctggctgctgggtttctgtgtggggatcttctgcatttccagcatttttcttgcccttgtctgctgccacggcacccatctccatgattgcctgcagtggctgatctgcttcaaggttgctgggctggagttcatagacctggacttgacctgggacatcaatggctttctgttcaagtttttccaagatggtctgaaccttcctgacaccgtctctcctggcctgacgcacatcggctcgtccctcggggtccactgaatccagggccagcagctctttggtcaaatactcttcgatcatcaggtactttttgtcagtcttcttgccttcaaagttgtctacagcctgctccag

SEQ ID NO: 158327 - DNA, 1000 bp, Homo Sapiens
ttttggcaaatcaattttattgtttaaaaaaataaacgttacatttgacatagaaaaagacattttaaaaatgttcttaaaaggtttaaaaaggcatttgttctggccaggcatggtggctcccgcctgtaatcccagcactttgggaggccaaggcggatggatcacctgaggtcaggagttcgagaccagcctggccaacatggtgaaactccgtctctactaaaaacacaaaaatttgctgggcatggtggtgtaatcccagctactcgggaggctgaggtaggagaatcacttgaacctgggaggcaaagtttgcagtgagccgagatcgcgccactgcactccagcctgggcgtcagagcgagactctgtctcaaaaaaaaaaaagcatttgttctgaatgtgcctcatcatcccaggcaggcatctgtaagtttccattgtttccacaaaaaccagtggggttcccctctctggaaaaaagcacgaacattcttgctgcttggcaatgggtggctctcatgcccacacctctccacccaagggaacagtctctctgctcctcacctggcagaagcccagaccctgagtccctagcgcggggcagagcacagaaacatgatccagatgcagcaggccccgcccgtctagttctcctgcaacagcctcttagcactgctccactctgacctgcccggctggaatcacagttcccactccggcacaggtaaagatgagctcccaggatccagcaggggctctgcccctggggatctgccgccagccggctcttcccggtggacagaactaggaggggcaggctgtacccagcacatctcagagagatggaggcaagctgggttcctgatgatttccagctaatacaggtccttcctcctgcatgcaggcgccccgtaacgctttataacagacgcctctagacttctgtgggggtaaagtgaaggacccaaagcgacacaagtagtgtctgttcaca

SEQ ID NO: 158328 - DNA, 1000 bp, Homo Sapiens
tgattttctaaataaaataaacctcaactttattcagctgatgtgcttccaaaacaatgggtgtaaatccaaatttgcaaatcaaacccattcaaattcatcagggcaaagggtgtacagaactccgcagtgaagtctaaaaaatcaagactcctctaacttacttggtcttggagtttggcttttcttacagtggtccccctgaagtaaatgtccatgtaataaagagatctcaagttcctcttgataacccacctgttttaaatcacaataggcacaccaaactcatgtacaaggtcacagaggctggctaccggagtttcttgcatcagctcgacctaagaattcacccccgcctccactagagggtgctccttccctggcctggacccttccctacactgaggcggtggagagagtcacactgttaggccaaggtctatttttcaccaggcactgaaagcagatgtgtgaagagaagtggtcatgtgacaacatgcagtctcaatgcccctgggtgtccagacacactggctgctgtccaccagccgcaggtggtaaagacccaaaaaccacctctgcaatttttattccaaactagaggactggctctgaaggtgcagcatgagggttcatcaaagccaaccactgtcaagtgtggaaagcactggtgcacaccacgaaaagatgtcctatcagtccacgcatgatgggtgcggggacttctgcctcccagagttcaagaacaaatggctcagctgctccctgcagaccttcctccaaagtgtgctgtctggcaggatccttgggtgcctgggggacaggacagccttgccgtcgcagtctcagaatccattttatggattaccaaaagtcctgcgctaggtccctggcaccgcagcagtgctgtgtgtaatggaaatgtcaatgtgcctccccagagttagacagatctaggtctaaagatgctgcaaccccccagtccaccctccagtcactg

SEQ ID NO: 158329 - DNA, 1000 bp, Homo Sapiens
ttttttttttttttcacagtctgggggcccccgaagccccctcatctttattccagttcctcagatgtggcagttcccccagcttccctggaaacaagtatcagacaaaggtggtggcagacacaggacagggccctgggtggggcttgctggcgctaaaaggatttctcagcaggctcagggtctcccgccccgaatgacccttctggccacttcaagctactcctctgctgcccggcttccctctgcctctggttcccctggctgagcagggccttcctgggcttgaccctggcccccttcagcagttgtctcagactgttcccgaatgtccctggggctggctttgaccccagcatccccatctccctggcacccttgctcctcccctctgcttcttgcctctgactgcccactgccctcctcctctgtcacagccccctgggtctcaggccactccgcccggcggtagacgaggtagccagtggtgggcagcctgtgggccagggccccagggggcaggcggtggtagccctgctccttgtacaggaagaggccaaaagtgttgggctgggtcactcggaacttggtggcacagagctggttcagggtggcaatcgaggcttctgggggcacggccagggtcttggaggtgcagccactgctgggatcctgataggctactcggaggaggtgctggaagcagtgggtggcaggcaggcggcgctgctcccagaggctgagggagcgccgtagctcctgcacggggctcagtgggagggtgtgggcctgacccaggccactcagcagggccaggctggcagagaggctggtcaggtagtagccaccctctccagtaagcaggctgggctccagcagctccgacatgtactcggcctccagcagcagctcaggaaggtcacagtgggccaagacgaggctcagcagaggcaggaactcgtcggcacccgcgccctccccttcctgggtcctcagggcc

SEQ ID NO: 158330 - DNA, 1000 bp, Homo Sapiens
tatcagcttattgtttatatagtgtggaattcatacagcaatcaaagggctttactgtctgtacccagatgctcattgttattgaatgactcatattcttcataatttttatttaaaagttgcagtctaagtcttaactttaacatgattaacagtattatggtttttctttatgttttgagtttttttgtagacatggggtctattttgcccaggctggtctcaaattcttacctcaagagatcttccccctttggcccttcaaagcactgggattacaggcataagcatccactataggccaaggtactttgtatttaaataaaaggtttataaggaagtctaaaattcatattttactaaattttaccatattttcctgaagtagtagattaaaaatatatttaaattaattcatagatggctggggaaaaaaggcatataaagagaacaagtgacttgtcctaaatgacacaatcaattctcaatactttctcttttcaatgatgcatgcttattttctacttgatgagttggattgtactttacaggaaacctaaaataaattcttaggtcaggaaatgtgacttcgattaattacaaaacatatatttatgtgtaatgtgttcttaaagctgtaatttacaaatattcataatgatttccaagcttcagtctgcctcttgatataggtccatttcatttatataatcataaataataataagttagtatttattttgctgatttaaggtgttcatccaaaagttcagcaatggcttcttcatctgctgattgaagcagtctctgaattagctgatccaggcccttcccaccacataaaaattccttaatatcacgaacttcatatgctatcctgtggtcactgactctatcctgggtgaaattatatgtccgaattcgctctgactgggctcttgttcccacctgcagttttctagcactttgttgctgacgcttgtctttctcaataatctgc

SEQ ID NO: 158331 - DNA, 1000 bp, Homo Sapiens
ttttttttttttttttttttttttttttttgcatcaacatttttattgaaatacaaaaagtgcaaacggtgaaatacatgattggtgccaaggaagtcattaagtgtgaatgtgaacactggattcacacagtacaagcacccgctccctggggtacagaccagtgggggacatgagaaagaccaaatagatccgaaaggctccccagtgaatggggctgtgagcgacacttgatacacaaaggagggcggagagcagagcagccctggccgaggctagagaccaagggactgatgaagaaccagcagcagcccaggccccagggggctggatgcactgctgatggtcttgggagagcccagcgaagttatgcccaggcccagcctggcttgcggatggggctgggctggtcagtgaggatccccacagtacgggctctggaatcatcctgcctggccaaggtcatgggggcagggtcactgcaggtacttccctgtactccccaaggacaaggctgcaggaagagggatccccaggaaggagtgtaattctacgagacagtgggagtgagatcagccatcactggggccgaggttctttgaaagacaacagggctggccgggcgcagtggctcacgcctggaatcccagcactttgggaggccgaggtgggtggatcatgaggtcaggagatcgagaccatcctggccaacatggtgaaaccccgtctctactaaaaatacaaaaattagctgggcatggtggcatgcacctatagtcccagctactcaggaggctgaggcaggagaattgcttgaacccagaaggcggaggtgtgccgagatcgcgccactgcactccagcctggtgacagagcgagactccatctcagaaaaaaaaaaaaaaaggtggccctagagccccttaatcccctggggaaattgctagaacccacctatctggactgacctatcagcacaatctctgcccctcctacgggc

SEQ ID NO: 158332 - DNA, 1000 bp, Homo Sapiens
tttttttttttttttttttttttttttttttttttttttttttttttttttccttcaggggcatttatttcccggtcagaaaagaagcagggacaggcgcctctgcctgagcctggcagacacaacacgaagaccggggatggggcgggggaggcacaggagacggctctcagcaatgtgtgcacttggtcccttgtttgttcctggctgggtcagggaaggcctgccgggggtggtggcactgagagcctgggggaacaggcgccaggccagtggcccagggacggcacggacggaggcaataaatactgatggccaggcggggctcctggctgggcccaggtggggtgggtgaggctgtccatcgagggctcttgggggggtgtgggctctgggcactgcccgctgagacagaaaaggcagaggcaggacaatacccagcctcctggatggtactgaggtgacttgagttttggcaatttggctttccccaagccgccggagccatctccacagccctgtccagggaagggggcaggctggccaggcactggtgggctggggagcagcagcagcacaccccacgtgtccctgggtcactgggttcgccaccggggaagggacggggaggccacatgctcatgcagacacagggagttagaggctagtgaggccccacggtacactccacatgttaaggcatcatggttagacgggaccgacagcgacaagggggctggccagggagcagcggggctggaggacggcccggcccccacgaggccgtgcatcccacaccccagctccaccccggagcagcagacgcacacgtccaggggcaaccacggggcctggagaatggctgctccgctccctcctgaagccaggcctcgggtgtgacggggagatagaacctggggggcacagaaagggcagcagaggcctggctgcggcctctctcccccacagcacaggcagaagcagcaacgagacaggagac

SEQ ID NO: 158333 - DNA, 1000 bp, Homo Sapiens
tttttttttttttttttttttttcgttccagctaaattttatttgtcggatttttgacagacgtctaaattatacattgagttttccacatgaccaaacaccacatctcttcctttgattatcattttcaaaagggattataaaaaaagaaccttttgatggatcagactgaaccctgaaaccacatggagtgcagagctaaaaataaaaggaagtaagaactggtccccgagaaggaaaggaaagggaaatcaaagcaaactctgacgggaatggagagacgagtcctggtgagggtgacatggtgtcaccctccaggccaggccggataaggagcggccaacagtgagggtggggcgcagagtggcacaaaaatagccactactttagtccagaggggaataaagaaatttgtcaaaagcaaggagagagaagtggagacggagggagggaggaaggaagggggcaggaccatgtcctcccagcagccgtgggagctgcggactcctttaaccctggcacatttctaaccgccggcataatcgctgactttcagctgtgcaccgacatgttccccagctcagcccacatcaatgacacccttgtttccatagtaaccaagggagagtgaaggggaaagggtgtgttgcactgggtgcagggaatccagccaaaagcagccacacggggtaggtcgggaggaggggaggactcgagtttttcccacaactggcttgagcacatatcacgagcaccccccaggccttgcctgccctccggcccccagccctctcccccgcacattcagatgcaattgtgcgcagggcaaaagtctcgctaagactcactggggacaggaggaggggaaaaggggtcttccctttccagcttcaaattctgtcttctggtcagggggcaggagtgggcagggaagaggcaagagggctttaaaaagtattttgtttttaaatgggagctttcaaactctgcctttttcagg

SEQ ID NO: 158334 - DNA, 1000 bp, Homo Sapiens
tttgttctccaaatatttattgaggtcttactatatacaagactatataacaagttatgcttgttatatatgttatatatgttatgttatatatatatatgttatatatgtaatataactatattacaagttatgcttgaaataatgctgttaccaagataaagaagctccttcacccaaggaaccctggtgttaaaggcaaagattaaccaaataatcccacaagtaaactatcatggactatgtaaatgctgtgaaagaaatgtatgggaagtcgagagaggatcccacctgggggctggacagggtctcaacacagtaggtgagggttctccatgcaagagacatgtgagttgaattctgaaggatgaacaaaagtcacctatacaagggtagggttggaggaaggaaggtgaggagctgttcaagcagaggtagtagcaggagcaaagacccccaggcaggagagggtgcagtgcatctgaggacctgaaagaagagtggctgacagcagacagccaacaaatgagggggttgagatgagatgggagaaggcatggggtaaagacttttgcctaaagagaaagtgagccattggagggttctaagcaggggactgacatggcaagatttgcacttcatgatcactcgggctgctctaaagaaaatgaactagagcagagaggaagtgggagctagagggagaggcagaggacaagaggaaaaaaatcagagaatgggcctgtgcaaccctgtgttggttgagaggcagtacagtagaggggaaaagcactggctctgaaaccaaaccacccagctttgtgtcttggctttgccgcttactctacaaccttgcgctaatgacctaagttctcttggtttcctcatctctaaaataaggatatctgtctacctctcaagttatgtaagaattaaatgactaatatatatgaatagtttagaatggtgttcggcagtttggtgcacagtaacttctcat

SEQ ID NO: 158335 - DNA, 1000 bp, Homo Sapiens
ggaggcacaaacacaatttatttcaatgtaaaggacaccaaagaaacagtttaaatgttcttgaacaaacgtgttatccaaaacagcacaatatgatgatgctaagacttcaaaattaacctaatttacagtattgtcaaacatgatttcaaacttgaataaacaccacaatctaactaggtcaaacaaactaccgggttcaaataattgatatggaagtattttggtaaagtgtcccatagtgagagtttaaaagcagcccctgttttctatagaaaaagttgtgacagtgataactcatcacattctctgcaatactactcagcactcatatacactcaggggagcaataccctggacacatagcttatttcacattaagtgaacaaactcaagatttttataaagttctgactttgggccagaagataaaatgtcccagtatatacatatatacaaacgagtatatacatatatacaaacccgtaattccgaccctgcttaaatcctctagttctaagaatggctttttgacttgtctttaagtttagaaaggaaaaagtgtgcaatgcgcttgcatctgtacttgctgaattatgaaacaaatatgttaaatgagaaaaaaaccttgggatggtactaatacacttcgattatatacatgatctttgggtattcatgacaatcagtttaccatctgttgccttatgaaaaagcttaatttcctaagttacccaggaaatgtatttaaccatttacaaaaacaaaaattcttatatggcagcttagaaaatcgtggtcttatatacctgcatatttcttccataagacaggtacacattgaaaaaatattgctcaatgacataaaaatatatattatttctttcctttgccatttatgcatataaatatttcaccgaagaagatgcatcattcaataaacaaatgcaaaaactactttatataaagtgtggttctctatttagcaatataaaatata

SEQ ID NO: 158336 - DNA, 1000 bp, Homo Sapiens
tttttaaagttttgtgagagctttaatggcacaaaatgtttatagctacaagttatacatgtattgtaaactgtatataacgatacaaagtgctaactaaaatagatgaagaatgcataatcactttggctcagttaattccaataatttccacaacgggttcatgaaaaaacttatctgactggctaagtcttcaattctcatttttttagaatagtaaatatttttactgcaatcacgggaacttgttgcactttccaatgtgcaagtttgtgcagttttgctcttgattctatttacaaacatcttgagccagttttcatcaaacatatgaaaaatgaagcctgcctttttgtccccaaattgtaaacaggtgtaaagctttttaaacattaacctcacaatttcaactattaattgttgaattctcctttccaaaccacaatgttttcgttcaacacaaatctgggtgtagcagtaaaacgttcatcccatgtgttagggctacagatacatactacatgctctcataataaattctactgtgatgatgtattcacgttttaagtaattttccataatttcactgatgctttaagaaaaagggcaacactatgtttctttttaacgctgaaagaaatcataaatatacccagtttcagtggcaccactgatagaactgctgctgaacttggaaagagcacaatgcactagctgtaagaagtcactttcaggtaaagtgtaattttacttttcccccctgtaataccaattgtaatagaaattgcatactgtagcagtttagctagtcagttctcctaactttccagtctttccaattttattcaggcttttcaaaaatcagtgagccatcagatttactttcttcccaaagaaattcaaatatgaacacttgaaataaataggttatagaaggcaaatcaagtgttaccaggtttaagagtaagacagaaacatggtctaggaaaaagatgtccaa

SEQ ID NO: 158337 - DNA, 1000 bp, Homo Sapiens
gggttttttttttttttttttttttttttttttttctttggttcaccttaaaaaaaaagagagtattttattcaatttaacatataagcaaacatatgttcatttattttccttttgttgctactctcctgaactctctcactcatttgtttcagtggacaggaaacgcaccatatccccctgcctggatgggtgtttttggagaagcacaagcatatagactaaaatcctctgtttggaaaccagcccgattcaaggagggttctgatgcactgcggtgaatttttggcaatgagcgggccagcagctcaatagaggcgagaatttggggaaagagtggtctctcatctcttttctttttgaggcactctgccattaatctcttcatggcttttggacagttactccgtaccttactgagatctggagacaggtatcctcgtcccaccataaaaattatctggtccctgttgttgatgtttgaataaggtaactgtccagtcatcaattcatacagaacaattccaaatgcatatacatctgactgaaagctgtatggatttttatcttgcattctgatgacttctggtgccatccacaaaatggatccagacaactgttcaaactgatgggacccactccatcgagatttcactgtagctagaccaaaatcacctatttttactgtgaggtcttcatgaagaaatatattattactcttgaggtctctgtggatgattgacttggcgtgtaagtaatccatgccctgtgcagtctgtcgtgcaatatctataagtttgatcatctcaaatttggtctcaatgatatggagatggtgatacaagctggagccctcacaccactgggtaacaatagccagttgtggctttgtggaatagcccatgaagagtaggatattcacatgtcgtgttttcctgagtactcctacttcatttttgaaggcttgtaactgctgaggtgtaggtgctgtcacattcaa

SEQ ID NO: 158338 - DNA, 1000 bp, Homo Sapiens
tcaggtagtaaaccgttttattggaaactggttaaaaattaaggcactccaagctttatggtttccttgaggttacagttttgtggctgctcttagtgtatttcagaaaaaagcagatggacgaagaccgaccttacagacgtgggtttctacactgagcgcaagggctgactacgctgtatttcacaaccgagccctagcgccagctcagcaccctacgctcaggaagcggattttgcacgcacactactgcattcatacagagttcactgaagtctattaccaagtgtcttttatgaataaacaatacaaagtccaattttgatggctgctataaaatacttaggaatctctgcaatactttactacaaatacaaatgcccaagaggtcagggaaatcagcctgaagaactgggtacaggttctattctttgtggaaatttcagcctaggaatgttattcccggtacagatgtacacagtcaaaaaggcttatcgagctgtttgacgagttcttgaagtgttctggatcagtgatctgcctgtgaactttagttcacgctgaagacagtcttctcagttttcatgactgtgaagtgtgaaaatggaacgcatccttgatcttaggtgctgctgacctactttcccaaagcaaaatgttttaaaattcaaggcaatctggaacggggactatttccaaacttccttaggcagcacttttcagtgacttccccgcacgctgctttccctgccacgaagcgcttggtctgcttactaaagccacgtatcctgattttacagaaacgtgggcaggtccagcagtgccactggagagctcccagagaagcccactcagaaggaagtgctcagaccaccctcgagccagagcggctggaagctggactggtcccatgaggcagaaggagcaccagcgcctgctgggtggtgtggggagagccctcagctgactctggacacacctgcttccggggcacgtggcc

SEQ ID NO: 158339 - DNA, 1000 bp, Homo Sapiens
tcaagggacagctcggctgtttattaagtcagtagaaaaatgactgtacaggtttaaggtgcaggaatgaagatggggcagactgggccccagcatctgaggccccacccccatgccagagagctccagtccagagcctgaagtgtggtcagcacatgtgagctatctggatgtccaggaatatctaagtgtgctgcccccgtaggaggcactggaattccttgcccagcagctgggcctaaagagaagaggctgaggaagccaggccctagaaacggcccagcacggtggctaacagagccatgcggatgtacatgccgttctcagcctggcggaagtaggctgcgcggggatccgagtccacttccacgcttatctcgttgacacggggcatcgggtgcatcaccaccatcttcttcttggcccgggtcatgatgtggggagtgaggatgaactgaccaaagcaagcttcgtactcctgggtagagccaaatcgttccttctggattcgagtcatgtagagcacatcagtgtcaggcagcgcctcctcaatgctctcgaattcctcctgcttggtgccgcgggaggccacgaaggcccgcacagtgggtggcatgcgcaggctgggaggtgccacgtagcgcaggctgacacgatactgggtgagcaggcaggccagggaatgtactgtgcgtccgtgcttcaggtcacccaccatcgtgatcgtcatgccattgacagttcccagctcctcacggatggtgaagatgtccagcagggcctgggtggggtgctctccgaccccatccccagcattgatcactggcctccggcagtgcttggcggccagctccactgctccaggctgggggtgccggagcacgacgacgtcggcatagcagctcatggtctgcacggagtcagccagggattcgcccttctggacggacgatgtggcttccgagaagctgagcacagcacctcccagccgggccatggc

SEQ ID NO: 158340 - DNA, 1000 bp, Homo Sapiens
gagacacaaaatttaatttaatagaaattttgtttgtagttcttacattctcagtgtgagccaatctgggacccactgccccacccagaagtggcccagtcctgggggcaggggagaaagggaggggtgaaatgagaagagccccgttcttcctcagtgctggggggttggagacaccacccccttctgctgccctcctctgggctccaggaaggagagcagatgaaatctcaggcctgtggcttctccacaccactgccccccaggttggaggggagctaagagatgagagaaggggcacagaggcaagaaaagatgttgatcaagaaagatgagaaccaggggtgagggctgaaggagaatcaaaggataaaataccagtttaaaaaaaaaaaaaaaaagggcggggagggggtgggggagagtggaggaggggaacaaaaccaaaatccaccccaaatccgaaccagcctggaaaaaaatgaaagttctcgagtctcacagagacattatttggcgcggcaagctctgcggcaggagcgctcaggcctcagtccagccctggaggcaggcctctctacagctcgtccttggcctggccggggacatcttcctcctcatcttcctccttgtcctcctcatcctcctcatcctcatctttgtcctcatcatcctccttgtcctctgcctcctcctcctctttgcgtttcttgtcttcttcctcctccttaagcctctgctcctcgtcctgtttgtccttcatttgtttctctgctgcctttgttacgccccacgtctcgttgccaaactcctcagcgtatgcctcatcgttggtgatgaggaagttgtcaaagatggtgccagacttgacctgccagaggtccaggcccagcacgccaaagttatcataggcatagatactgggatcgggagaatactcggggttgtcaatttctgggtggatccaagtgcccttgtaatctgggttgtcgatctgccg

SEQ ID NO: 158341 - DNA, 1000 bp, Homo Sapiens
tttttttttttttatggtttaacaaaattgtttaataaaatttataaaaatgcatctttgagaatacttttctcagcttgaattgttttccttttccacccccaaagaaaatacacaattatcagcacccacacatgtatacactcaaaactacagtgacattctctacacagaactatattcgatatagcttgaactgccgaaaaatcaagacaattccaaaaagtgattgcagggttgatttttttctccaaaacacttgagaaacagtaaagctatttcaacaaaagtcttttctttgattgtcaaaagttgaaattcacatttaaataaaaagagatccaaatcaagatcctcactaccccctacccctcaactaaccccctttagggccacattttcttcttgctcctaagaaaaaatttggaattttgaatattctcggttttctgtgcacacctggaattgggcaaatgtgttcagctcagccagcattttctgtagacatcatcaaaagcaggcacttggggattctgggctttgagtacaaaccacggatcttgtgtcagaaacacatgttgagactcctccattccttccagaattttcagagatgaggtagacccacctcaatcatcctcagcatcagtttgctaaattgccaggctcaatgacaagctctcctgccatctccaagcccacttttcatagttccgctctgtctttggctgcagcactttaggcactattctaagtcctggagtatatcactcttgcttcagagctaaataaacattaatgaacacacttactcagaacaagtcactggatagctgcccattgcaagttacatactcaggagatgaaagagggaagccattaaaggtcttcagagtagacaatacctagtcaagatgtggccagacaaagacacaaacttcttaccctaaaagagcccaataatttctgcatcagagaactcctatcttgggcaaagcaa

SEQ ID NO: 158342 - DNA, 1000 bp, Homo Sapiens
ttttttttcaggatgaaaaaatatttaaattttattttcaatagcaatgtatgcataagaaattttgtgaatggggtaaaccactctggcataaagcaactataaaaacttgaaaaaaaatctgtacatcattttgttttgataaaacccattatccttgtattcaaatgtaaaatatgctgcaatataatccagtgattttatgaacaaggcatgtccttaaaggaatctataatttaagcaaacaactcactgtaactataatttgacacaaactaggtaaatgtgggtcatatacaacactttcaattgttgatagaatcaaacaaccatacagaaactttattgcatttagctcttcacaacagaacatatgctcatttttattatagaactaccagttatattgttgtatagccatttaagtggaaattccaataactgatttttccaatagcaatgaagctgctacatattattttgttctgtacaaaccaaaactatctccaaacaactaaaactgtgtaacttctaatggtattaatctcttagatccgatatgtaatgtgccacttttattctaaattcaaagatgaggtaacttcaaagttgcttctttttcctcggaaatgaaggactaaaataaatgtctgaaagaatataatgttgctagatattagaaacaggatgtgcagactgattaaagttcaggtctggcatgctgatttttacaatgccaaacatcctctcgggaattaaaaatatttcaatctagtttagtcctttcgtactcttcttttgcgtactgactttatcggcccatctccagatcctgtgctctcatctgcttctttcatctcatcctctgacccagacttatttgattgattactttcttcttgcccttctatgatttcaatttcttcttcactcttttcctcaggttcactttcctcttctttttcaagcatttcaccatcattttgctttttttcctctt

SEQ ID NO: 158343 - DNA, 1000 bp, Homo Sapiens
tttttctgttatacaaagagcagatttttattgaacttgtgcaataactatattaccatacaatataaatattcatgaatagtttcccaagtctggagcgaccacatagggagaaaatgtaaatgtctcaatttttgttcacaaaagtatattttatcaaattgctgtaagagtggatagcttaaaagaaaaaaagtttcctgaaatctgggaaacaagacatttaaagaatcagcaatcctcattagttcatttagtcccatgaaattaattattttctctgcttgatcttggtggacagtttcatgaagctgtcagttagttcattaaagttttggaaattctcagacagtgcagtggtatcagaaacttgtattcaagagtacaggtcagagtcttcttttcttttctttttgagatggagtcttgctctgttgccagactggagtgcagtggtgcgatctgggctcactgcaatctccacctcccgggttcaagcgattctcctgcctcagcctcccgagtaactgggactacaggtgcgcgccaccaagcccagctcatttttgtatttttagtagagatggggtttcacgatgttggctaggatggtctcgatctctggtcagagtcttttctgtaaatatccttggtaaagaagcaattttagactgtagctgttgcaaatgctttaaggaagaagcaaaacaactgtcagtcttcctgaaatgaagaaactacaccagggctgctatatcagagcaaccccaaccagcactccaatcatgatgccgacagtggccccagctgagagaccaggagaagttccagatgcagagactgtgatgctcttgactatggaattattgcggccagtagccaagttagagacaaaacaggcataggtcccgttattatttggcgtgattttggcgataaagagaacttgtgtgtgttgctgcggtatcccattgatacgccaagaatactgcggggatgg

SEQ ID NO: 158344 - DNA, 1000 bp, Homo Sapiens
cctgctcccagccccagtgatgcgttggcgggaggccacctcccttcccgaccaggagccagggcctctgggggacaagccttgtgggcagcccaggccggaggggctggggaaagctgagggcaaaggagaacccccctcacctcattggtcccccaggatcaaaagtaatcccaaaaccaaaaggaaagggagtctcagacccttcccccagctgccgacggagagtctcattttggcaagtatccgagcaaaaccaaaacaaaacaaaaaccaaataaaatggtggtttagcagagacgcgcacattcacattgcacaaggcactgctggggcacagaggccagatacaagtgttgatatcggctgataaagcaaaatatttggaaagcttgtcataactccggtccctctgggatggactgatcgtgcttcgtgttcctaggcaatgctgaaggcatacagtacaaacaaggctgagggtcccagtggcccttcaccccccatgcccgccccacagccagatctctaggtctccctctcccaccaggggtatacatcctcagagctgacccacgacctagctttctggtgtgactcggggtgggggctcccactggtcacctggtgacccccatcgcagtgagttccgccccaaggggaagcccagcctatagcaggctggggtggggtgtgtgcggagggaggtgggagaggcgtggaactagagaccctccaccttcatgtagaactaggggaacaaccttaggttccaagccccaagtccctatgtttccacccctttctaaggacaggcgtggaggagcggctggggctggcgggcttgtcgggatctcagctccctgagccctcctcctgccacgggcctgctcccctccttctctcatgggggtctgctgtagcctcgggaaggaggcaggaaacctccaaataaaatgacaaggcacgatttgctccccctactcagtaggcattggag

SEQ ID NO: 158345 - DNA, 997 bp, Homo Sapiens
ttttttttttttttttttaaaattctaataaaataaatattttattaacgaaagtctggaaaatgtgtgcactaaaaagtgactataaatgttaaattaaaaaaccttcaaagaacacatatcacacattcaatttttaaaactttatataaaagctctattataaatacaaagctaaactatctgagtactaacaacacagttcatacaaagaaacttaacagtagtaaaatacagatatataagatgcttatttttggtcctttaggataaaagaactaagttggtttttttcacatggctccaggcacaaaaatagaatataagatggtaactgcaacattcttagtgtttatccttgtaattctttaaatgtcaccagtcataatagcaatgaactcctcttggtttatttctccatcaccatctttgtcaaattcttctatcatagctcgaagttcttcatcactcatgttttcacccaattctctagcaacacgtcgcaaattcctcaagcttattttacctgaatcatcatcatcaaatagtttaaatgccttgagtatttcttcatggggatctctttccaatatccagtctgtcacaacttcattaaaatcttcaaaggtgattttccctgtggcttctctgtcataatctttaagaatcttcagtacatcagctttttttacatcaaaccccaaggctctcattgccacctttaattcatgataatctattgcttcatctttgtctgtatcaaatagttcaaaagcatctttaatttcttgtttctgttcctcagacagttctcttctttttttcctctttgttttgtccactacaagctcacttctcagagctaaactcattatctcttcgcacagagacgttcctctcaagaacgattttaaccccctacccaaggcagcaagacgcccacagccgttcaacagacacgaacgacctcagcggcctcagggacctcccacaacat

SEQ ID NO: 158346 - DNA, 1000 bp, Homo Sapiens
tttttttttttttttttttttcttcgtacaaacagaggttttattgcgtttggtccacagtcgtatttcacattatctcacggagcagggcccctgggtggggggtccctgtgcagtacttggcggggcatgtggccggggaagatggagcagtataagctggtcgggcccagaagggaggagggctggggactccttaaaacctactgagggcctgggcacggtggctcacacctgtaatctcagcgcttggggaggcggaggcgggcggatcacacctgaggccaggagttcgagaccagcctggccaacatggggaaaccccatctctactaaaaatacaaaaattagccgggcgtggtggagcacctgcagtcctagctactcaggaggctgaggctggagaatcgcttgagcccggaaggtggaggtgcagtgagccaagatggcgccactgcactccagcctgggcaacaaccacaactgaaaaaaaaatctactgaggccagagtgagttggggcggggagcatggagagggggtcaggcttagccccaacaactcagaatttcacttccttgtacggccctcactttctccacctggccccggggcaggtctgagggtctgaagtctgttgatctgaaggtcctaggcaaatccagtcacttgggagccggagatatttaacatcacggcccggtcccctttcccaggggactcatttcctagcactctctccactgtccttgccccacccctgggggaaaaaatgtatttttcttttgtgaatacttcctgaaacttgcgggcatagaaaccacaaactgctcagctgacaaaagggggaagaggcgaggcaagcagaaaccgtcggggaccggttccttccaagcccaggtctcttcttcccagcacagcctgaatgtgccagcagggaccctcgccctacacgtattgggatatggccttgaccccttcccccacagcccagtggctca

SEQ ID NO: 158347 - DNA, 1000 bp, Homo Sapiens
ttttttttttttttttttaactttcaatatactttattaaaaagtttctttgtataaatttcctaaacattttaaaattaaaattaaatcccctccctccagcacacacaaaaaaaaaacacacaacattagaggaatgccaaaaatattctctattacaacttttttaaattctttaattaaggcattggtcccaacggtgcacatagattaagggattttgcttccttctgaactagatcatttgttagaggcttcagaaaaagaaaattagcttgaaatctagtctgggaaattgggggcagggaatgaaaaagttggtctcttgtttctccacgatacacaggcttcccatctaaagtcatgcttaactaaaagggaaaaaaaatgaaccaagcaaaagtatatagagtagccgtgacatttgcattattttctagactttacatttgcctgcaacaggcataacatgaaactccagagggaatttggattgataggaatgttcacataaacaccagcagtggctaactgttacacaacattcaaagtattcgagagaactgcctggagacagagagcgagggtccacagacacattagcaccatactgataggtcatgcagcaggatgttccctcccgagttcgagtgtaaatcaaagcatgaaatgatacagtgcaagggaatctacacccggagcttctacagagacaagttggcgatggctgactccttcttcttcaagaggtatatgatgttggccacccacgcttaggttcccatcacactgatgactccgggtttggcgagcacaggagcgcaaaccttttcacattctttctgtgatccaaatttgttttcgtttccaccacaacctccataccagaatcttgcacagcttttggtgtttggatcatagtaccattttaatatgaaatccctgcaagttccttcgtctttcggcaacttgcatatatctgtttcagtgagagccaatg

SEQ ID NO: 158348 - DNA, 1000 bp, Homo Sapiens
cgctttttttttttttttttcaagaagctctcatagagatttatttagtgtgagaaatatgagaacaatagttgtaaagaacaaatcaataacccgcagtgtgcattttggaaaaccaaataacttcttcaaatttctgagtacacagagggtacctgccttgaaatttaaatgtctaaggaaaatgggagatgattaagagttggtgtggcctagtcacaccaaaatgtatttattacatcctgctcctttctagttgacaggaaagaaagctgctgtggggaaaggagggataaatactgaagggatttactaaacaaatgtccatcacagagttttccttttttttttttttttttttttttttttttttttgagacagagtcttgctctgtcacccaggctggaatgaagtggtatgatctcagttgaatgcaacctccacctcctaggttcaagcgattctcatgcctcagcctcctgagcagctgggactataggcgcatgctaccatgccaggctaatttttatatttttattagagacggggtgttgccatgttggccaggcaggtctcgaactcctggcctcagatgatctgcccaccgtagcctcccaaagtgctgggattacaggtatgagccactccacccagcccagagttttcatttgttccttaaaataattaagctggaaaggcaaggacaattatgagcacaactgtagtcaagttgagaagacctcaaaaaagtcaagtttagaccttcggattttccatagaagagaaaaagatactaggttttagggtacagagagccagatctgaagagtagctgcagggggaaggtgctgttagaaggaggatatagacacattctctggggggaacatatggtgactgacccatgcacacaaagggggccttagcgaaactgcagaggactgatccttaaaccaatcacatctttgccaatctctgtcactgtggtgaccctgcaga

SEQ ID NO: 158349 - DNA, 1000 bp, Homo Sapiens
ttttttttttttttttttttttttttttttttttttttttttttttttttttttttttagaaagaaaagaggtttatttggctcactgttctgcatagaactgtataggaagcatggcgctggcatctgcttctggtgagggcctcacgaagcttacaatcatggcagaaggtgaaggggagccagtgtgtcacatggtgagagagagcaagcgagagaggaggaagttccaggctcttttaaacaaccagctcttgcataaacaaccagagtgagaactcactcattactatggggatggcacaaagtcatacataagggatccgcccccatgacccaaatacctcctactaggcccacctctaacactgaatgtcacactttgaacatgagatttggaggggacaaaacatccaaaccatatcaccacctgagaatggtacactacaggtcacagaaacttacagagtactggagttgaaagagaactgagatcacctagttcagagactaacgggaaacgttaggtcatttatggctctcagacacgttaagcctgcataacattttttaaaatcttgaaattagttcccaacacttaattgagagctttcacagaaaaatctagatatgtggcttatttttaaaaaacagaagatttgctgacttaaacactgcaaaattaaacatttatatctgaatccagcatctctttttgctttgtaaatgaggtcaaggatgaaatccagatgttcttcctttgtatttgtattgtcactgtatggaatctaggtatatccaaggaaaaataaacttaagataagcttattttccttatttcaaaaagcaaaacaaaaacccagaagatctaacaaccctggacctgtagagtggcagcaacagaccagaactcagcagtatagtccgagctggggcacctgctcgccagtgttactgtctccatcagcctgaccccagtgagcatttgatttggtctacc

SEQ ID NO: 158350 - DNA, 1000 bp, Homo Sapiens
tgaaggttctgaggcaagtatttattccaagcaaacacgtgggcgtggacagctatctcagagcctacgtcactcagcagagtcacacatttcaaagcaggtcacacaagtccctcatgaacagtcttccagcttcagcccttctcttgccacctctgtggtctgagctgggggagggggagggcctccgagttcccaaacaaaacacaggtacctaagggctgagagaaaattacacagccttatttttattagtatctatcaagaaaaaaaaaaatcaaaattcccttcctgctccaaccccacctccaccacctgggccctcagggagcagcatctgcccagcgaggacctgctgccggagctgtccttggagcctgggcacctgtgcacggccacccctcatgcctgtgagctgccacaggtcccttcctccacagtgtggggacgaaagggcagctggcatttctccaaccttcagctgtaggccttgggaacttggaaaagatcagcaatgtccagcagggctttgcggatgtggtttccaaagcgctgggcgttcgtctctgagcttgagaacttgctggagatgtggaagaagatcgtgttctcgcctgcaatcatgtaggaaactccatagccatcatctgctacagggccaaagccacctccagcgcccaggtgattggggtgctgctctgggtcgaacatgcggatctgggattgggggatctggctggtggagagacgccagggttccgagagcacctcagcaaggaaaggagagctgactcctaggtacttggagaccaagtaaaggcagaagaggtgcctgtcgatccctgccccggtcatggccaggcggtacatattctggtgcttcttagcagccttctggaagagatctcgcaggtctgcttttgtgtgggacccctccatcatggcctgcacaaaggctgtggactcgctggtacaggaacgcacagtctcagtccgtccc

SEQ ID NO: 158351 - DNA, 1000 bp, Homo Sapiens
tttttttttttttttattttttgagatggagtcgcccaggctggagtgcaatggtgctatctcggctcactgcaaccctctgcctcctgggttcaagcaattctgctgcctcaacctcctgagtagctgggattacaggcgccagccaccacgcctggctaatttttgtatttttagtagagatggggtttcaccatgatggccaggctggtcttgaactcttgaccacaggtgatccacccaccttggcctcccaaagtgctgggattacaggcgtgagccactgcgcccggctccaaatgagaaattataacctaacattatgtcagtttccaatttttaaaatccaccttagtcttttttttttttttaagagtaactgttagatttatcgagcttagtgaataaaatgagtaacaattaaaagtggtattgaaaacaatgtatgatatacacaaatacagactgttttaatcaggaattaaaattataaaatgacaaaggctatacagcatattggaaagctaaagcagaactaataactactctttttacaagagaacaaaaaaatgttttgtaagaatgacaatccaaatattgcagtacagcagtcattcaaatatgtctgaaaataactttccttgtgcacatctaacactgtactttttatatccttacaacttctttcatttaaaaaattcactagagattctctgttaaattgttaatatggaaaatatttaaaatcagtatttttctacatgtaacatttcataaacaaatatatatcactttgctttatttgacatcttgaaggctttcttggtggtggtatgtaagtgcaatgggcaacagtaaattagaaatatctttttacgtaaatgagtgacaatataaatatttttgaaggtgaggacaataacatttatttaaaaatcttgttatataactcaagggattggtttactgatcagcattttactaagaatttagtactaac

SEQ ID NO: 158352 - DNA, 1000 bp, Homo Sapiens
ttttttcctcatggcgtggtttattacgattccatctcacaaggcgggtgggcgggtggcagcggcacacgaaatccaagcccctgacagacgtctgcctcgggcgcatgcaaacagtgcaacatggtcaagcgcaaacacggggcgaccgaggagacacgggacatgggacacagaatggggaatgaggctggggcgaggggtccctagagaggggcccggtcccccccacctcacgggcaggacaggaaaaataagattcgtacttcttgtaaaatgcccatttgctgggtactttctttctccttatcttgaaaaataataaaaaataaacacacggaaaaaaaatctcaaaaaaggaaaggaataaaactctaagaaggcgagtggcgggaggccagggaagcccgacgtggtggggcgctgccgcccgctccgtggcctccttcctccctggcccctcagtgggctccccaggccccacaggtgggtccaagagagacggggccggaggggtgcaggctgggacgcaggaaaaaggcccgccagcccgctggggctcagttcaggctcgggcccagtgagcaggggcaccaggtccatgatcttccaggttcagtccccacaggcccatgacccaggcggaggccagccgtcacaggtgcagctcgtgggttttgatgtgctcaagctgctctcggagctgtaggaaggagggccgcatggcggcgtccaggtgccagcagttcttcatgacttcatagactgcgggcgggcagccgtcgggggcatccatcttgtagcccttctccacccgagggacgacgtccttcaggggaattcttggataaggcactcgcccaaaggagtagatttcccagagaaggattccgaaactccacacgtcagacttagtggagaatttcttctctctcagggcctcaggggctgtccacttgactggcagcttgcccgtgtcctgggtgctggacgcctcctt

SEQ ID NO: 158353 - DNA, 1000 bp, Homo Sapiens
tttaaaaaaactacttttatttttttttatttctttttcagttacatacttttaaacagggatgtgtttcattattcagacattcaggcaatgttgacttcattagtgttgacagaaaataagcataaaaatgcaaaacattgttggcttaacctgaacatacctgcattacctattattgaccagtttgtgttgccaaaagacttattcctcggcattaaaatggagcacttaaaaatattgctaaaaagcaaatgcctacacactggtctttgcagcaaataagggtatttatacttttaaaatattttaagtccataattggattaatatacacaccttcttatgtataaggagttcagatcatataaacactgtacaatccaaaaaaccctactgagaataaaactaaataggcttatgataagaaatacagatattcgcatgtatttacaaatatcatagacacacaagtttggtcaaatactgtaaagaaagaagaagtggtttcacattataatggccaaaatgtttatctaccttgctcaaagcaaataaaaatataaactcagtatgtaactcctgcagtttaagacatcatgacagtatacagatagatagaaactgttgaccaaattatacagcaaatgttttgtaggttaagtgtaggtctttaaaataaaaaaaagatcattcataggattcatagcaacaatgataaacaatgtcctgatttgtggtgttcatgtgggtgcctaattcatcaaaaaaaaatgcattaaacttttggctaataagaaaaataaattacaaagtacaattaaatccctgtaaatgcaataatgaagtaaaaaaatgtagctttactttaatatacatcttaaatgttaccttgagacaataaaaataaataagcatgcctggaggcacacacttaaagacaacgaagagactgcatgggaggaataagtaacaattatataaatgaaagatgaatatg

SEQ ID NO: 158354 - DNA, 1000 bp, Homo Sapiens
cctggttacagaaaagtcctccattcaggcctttcttgtaagtgaagaaaaaggaatgcagcaaagaagagttcgacattggagtccttagttccatcaggatcccattcgcagcctttagcatcatgtagaagcaaactgcacctatggctgagataggtgcaatgacctacaagattttgtgttttctagctgtccaggaaaagccatcttcagtcttgctgacagtcaaagagcaagtgaaaccatttccagcctaaactacataaaagcagccgaaccaatgattaaagacctctaaggctccataatcatcattaaatatgcccaaactcattgtgactttttattttatatacaggattaaaatcaacattaaatcatcttatttacatggccatcggtgctgaaattgagcattttaaatagtacagtaggctggtatacattaggaaatggactgcactggaggcaaatagaaaactaaagaaattagataggctggaaatgcttactttctgctctcattttctttcattttgtctgctgtctttttgaatgccaatactttcatttaaaatgttttgggagcacggcaacccaaaatgactgaacggtggtccaaaaatccaaaccaactgataattacttctcgaggtgataggaaaggcacaggaagttaggactttggctgaaatgatgaaaacacatgttcgccattttagggatcagcgcctcgactcctgccacctccggctccaacgatgatcatgtttggatgtatttattgaattgtcctttgctgatgaggaatttttaaagtatttcatagaataagtcctttggtatgcagatgggttcatgcaggtaattttaggtatagcccatcttccatttcctaagcaccggatagttggaaggtgacgttgaatgaaaccatctttgcagtggtatctaatcagggagttgatttcataacgaggtttcatctttccaaagg

SEQ ID NO: 158355 - DNA, 1000 bp, Homo Sapiens
ggatctggatttctttattaacagacatgagcacgacccgttacagaagtttgtgctttccaaaaaaaaaaaaaaaaaaaaaaaaacagttactaaacgtgaaaaaggaacccaagcaaagaggaaggagttggggaggggccaccaaagcccctgggccccatccatagccctgacctgaaccgcgcctagggcctccaacctgggacctgcccggcaggagacggggggtagccgaggggccccagctgggcctgctacttcctttgggccagacaggaaggggtcaaaagaagggcggggagggggtcccagggagccagagcccacgagccatttattgccatgttttaaaattcgtgcaaaatatctgaagccctggacagagaatacaaagtgatattttcccaagaaacataaaactaggaaaagaggtgggggacattttcccaccagagctccccccacgccaggccccaagcagggtgaggcctccaacccggccagctgagcagggaggactaagagctacaatctggaccagggaaggaggggtggaatttgcaacagcgtctcaactaccaacgagaggaaagccagtcaactgtacaagtctcctatcaactttttaaaaaaagagaaaagctgtaaaagtcaggccctgtgggtagggaagcggccaagtccccagccagggccggaatccggagtgggtgccaggcggagctgctgcgaatgcaggcacggcgggccgtctggccagaggctgatgcaggtgggcggccttggcaagggtagcctagggctggcgccaccgctaatcaccaccctcgaagccctcctcctcttctggaactgggtctgcatcccagcatgtgatgtcgatctctggaggcttgttgtagaacacaggaggcggagccttggcacagagctcttccgattgggcaaactcctcctcctgtgattgactgaagtacccctcactggcctgggtccc

SEQ ID NO: 158356 - DNA, 1000 bp, Homo Sapiens
ttttttttttcagtcttcaaatattttttattggaaggccatgcattgccttcattattgtatttcaaatcactgtacatttacttttgtgaaaacactgcctgcattttctagtacaaaaaaaacctaaaaattgtttcaggaatgtagagaaatatccaacttaaatagcgaaaaagtgcaccataattactgctgcactgcagtcatttctgcaattcccatgtttcttaaataactatcttgtcagataacacacaatataaagagcaattatgaaaaacagacatttacatatacttctaaagtcttattgggaatatcctgttggcattggataaccaatcataggtgcagctgcagtagcaggatatgcatatgcctgttggttcataccattgtgcatatttggaacattacttccgtattgctgagtgctatcataaccattctggtaagtccctgttggattaccagtcctaaaactggtctgtataccagcagacacaaaattacttccaaagctcccattggtgtaatttgcagcactgtaaacaccattctgagtttttgccccaaaatctcttttaagcaggctagagtaacctctgtcataattttccctgtctctaaaggtattaaatccaccccttttgcccgcagagtatctgtcccgacggtcatccttcatgcctcctctacccctggaacgacctgaacctctgtcttcgaccaactgaagcaacttgggattaattgcttgattagcttcacgaagcacagagataaggtcgctcacttgctttatgttattaggtgtaaagaaagtgtatgctgtgcctgttttggtactgcgagcagttcttccaattcgatgaatataatcctctgaggagttagggtagtcataattgatgacaaatttcacatcttccacatctagccctctggaggccacatctgtagcaatcagaataggagcttttccatgtttgaattc

SEQ ID NO: 158357 - DNA, 1000 bp, Homo Sapiens
tttttttttttttttataggaaatatgtttattattgatcatctcaattcaaaaatactcattctttctcagggctggtccatcatagtctctttgaaaatattaaatacgtcgaaatcatgagcaattttaacagcaacagaaacttctgtacagtaagcaagacagggatttctaacaatgacacaagagctccagaacttgccagtaagacaaaggcagtgtttccaatgacaaggcgtaggaacccatggataaaaatctaacagaacacatgctggaaaacggggtcaggaaatggtatcatccaccctcgatctgagtatgctcagtgatggcacaaagcatgtcctgtgagagggacttggagatacgatcgcttctatccagaaatgtgccctttgggaatggggcatatggtacctaagtgcccccaaatcaactgtttttcaacttcttgcctacgcagtcataaccaaggtttcaaggagaaggcaggcgcaggaagtatttagctttgacttcttagcagatgtaacaccagctcttcatcctctgctaaagacaggccggtatccaaaggctctaaagtgtcccacctggccttctttctgttatgacttgttggtcccacgtcttccacttcactgttgctcctcttcttcatcccctgcttcttcttggtatcacttattttattttccatatcttcactatctgaatcttcagagcttctgtatttatctggatctgggagtgtgcttggatcaaatccatcatcatcatcatcatcatcatcactccaatccagaaaggcttcctcttcatctttggcctttgcttgtctcttgttggcttctcttctggcttccctttctttcagtcttttctcccgatgctttgccttaatttttttcctatattcttctttgtcaaatttgtcctcttcctgaagtctttcctttgctttatgtaagttgataccacctgtgtcatcatc

SEQ ID NO: 158358 - DNA, 1000 bp, Homo Sapiens
ttttaatatctaaacaatagtgctttattgataaaaggttagtttaaatggatacaaaattgctgtgtaaaataagtgttttcaaaatacatttctataggtagagactatgtcttagtaaaagagcagttatctattatcaaaagtatctatttagatttgggtagtaaaaccaaaggggatcagaagtgtagcagtgtgggtcctccctccctgcatagctgttaccaggaggcagcgtgcctgaagtactttcactcacatatgcggggcttagtcactagcaaacttgtttttcttttttacagattttccagcaaagttattaaatgtcaaactcaaataatggactccgcatggatgtactctgaagtcatggaacaccacttcttagttaccttcacacaataagccataacatatagcttttggctgttcacaattaagcaacagtgaagggcaaagttagcaagaacaccagattattttctgtagcacaccttcattaactattattatttaactgcctcattttatgttttttctagcccccacaaaaatgaaaaaaccctgtctcatcctcagattaagcattttctccatctccctacacaaccattgtctcctttcatctgtcaatttctggggttgaatttcccaacttcagtagaaatgataaaaaaggcaaccgctggagtgtaccataaggagacacaagaagaaaggtgacactaaggctacagtgcacagaaaacagaccaggtgtggcttcgactgtgcggacctgcccactagcctatgctacagatttgaaatgtctttcactttgacatgacacacggtttatattacacaaaatgaatgaaacgacaatggctaaaaataaatgagacagcctgcacacaaaaagatgatgactgctactttcctcccatcagaaaattactcaaaaagggagtatttaaaggaaactcaaatcaggagaacccggtaggcatca

SEQ ID NO: 158359 - DNA, 1000 bp, Homo Sapiens
tttttttttttttttttttttttttttttgggcagatggagggccttttattcgcgagggtcgggggtgggggtcctaggtggggacagacaataaataccgaggaatgtcggggtctcagtgcatccaaaacgtggattggggttgttgggggtcctgtagcctgtcagcgagtcggaggacgaggtcaataaatatccaaaccgccgaagcgggcggagccggctggggctccgagagcagcgcaagtgaggaggggggcgcgggatccccgaaaaagcgggtttggcaaaagcaaatttcccgagtaagcaggcagagatcgcgccagacgctccccagagcagggcgtcatgcacaagaaagctttgcactttgcgaaccaacgataggtgggggtgcgtggaggatggaacacggacggcccggcttgctgccttcccaggcctgcagtttgcccatccacgtcagggcctcagcctggccgaaagaaagaaatggtctgtgatccccccagcagcagcagcagcattcccggctacaaggacccttcgagccccgttcgccggccgcggacccggcccctccctccccggccgctagggggcgggcccggatcacaggactggagctgggcggagacccacgctcggagcggttgtgaactggcaggcggtgggcgcggcttctgtgccgtgccccgggcactcagtcttccaacggggccccggagtcgaagacagttctagggttcagggagcgcgggcggctcctgggcggcgccagactgcggtgagttggccggcgtgggccaccaacccaatgcagcccagggcggcggcacgagacagaacaacggcgaacaggagcagggaaagcgcctccgataggccaggcctagggaccctggcagggagcagcaggtggcggcggtgcatggggcctggccccaccagcgggcactggcccacagccacggccggggggccatctagatggg

SEQ ID NO: 158360 - DNA, 1000 bp, Homo Sapiens
ttttttttttttttttttcccataaaattaaacgctttttagtgtttaaaataagcagcatttacacagaagcagctctatgttaaccatctaaacgctgggactttgatacagtatctacagcacagacacgtgggggccagagaagccaggaaggccgcgatgtgtgcgcgcagtgtgtgcactcaccaaggacgggccacctgactgcccatctccccaagacctccctccctgtggcagctgtgcacatcggggccccttgaccctgcgggccatggtccctccctgccctggctgggacacggtgggcaggatgtccagccctctctcgtcttccggtcccgtcctccacgtactttcagactgttgccggatgggaggagagaaggtgcaggctgctccaaggggcagcagcaggtgggacagatgacagggtcgcctcctcccccgagtcaccggccaggcaataaataaataaattagatccctactccagacagggggcctgtgcaccgcagggggttgccccgcatggaccaccctgggggcctgggcacagctgtgcaggaggtgggggtcagccgagagcccgagggggtcttcctcatcccaggagggatccccaccagacacaaggggttgggaggtccgaggctctcgctgaggggcagagagggagcgcccccaacacggctgctcagacacaggtgctgtcaggagctggagcagccaggctgccagggcagatggtggtggtccagcctgccccccaccctgcctcccgtcctggcccccacgaaggcaagcccacgcgagctctgcatgcggcaggaccgccagctccccacctcaggcagggctggggcatgcgccacgagtcacatgatgtccacgaagaactcgcaggggttccccatagccttctggaaggactggcggctgcctgtcaattccggggggacggcagccagctcccggacagggggtcccccgggtg

SEQ ID NO: 158361 - DNA, 1000 bp, Homo Sapiens
ttttttttttttttttttttttttttttttgagtttgcctctattgctttatttggtgttttatacaagtgactaaaataaatagagtaacaaaggcagctacatggcccaaatctcccagcttcctcaggctgctgtctaggatgcctaaccccggggtaccgctgaccacccccaaccctgcaaagggcagggctgtgggtaactggaggaggaggtcacattctggggttagaaggggcccaatggatgggaattcttcatataaaagaggaaatgcctattaaaaaagtcccaaaaatgtaagaaactctattttaacccccaaaaaggcttataaaaaaacaaagctaaaaataatcaaaggtcccttgtctacccctgagggaagggggaggaaccaggcactgctggtgagagtcacagtggccacaatctcctgtatggcagcagctggtaggctgagcccaggcactgtaagagcaagcacatgacggccaggacacccagtcacacaccaggagcgcccggcccagcctggccccacagtgggctacataacatccacaaagaactcgctgggattgcccatggccatgtggaagctttggcggctggctgtcagttctgggggcacagagcccaggtctctgactggaggggcccccggaggctgcactgctggagggactggaggtggaggtgggggcatcatgaccaccatcatggggttgtaggggagggccatgccagggggcggtccatagggatggagccctgggtgggctcggagattaggggcacccccagttgagcctctggatggaggagggcccccatcgctagtcccacttgcttccccaccccgccgaaggctgccccctcggctggagggctcagactcactgccactgccggacttggactcgggggcccgctcctcgggcctccccgtgcgccctgcccccccatcactccgtgtcgacccactgctccggct

SEQ ID NO: 158362 - DNA, 1000 bp, Homo Sapiens
taaatcctcacaacaaccctgtgaggtaggtattattatcatcattttacatacgagggaactgaggctcagagaggttaaataactctatcacacaaccaaaaatagtagagctggaattcaaacccaaaaccacctaactccaaatcccatgctccaatgaattaaagtagagaggggagagggagggccaaattcaagacagagtgttggagtgaaatggatatgatatgctgataagatatgggaagaaggaatgtaagctcataaatgtttctagctggtgagcctatgtagattgtgatgaagtaaccaggagaggaattcaggaggaacatacttggttgggcagatgagttgagtctatacggaactgtccatagagatgtccagtaggtaataccaatacagatctaaagtctgggggaagttgggggttggagctatgtatttgggaatcaccagcatatcagcagcaattgaggacatcaggatgaatgactccattttgggagtaaatagaaaggaaagagaagtgaatcaaagatggaacgatggaagcactgatactgacaggcatgagcaatcgttgagaaattctcaagagagtcggacaagacagagtcagagagagaagtacatgaaacagccctgtagtggtggctagaagccatggactgggttgggaacaattctagagctcccagaaggcaggcaagattgagtcacacttccaacaaagccctctgcacaccaaaaccccaggaagtattgtttttctttgttagtttgcttttgagacagaatctcactctgtcacccaggctggagtgcgatctcaactcactgcaacctccgcttgcttcctggattcaagcgattcttgtgcctcagcctcctgagtagctgagattacaggcaggtgccaaaacacccatctaatttttgtatttttagtagagacagggttttgctatgttggccaggctggtctcgaact

SEQ ID NO: 158363 - DNA, 1000 bp, Homo Sapiens
ttttttttttttttttttttttttttttttttgagacactggatttctttaattaaaaaaaaaatgccaagaaacattatttatacagggttgattgctttcatgttgttattctgtaccctatagtagcctccatgagaatctggtatttcttgctgcttggaactactttgcagtgattacttggttgcagtccaagtactctcgtttagtctgagcctggagatgttctagacttgcttctcccacctctgagattaggacaggaaaaatgtgaaatttcccaattacaggattatacggtaccatcacatcatttgtggaaattggggtgactgtatagctgggattgggctaaggactgtggtcttatctgtccacatacagccaaaatgcctatccagaaatccagttcgttggaaaggaaaattggtactcctgtgccacaggggttccagaaaagggaagtcactttaccttgcggtggtgggatcctgatgtctttcatccatttgtagtaaaagctggtaaagcttttcttactcctggttccctaccagtatttctaaacatgtcgcactttctccacaggcatgtggttttgacctttttttcaatcttctagaaagggaacggaagcagaagtgggacatcgagggctctgctgtcctctgcgctgggtgtggaatgctgctgcacctgtcccttctgctggctcagggaagtgtcttcttgcccacatttctgtggggaaaggtttttaatcctctgatgcttccatcttcctgtttaggccatgtgcccagaaacctggactgatctttctttaatagtgaacccctgggccactgaagagtaacatggctccactggacacaaaagagggatggaatcaacaggcagggggccttttataagccttaggaaaagaaaatgaaactatttcatctttggacttttcaatactattggagtgatttttttctttctaaacagggaa

SEQ ID NO: 158364 - DNA, 1000 bp, Homo Sapiens
tgttttttttttttttttttttctttttttttttttttttttttttttttagaaaaagcccagaaggcactttattggaggtctctgcctccattcacaggagaaaggagctgggagccccatcctaagggtcccagcatcagcccactggagggcctggaacagtccagcactctgtgggagaggagtggggaggggaatgttttagaaaaaatagatctctatgtacatctgacgtatttatatagcacataaattagggagtgctctgacccctgcccgtggagcccaagcactgagcagggaggtgaacgccagtccagaaagaaggtgctggagcccctgctctgtcctctccatcacggtgctcccctagggcctccccaggcctccttggctcagtccaggtgtctgcaggaggaaggtgttgtctgcatttagtgtctgagactgggtttgaggaggcaccagataaaaggagatacacttgcagctataaagtcagcttcaaaccccagggcttgtaattccaagaggagggtggggaggcgaggccatagtctccgagtcccaggacgatggctgacaatacaccaaaacatcagcttctctccacagcacagctgggagcattccccagtggaggggccatctggcctgcccgtcctcccaggaaggtttgcaggcctcgagtggtccgtgagtttggtcccgggtatagttccaaccctcagttccgactctggagaacctcttcctccttccagccgcttgagtttttgccaaacttgtagacgagtcgccggccatccacccgttccaggatctcccgtttgtagtagtacctcatggcccggctcagcttctcgtaggtcatgttgctgttctttttcttttggccccatagttgggccacagcctcggagcgcaggaacttgaagacgccttcatgccgattctcccacttcatgaggccctcgttgagctccgggtggatgag

SEQ ID NO: 158365 - DNA, 1000 bp, Homo Sapiens
tccaaaaatcaccacctttaatactccccggcctgcacacacccacagtctcactgggctccaccctcacttactgcccgccgtgatggccttgaggctgcctgcccgcgccaggatgtttggcacaaagagcagccccgaagcccgctcaatgctctcgatgggcaccaggaagcgctccagtgggatggcctcatccacaggtgcgttgggcatcacgtaggtgcggagctcaatttgcccacctgctgcctccaggatcagcaccttgaagaagtgtgtgggcactgccacgtggttcttgccgatgacctggtactttacgtaggatttcccatcagcctctgtcctgggcaggaagagtggccctgtgcagacatagacgttttggtagctgcgggtcaagctgcggctatatttctccaggttgttccaggcattctggttgaggtggggcacctggggcgcgacgttgctcaggtagaacgtgtcgtccatggccttctggctccagcggtggttggcggcggcggccaggtgaccgcggtcgaagccactgccgcggtagtcggcgttggtggcacggtggtacgcgtgcaccgagtcgtcctcgcggaagtcgcactcgcgccggtcgccgtcgccgcggagacgctcgggtcgcagctgctccaccacccagagcgcgccgcgggtgcgcgggtcgtagcacagcacgtacgactcgcggctcttgagctgcgccagccccggcagcccgtacttggccagctcgcccgggccgcggggtcccccgggcacagggggcaactcggctgccgccgccacgggcagcacgggcagccggcccagcagtcccggcgccgcccgcgcgtcctcccgccgccgccgccagccctcgacgaccgcacccagccccgcgcccgacgccagggtcaggccggcccgcagcgcccgcatggccggggagcgacctagcggcgggcgacccgcgaggctc

SEQ ID NO: 158366 - DNA, 1000 bp, Homo Sapiens
ttttttttttttttttttacgtaaacccagacatgcttctgctctttttaattagacagataaaattagcaaggagattaaggtaaaaggagaaatttaaaataattaaatgttaggtggaatttacaaaagtgaattgaacaatgaggtacaacaaggaatgtaaagagaaacacagacacatttgaaacattcctcggatgccacacggcttaagccagtccataggtaaagcaagaattctcccttgtcacttcttgaattgcagattccagtgatgtgaaagaacattctccagaaacactttccttctccttttcttgagatgttatcaggaataattaatcagtcagtatcattccaggatggcccacactgcatccaattcaaaccactcacctgtttcctgtctgaatttgcaaacttttttttttcctttcattttatttttctccctctcctctcttcccattgagccaataggccgattgggccaaccagaaagccaaaccaacaccatattccagcccctttggatttcctagggacaaagacttcccagttcttctttcttgtttgcatctgttacgaacaagcacagtcattttataacacagacatacatatgtgtgcttttgcacacggaaacaggtttttcttctttttttttccccaatttgtggtttctttttcctttttgcagaaaatgcaaacaaaagaaaaacgaggttttcaattgaaggtacatctcttcttcaatatgaagacattaattgaattggttggatccccatgcagtggtcagcaaagtcctttggcaactgacagaacaacatctggagactcaggagctgggttttgtttgaagaaacttccctacaggagtcatgagcaaagggaaacgagtgtgggagaagggaggggactctcagggaggagtacgaaaggagaaaagaaaagaatgtcattggtgaggaagaaaatggaacactgcttctgt

SEQ ID NO: 158367 - DNA, 1000 bp, Homo Sapiens
tttttttttttttttcatcttattgcctttattctgctgtcggcccagctggccccattgtagggcacagggccaagcttttacacgctcacccatgctctctgtgcaggccagtgcgtgcacacacacacgcgcgcgcgcgcgcacacacacacacacacacacacactcacacatcccatctctggctctgagagtcagtctctggggggcaaagggcaactcctcagcctgcccctgcctgcccttttatgacagcaccaagggcgggggtggggacagggccctcagcccccagaacaaatccctgtgcaaactggaggtgcaagctggcttcaggatggtggtgtcacatttccccattcctggagtcccctcctccagttcctgagggagggactgctctccgcctacctggggggccagacccctgccagggctgggccctgtggaaccccggcttaccccagcctgaccctgccaggacctccagcactgaagaacagacaagtgtgaggttgtggggatcccctgctggagagcaggaaggtctgggccctgaggggcttggggaggggtcatcaccccctctcctaatccatcttcaatatgaagaggtttggggcgcacttcctggggagggaacacaggcctggagaagtcccagcttgggcctttcccaaacttccagcttctgggccacagcctaaggccaggcatccaaaagtccaagagtccgaaagtccagccggctgcttggcatccctgcacggtcctcagggtccccgtgggagccggtgtcagacctgcacaggcagcgtctggttcatctgcagccgcatgtcctggatactgctcaggatcttcttctggtggccggccagggtgaccccaatacggagcaggtcttctgccgtcatctgggccaccaggtcaaaagatgcaaaccccgcactgacgaagctctccttgtaccgccccatcttgatggcatccagcc

SEQ ID NO: 158368 - DNA, 1000 bp, Homo Sapiens
ttttttttttttttttttacccctggagctgggacacgtcccattttcttttatttatacaaaaagttacttttttaaatataatttaagaacccctccaagcaccggcgtccgtttctgggttccaccaccaactaccgcccttttcactacctcaccccacaccccttcataggacacagcttgggggtcccaggcggggtccggggatgtgggatgaccaaggcactgttctggaaacagacatgatgatgggcccctgtttcaacttgggcaaaggaggccatagtgaaacaggttccctccaacacaaagttatgacaaggacggtagaaaaacaaaacgaagaaacaaaaagggaacggggagaaaaattaagaccaaaaacaaaactcaaaaaccttcaatatgaaggcagcagctgggggaggggcatttacaagggaaaaaaatgattgagtttggtggtgacagcagcaagttgggactacaaaccccaatgattttgtcactgggccctgacaccccttcttgccccctgggacagcccccccactctggagctggcaagggagtcacactctctttggtctgcgggaacgcacccatcaaggtgaggggggcacctggggaggctgggagatgttgggcacttccttttcctctggtcacacccagtcctgagggaaaggcgccctcacccttggtctggagttccccgaggtggctggggggtgattttcccctcctattatggcagaacccccaaatcctgtctctccaaattgccaactcctcaccccacgggctcaaagtgcaatccagcggggcacagggctgggggcctctgtgagtccccactctgccccggaaaatggggaggcggtgtccctggggtggggagttcctgcaggtcagtactgcggggccggtcctcctgtcccacccggggttcccggcttggcctgggacttcatgtgctggacactggccaagattt

SEQ ID NO: 158369 - DNA, 1000 bp, Homo Sapiens
cgggcattaagagttctttattttaccagaagggacaggcagtggggcagtgcaacatccaagccccagaccagacatgcagcatccacatgcaggaagagctacacaggctggggcagggccagggtggggagctgggaccactggacattcacagcacccctgccaagacgcttgggtcctgggctcttctgcctccattggagcaaggagacagaggattgggttgcttccccatggctggaaccccatcactctggccaggaagaaagatggcacaagggctctggggtctggccaggctacagcactcgattctgtacagggttggcacagccttgtccaccagaagggcccaacacccaggacagtgcagccctagcaggaagaaggtctacacacttttctgtccccaacagggctagaccctcatctcagaaaacttagcagagttgggaccaaaccgcaccgccccagcaggaacatgcccatgaagaggccttccctgagcacaagcaggggcctcctaaggcagtaggaaactgaggaagctgctgtagacaggaggccttgcctctgtgcccttggggtcagggagaaaggacagggtatgagcgctggctggggccttgggtggatgaggggaaggacagtgtctctgggccctgcaggtcatggctgcccagacctagaggggcagcagcaggtgaggctgtgggcttcctggggcagggtttagggctgggaagaccagtccaggagagaggacagtgaccgtcctacccagaacccctgcccatgctgagctctggccagggccatagggaggatggacagatgcacagagaacttcaaggcaccaggattctgaggagcagcagggccaccccccacagagagtgattgtaataaacatcttcagcttaatctacatgatgtgcatgggggaaagaaaaagacagacaaaggaaaagacacgcagggagatgagacacaaacc

SEQ ID NO: 158370 - DNA, 1000 bp, Homo Sapiens
tttttttttttctgtaaaagcatttcctctgaatattttattcagaaaaaaacacagaaagataaggcagaaacaaaaatcccagtcacttgcagtatctgtcggctttcaatttggctctcctgtccagaagcgtctcatgcaaaaatccatctttccgagcctttttaagaattttactgtcttctttacttattttaagtttgtggtcttggaagctctgaaatttctttacataattgatttcacattgttttacatttcctttgtcttcttctggaatgtcatcttttttcttggtttctctttcagcacaggatctaatcttgatcatttcttcttctcctgctgttttactttttgcttctatgtcccctgcttcattgcatctaataaagcagctatttgaggccaacaaagccattttcccattttgaaagactggttcccattgttctcttggtccaattgcatctgaacgcccaacaacaagtccatctgaatttataccaagatattttccatagccagacttcagggcgattctggaatcagataatttgacagccgtaaactgctctggaggactagggccctcatcaacttctttgtgtggagctcccagggtaaaaagaccattgtcgagtgcatgtatataggttcccttatccatttcaatggctatggttcctgaaatttcaccaaagtttgttactgtccaccagattccaacaatatcaagctgggtttcttcatcttcttctctttttcttttcttatctttgctctttttcttcttactcttcgtcttggttcccttgagcacgagcttggtagacttcacgtaggagtactcggccatggctccgggaaacttctgcgcggagaggctgaggccggttctggacgagtatgtgagtcggggcagcacaggggcgcggagaaacagaagcggacgcgaaataaacactccctgacagcctacgtctctgtagaaccc

SEQ ID NO: 158371 - DNA, 1000 bp, Homo Sapiens
gaccccaatcccagtccccacacccaccccacccagccttcacacaccaggacagactctggccagcaaagagcggtatctagaaagtatcttctctttatttaagttaaacaattttcaaggatggtttccattcataaaatggacaaagtactagctctgtacagcagttctttttaaaaatcaactggcaaaaaaaattaccaaactatattttgaatttgcaaaacatactcacagataccatcatctgagcttttatgaggacataagaaaggaccagcacagagaagacaactaacttcggcacgctttgcttcgaagggctcttaggaaagaattctgagttttaaaaacaggagtgggagggtgagatagtgtcctgatgacagaaactaacgcaaccgcagtaagtcactttggcacactgtgtcaatgtaaacatagctcaccgcaaaggacccctccccggcccacccctgctcttgacgcccggaccatccaaagccgcctcccagctcagggacaggacgccgcccccagggcatgggccgcacaagggtctgggtagacacgtgggatgataggaaggctgagagggcctaggggtgcgggcggggtaaaggtgaaggggcaaaggattcgtcagaaaacgtgattttaaaacgagccagattcatccatttccctccttacagtagtagcagctcgcaggtcacagggtctgacagaagaacctgggtgctgggggctacgcacaccctgctctggcctgcactccacagctcgcacagtactaaggggttttctcagctccccccgagcgcccaccgtgaaagacagaagcgtggcggagtatccagcgtgggggcacgtggcccattcacacacatctggttgcatggcaggggaggcggagagagacctatagggcagcctccagccaggcttccacttcgggccgctgtcctacagtgcaacatgtgggctcccgccgggg

SEQ ID NO: 158372 - DNA, 1000 bp, Homo Sapiens
cttccacgtaagacatgctttcaccttccgccatgattgtgaagcttccccagccacgcggacctgtgggtccattgaacctatttttctttataaattacccagtctcaggtatgtctttaacagcagtgtgaaaacgggcttaatacaacttctgatagaaaattaggcacataatacacattagttggaaataatcaactggagaatgtaggcttttttttttttttgaaagagtcttgctcagtcacacagactgaagtgcagtggtgtaatcatagctcactgtagcctcgatctcccaagctcaagcaatgcttctgcctcaccttcctgtatagctggaactacagatgcgtgccaccacacctaggtaattttatttttaatttcattttttaatttttactttttgtagagatgagattttgctatgttgcccaggctggtctggaactcctgagctcaaatgatcctcccacctttgcctaccaaagtgctgggattagaagctgagccaccatgtccagctcagaatgcaggctttttaatacaaattcaaacttacaaacaaacaatgagaagatagggtcaataaccagtatatgctctttttcgtacagctgaggctctgccagatttaaaatatgaaaccgatcgtattttacttcgggaacaagaatacaggagatctaaatataaaatgacgaaaaacaaaaaaaaaaagtggtaaatctcctaagcaagcgtcaaatttttttaaaacatcattctatcagatgcttaaggaactttatcagaaattaatacaaaattttctaaatattgaacacaggaattttgctattcctcattttttgtgccataagaaatatctgatggttttacaaacaataggcgcttagaaattcagcatacaaaattcattttcccccacctattatcaattacagattttacccaaaagaggaataagcacttaaccaaatgattacaatag

SEQ ID NO: 158373 - DNA, 1000 bp, Homo Sapiens
tttttttttttttttttttttttttttttttttttttttttttttttttttttttttttttttttttttttttttatttgagcaatttattttttttcaaagaaatccatgcaaagagagaacgatagaaagggagggagtgagagagaaagacatggtaaccatgttctagcagccaaacataggagaataatttggcacaacttgatggttttttttctttctttgcaaaaggacaatctatatgctaccactaaaatgtatcttcctccaaaagataccatttgattttcgaaaacataacacatggttagtcctctacttcatggctggaggaggtatacaggataacaaaaaaaaaaaaatagaaaaaaataagaaagtggttccctttatcgaggaagaccacagggtgctgtagggcagcacatgtgctgggcaccaggcagtcagtgcaccaggaagaagaagcacaccaccgagatggccatgctggtgagaagcttcagcggggaatgaacgttcccgaggttgtgaaaggtgcttatctcgttgtccttcggagttgcctgctgactgtttccaggcgcatcatccacatccagatcataggccagttctgcaaggaagcggagctgattcttcacttttatcattccatcaccagagcctccaatgcactcatcttcatcatcaccgcagtctccactttcaaacccttcctcatccaggtttttatccagaactctacctttgggcatagacatggttctcaggagctggttaatgtgcttcagtttgtcaataatttgactgaccactggctcagggcccttcattttcagctcatggagattgaactggtttttcattccattccttgctgccttttggctgtatctctccacgagttcttgtccattccagcaaagggtgtcgttttccgccacagggctatggctgcagatgtagccaggcaaagcactatagaagctgatga

SEQ ID NO: 158374 - DNA, 1000 bp, Homo Sapiens
aaaaaaaaaaaaaaaagctgaacttcagattattaggtttattgaaaccatcctcttggcttggctgaaagacattcctcagtatcttttacaggaccacaaaagatcagggtcctgcaaaatctcaacaaatattaggctcaacaaaccaaatgtgattctcagattaagcagaagcgttcaggctcagggcagtagaagaaagcagactcgccagtccctgcagctccaacctgtcctcgtatccacctctgtttttgcaggcactttccgtgaagagttggagagaagacctgtaaatgggaagactgttccactggaattgatgttctgatgttagaggtgagagaattccaagttttgaagggagtggtccaaagagtaacaactaagtctatagatggcccgtaaaacacagaatgagcaggacatgaatcattagaaagtagatggctgctagaagtggcactcgggtccgtgaatgacagagtgaacgcaggactcgcttccatccaacgccactccgggtccttcgacaactgttgcttgtaagatctattaacagtgcctgctcctgagtgccacaggagccaatgataggagtccgggaagagtcccattcactgtgctctaaccgtctgatctgctcctcggccacagagagagcattctcagcagccactctttggtctcgttcttcttccagcagcttccttaattcattcacttcctgtctggtgttgcatagctgctgctgagcttcagaaaagctttgctgcggttcccttagttcctcagggtcactctttctgtgaactccattcttttcctggggagctcctggagcaacatctatatttagtggccccgcctgcagctcttgaacctgcttctccaagactgcacagtgatttaaaaggtcaccatagtgctgctggttctcacgaagactctgactggtatcgcagagctgaatggaaagggtgtttttctcttccag

SEQ ID NO: 158375 - DNA, 1000 bp, Homo Sapiens
ctagtgttcctttgtttgccagggaatgtttcgggaaggctgtggagtgggacggtggggatgaagcggggagggaagcagtggctgcattggggactggggggtgggtggaggcgactgtgggggcgacggctgacttgtgacaggcgtggaagtgaggaaggggacggtggaagccacggcagagggggagctgggcctggcgccggggggctcggtgatgggccgattgtagaagaagaaggggcactgctggataaagagttcaatgattgtctggtaggtgcgcgtggctgtgagggcgtccatagtgctgaaatcaggtctcatcaaggtgggccagaagcagatggagaggttctcgctggtcatgagattcaccttgttgttgtggctgaccttgtttaggtgagagatgacatacttgaagacttcgtggttttcctttggaaatttctttaatacctccttaagggcatgcaacttctgctcccggtcgttgattttgtgtgcttccaccaagtcgatctgcatgttatacgggaccagggggtcaggcagttctgagaaaaagctcttcatggcaccagccacggtattcaccgtaaagtctttctctgccaggtccaggttgtggtcttgatcaaactgtctctgcagactctcgatctcagacttgttcccgctgacccggtagatgccttccgtgctcagtcctgtggcttcaatgtactcaatacatctttcaataaaaatggggatcggcttctctggagtcacgacagttgttaagggcaccccaaaatagttactctcccaggttgcctttgtgatggatggccggggtttgggctttggtttcttagtgttcctccttaggctgcgaagaatattcctcctccgcgggtcttcgtctgtttcgtatggaatgacagcattgtcccctttataaccctgggatgcctgatcctcctctttcttccggatgggccccagctca

SEQ ID NO: 158376 - DNA, 1000 bp, Homo Sapiens
gctggacaaagtacttttaatgcttattttacaaatatgtacctgtggtgctaatactaggcaaagaaaacaggacgattcaagagcagcctatgtaactaccaactcaagcactaacactagctagatcaccttcatgctttaaaatttaaagttatggagtagctgtgcccacacccccccccaaaaaaaagctttaataaaggcactgcagcgttaactaagttttagggtaaatttaggcaattaacaattcgaagagacttgtggtttatgtattagtaattcaaattactgttttagagatctcaggtagttaaccaattcttgctcaaagcactaatgttcagtccctcaccatttatgctgggtatgagtcccaatgcatgggtattgcaacctattgtcaggccttaacatgtatgtgtttgcttttattattactaaaatgttaaaacttaaacccaattattcaccaaactctgaacacctcaacctcagagctccagaattaggaatgaatgacaaagtttagactctaatcattttaagaatgttaggtgggaagaaatggcttcagatgcagtattgtgttcatctttccaggggaacatctcaaatgggtattctgaagcaggttgagaagtagataaaattctctgctacaagttccatccactttttttttttcaagagaccaggtctcactatgttgcccaggatggtctcaaactcctgagctcaagtgatcctcccgccttggcctcccaaagtgctaggattacaggcgtgagccaccacacccagccaagttccatccacttttgaaaacaagacatttatgtataggaagagaattatggaaacactttgtaaaacatccatttattatatccaatgctaaacactaccacttggactctaagatatgtttatgcctctctgtttattctagttttttaaaaatcaaatatacaagatctacaattatttatatcca

SEQ ID NO: 158377 - DNA, 1000 bp, Homo Sapiens
tttatttttaattgcgttttatttttccatcctttagatacacacagaatgtaaaagggagcatggggctgggggacgggaagcaagaagcagcagccaggcgcttggggaacacgcgagtggtaggttttggggctccctaaggccccttggtgccgctgctgggaaggcggaggctcaggagggcaggcaaccacagggttagtccagacccacagtccacaaagacagcattaaagagggcttacaaaactgcaagattttacaaagaccttacaatagcaacatagaaaaggggaggtaaattccagaaagctacagaacaggtagataatatccttttcatattgtacaaaaaaaccaaacctgacagactttcctataggtagtattttttcagtgttgaaaaaccaaaatttctcctttctccctccttaaaaaatgtttttaaactcctttcatttaaatagggttttttttttgttttttttgttttttgttttgtttttttacttccctattcgatttgagtttcctgattcagttcccagagctgggcttctcttcctctccctttctcatgtctcttcctctgccctttctccatccctcactcttcctcttcctcctctgcttcagccctgtcttggccggtggtccccgggcccgcggtcttgttctcctttttccacttcatgcgccggttctgaaaccaaatcttgatctgtctttccgtgaggcagagcgtgtgcgcgatctcgatgcgccgccgccgcgtcaggtagcgattgtagtgaaattctttctccagctccagggtctggtagcgggtgtaggtctggcggcctcgtttgcggtcagttcctgagcttcgcatccaggggtagatccggaagttactctcggccgccaagtccgagtccctctgctccttggcgcccgccgccttggcggagtcgccgggacacaccccggagaggttctgctcaaagggcgcgca

SEQ ID NO: 158378 - DNA, 1000 bp, Homo Sapiens
ttttaaaaatatctcagtattaattttaatacaataaattctcagagatacaagctacatcaacaaagctgttggggagtgttaaggttctgaaactaaaatgctccagagatgttggtacagtggtaaaccagcagccaggtcaccctctccatgttgccaattgacaggaactgtactaaagtgggtgtgtgtgcaggggggcggggaatttcacaggtaaagcactaatgtgcttttacaaattaacagaaggacttattttgaggaagaaagtgattaccaaaactctattttcacaaaaataataaaatattctctatttcaaaaaatggggaaaaaatgtctttaaactatgtcaaaagtttgccatcctgaaaaaagatctttcctgaacagggatatctgcagatacctgaacaggaaaaatgatgtgactaaaccagtaagccaggaaatttgaaggtcttcagccttgttaccttccaggattttttctcctttttagtactcaacataattttgatggtctatataaaactagaataaatctaaatgtaaaagtctaacgaaagctgattttctttaataataaacagtgaatatcatgagaaaaaccactttaaagctacctctcttctttttttcattttttagagatgggatctcactctatccccaggctggtgtgcagtggtgtgatcgtagcgcactgcagcctccaactcctgggctcaagtgatgttcccacctcacctccaggtagctaggactcacaggctctcacaccaccatacccagcttgggtctcttcttgaactaaacatttttattttataagcgctaatttaaagtcagtaagagcccccatttaattacaaacttcaatagttacccagaaaaagaaatagtctttaaaatcattttgataacaactgtttaatttactattcagatggaaagcctggtaggatatttgggtaatggtctgtaattaggt

SEQ ID NO: 158379 - DNA, 1000 bp, Homo Sapiens
ttttttttttttttttaactttgcaagaaataaatttttatttttcttcattatcatacagcatttaagaataataaatctgtcttgaggtttcaaatctgagatatctatggcaagtttataaaaagtacattgatcaaggtacaatttttaacattaatatacacattccataatctcatctatttaacattaacacaggcctttgttgttgttatttttttctccctacaatatttcctgactctgtaggacagtggtcctcagttgggggttgactctgtcccctaggggcatctggcaacatccggcataactgtgggtgtcacatgagagggacgctgctcaccatcctgcaatgcacagcacagaccccaccacaggggttttatccagcccaaatgtcaacagtgtcaagtttaagcaactcttaccgagtgggactcaattcccattttatgaacacctctgtgctcactgtaattctgaaaacacagactttgctaactggtaaatactatttacaagaagattcaacctaatcaatatcacttatcaaaagcagtggctgactgtaagtatcaacatgtttccagaatgaataaaccacacaatcaactcagaatgatacaaattagggtccatatcatttaatttcccttgaacctgctctgctagtttaatctgctaatatgaaagttaattaagactgttttgaaggagcgagacaatagtttcctttgcacatttttctgaactatgagaaaaatttaatgatacataaagcacctggcaaatagcaagtcctctgcaagtgctccggaaatgtttatcacagcctactaaaaacagagtttcactcatttgttcaaatttcccataagtatgtatctgcaaagattaaattaagttttatttgctcgctctcattttacaataatctctcacaaatgtcgcttagaaacagaacacatatccagggtgtgtgatacaaaattat

SEQ ID NO: 158380 - DNA, 1000 bp, Homo Sapiens
tttttttttttctcttcatcaataagattcaactaataatggccttttttatttatgtggttggaaaggttaaaataggtgacacgtgaaaagtgccttgcacatagaaagcactctattaattgagggggatattattgttactgttcattgttagtagtagcattaaaactgatatgattgctaatgaagaaacagacttaaagaggaagcaaacctcgaacagatgccacaataaagcaacaaaattgctgattcttcagggctctttctacaggacagagggactagagcttactctccctgaggttctcttgctgtttactttggaagctctgacctttccagcagacaccatcacctgtgccctgcagggagcagagattcggactttttaagtttccgcttctggctgggtctgtggcccttgtctaggctctgctaaaacagatggcaaacacggccactcagtaggtgtctttattcatacttgttgacatttcccatggggaatggttgaagggaggggcagggagggctgagcgggaagccacggcttggttttcctccatccagtggagaagagactcggtagggacatgctaagtagagtgaacaggggaaccatcactatgtgggctgagatgcactgtgcagtgacttcagacaacctgagtccttctgtcaggaaatgcaatttctaagtggaaaaaaaaaacaagacccaaagaaaaaaacaaagtgcatacaaagcaaactgctaatgtaagaaaggttctaaggcagccagcagtgaaaagccaggggtctggagtggccacctggccatgccctgtcccactgccctgtgccaggctgtcgggccaccagtgccctcttgagacagtctccattggctccaagggttctgtgagccacagaaggttgtgaaaggagaagagcctgaagtgtggcagcaccagggcagcccaaagcagggctgcgttgaaaatatcaaagt

SEQ ID NO: 158381 - DNA, 1000 bp, Homo Sapiens
agtgctaaactagatttatttttgttttaaatagaaaaataatgcaggcacgaaagtaaaacaaaaaacagtacagaatgggagagactgaaaagtaagaatggcttccaggcccacttcctagaggtacgcactattaacatttttagatataaacttccagaaatttttttccagttttatttaggtataattgacaaaattatttatatttcagttgtacaacatggatgttcaacatgttttggtgtacatatactttctgatattataaatggttaccacaagcaagctcagtaacatattcagaaattcttaatgtagctagcaatataagtggttttgttttttgttttgagacagacagggtcttgctctgttgcccaggctggaatgcagtggcgccatcttggctcactgcaacctctgcctcccgggttcaagcaagtcttgcgtctcagccgccctagtggctgggactacaggcatgtgccaccacacctggctaatttttgtatttttagtagagatggggtttcaccatgctggccaggctggtctcgaattcctcacctcaaatgattcgcccgcctcagcctcccaaagtgctgggattacaggtgtgagccaccgcacccagtcataagtggttttctaaacaaatgagaccacaccatacatactgtccctatatttcatacttgggcaaggggaggggagttgacttttttcttagtgagaataaaaatgaggataaaagtatggttgtttaccaacttatagtagtatcatgaatttcgaatggtcttctggccgttcagaaaactacttaactggtaggaacgaaattctggacactgacattgatatagacactcatatcaaatataatactatgaaatactatgatatggaaataatatgcaatcactagagataaaatattttctacccaagtagagtggattcataagaaaattctaaattatagcatatgttg

SEQ ID NO: 158382 - DNA, 1000 bp, Homo Sapiens
ttttttttttttttttttttttttttttttttataaaattaaatccaaattttattaaggatttcaggttacatacttcaaatttctagaatggaatggaatcattttggaactggaaaaatggcataaacactgacgtcccttaaaacttcaattttataaagaaaattcttctgcaaaccacatcccctttatgtaacaagactaggtattatctacaccttcactttggcaatagctatttcctaaagaatgaaaaagatgattttgctacttcagttcattaaaaatgggattctatctttgaagttcagaaaaagctgcatttcgatgaactatggttaaaaaaaaaaagcacatagtgtctaatcaaagcaaaggaaatcattttgaaaataaagaaaaaaagctattataattggttaaggatttccagtagtaagttaaaatctcaggagaggaatggatagcactacaaacaatgtgttcacattccaagaccttaacactaacttctcagaaaggaagttttcattacctctaaaaatcaattcaatgtaattttattaagagcaggaaatctagaccttcctctaatgacaatccaataatccaccctcactgtcaaaaaaagttcaaccccaaaattaacagtaattagcctgaggtattgtaaatgtggctctacagtctgaaatttaatggcatcttttgtcaaaaatagtcttatttccactttaagtctcatgactacaatactatagtgctatccctgtagtatttacaatacagtcatcaaaaatatctgaaaacaaatcttggaccttgtgaaatagtgcatccctccacttctataaaaataggagccacacaaagatctaaaaagagtgctgactgcccagatccagaacagaggtacttaacacctttgttttccagtttagttatcaaagcgtggtgtgaacaaaatgcttagtgtcacactggcattacaaatagg

SEQ ID NO: 158383 - DNA, 1000 bp, Homo Sapiens
ttttttttttttttttttttttttttttttttcccatggaaacacttttatttctggaagtcagaagaaaaacaatgtgcacaacctgaatgacacagagcggcagcgctgaaaccacaggggctgccgagagctggcctttcacagcagaccactgttttccagtgagaatggtgggccattccaaaacaaagctaaagggttccaaacatccagaatggaagctgcttcccccaactccattacctatactacaggatggattgctttttgtgagaccccttcttccactgtgcaatttttgcattatttaccctcccccgatcttaaagctatatggcgtccaggagagtgcggctgatgcagcttggccatcactgtgatgcagctggagcagaaggcggcccgttcacttcagccagatccacttgtctcccacctcggtgttgtacccagggctgtacttgcggcccggcagctctctgaactgatgtaagacacggtcagtctgatgagctccaatggtgacttccgggagaaagataggaatgcttgtgtaattcagcacctcaaacttatcctgaaccagtaatcgcaggtggtataaagtgcgattgtcctgcttgagccacggccctttatcgaacttcaggtattcaatgtcctctaccaccttttttgaatcttgagcttcccttgcagaatattgtaaaacctcacatttttcactcatctcagggagaaaggttttcttataggcattctcaatgtcctgtagataggcagaggtgatcttcatttcatgtggatctcctttcttctgaatccgcctctggacctctggaacgggcacatcgatgtaaatcaccaggtgggggggcaggtaatcgcagatggtgacgctcttcacctcgttgtagtggtccacacactgctttcggatgaatccctggttgtacatcgcctccaggaacacaaagtcactgaagatggagcgctc

SEQ ID NO: 158384 - DNA, 736 bp, Homo Sapiens
ttttttttttttttttttttttttttttttttttttttttttttcaggttgcagggctttatatttcagcaacagtcatacagagccacacagcaggggcacccacagctgcctcaggaggtggcagcggcggcctcttttgcagcttttctctcttgcagcatcctctgcctctgtttggccaggcacttcctggcagaactgtaggcccccaggtcctgatagcggtcctggtaggccttggccacctgggtgaactgctccacttccttgatacagttctgctggtagttctgtccttccctctgctgacaggctttgagccgatcctgcataatgttgataatttcttggtcgactttgtagtccctcttccactgcatttcggcttcatacatgcacatgatgtcctcctccttgcactcagtgatgtctggcacgcggcggtactgccggtggtagtagtaatacctgttctttgcgtgctgccgctctataaattctctcacgagggtcacgggtcggtccacgatgaggtcgaacgctttcatcatgtagacgatgggattgggctgcaccggcgtgcggcgcgggggctcagggtacacatccttgtcccagctgtccggcatggcggcggcgggcgcggactccgctcccggacgcgctgccctggcctctacctccgtccgggtcccggggcctaggtcgcccgctacagaggaccgaggcggct

SEQ ID NO: 158385 - DNA, 1000 bp, Homo Sapiens
tttttttttttttttttttttttttttatttgtacatctttattatttctaaagcactttcctcaacctaatttcagtttttacaattggtactcaagaaaatagagacagaaatcatttgattttgcccagaaaccatctgcttatatttataaggccacctaatttgaaatcacatatagaccaggcgcggtggctcacgcctgtaattccaacactttggaaggccaaggcaggtggatcacaaggtcaagagattgagaccatcttggccaacatggtgaaaccccgtctctactaaaaacacaaaaatcagctgggcgtcgtggcatgcacctgtagtcccagctactcgggaggctgaggcaggagaattgcttgaacccaggaggtggaggttgcagtgagccgaaattgcgccactgcactccagcctgatgacagagcaagactgtctcaaaaaaaaaaaaaaaataccacatatactttatctccaaaacctaatctgattataaattctaagctaggaaacaaaaacttttgggacaagtacttttttttttgacggggtctcctttgtcacccaggctggagtgtcacccaggctgcagtgaactgtgacacaaccacaattaattgcatcctcgaattccagggctcaatagatcctcccacctcagccttatgagtagctgggattgcaggaacgtgccaccacgcccagctaatttttgtattttatgtagagacagtgtttcaccatgttgcccaagttggtctcgaactcctgggctcatgcaatctgccctgcctcagcctctcaaagtgctgggattacaggcatgagccactgcatcgggccaggacaagcatttgataagccataaaaagtaacctcattccagttaggtacagtcttttgcttctaattgcaccaagctccactgtagacagtattagctcctgagtccattttctccaggataacccacctaagagc

SEQ ID NO: 158386 - DNA, 1000 bp, Homo Sapiens
ttttttttttttttttttttaggcctaggggccgcaagacggctaatttattataatttctccttttttagtacatgcacagaaagcctgacagccaagtgtacacgaacatacacacacacacacacacacacacacacacacagaggccaatttccagtgaggaacaggctccacagaagaagctgataggcaggggggatcaaacgctgctcccctgctcaccgatctacttctccaaatacaatatcttgggtacctatgatggcaacgacatctgccaacatgtgtcccttagacatcttgtccaaaccagccagatgggcaaaaccaggagccttgatcttgcatcgataagggcggctgctgccatcagacaccaggtacaccccaaactctcccttgggagcctcaatggcagtatatgtggctcctggaggaacttggtagccctcagtatacaacttaaagtgatgaatcagtgactccatggaagtcttcatctctgctcgcttaggtggagacactttggcatcatcaaccttgatctccccaggaggcatcttgtttagacactgtgcgataattctcagggactggcgcatctcctccacccggcacaggtacctatcatagcagtcccctcgagaaccaacaggaacatcaaactcaacctggtcgtaaacatcatagggctgggtcttccgcaggtcccactggatgcctgagccccgaagcatcactccactaaaaccatagttaagtgcttcttctgctgttacaaccccaatgtcaattgtccgatttcgccagatcctattgttggtcagcaactcctccaactcatcaagccgaagagagaagttcttagaaaactgataaatgtcatccataagcccaaggggtaggtcctggtgcactcctcctggccggatataagcagcatgcattcgggctccagacactcgctcgtagaactcaaacatcttctccctttctt

SEQ ID NO: 158387 - DNA, 899 bp, Homo Sapiens
ttttttttttttaagtctaagtaggaatttatttacacggacactcaatcatagataaggcgctgtctaggatccacatgcgttccctggagctacttggcatcaggcttcttgtctccggcttcaagcttgagactctccgggggttggcgatagactgggaaagcctcccaggggctgttcaggtcaaatttgcggaactcttgggccaactccaccggctctgccaccacccgcttcacttcatcatcataacgtaactcaacatagccagatagaggaaagtctttccggaaaggatgtccctcgaagccataatctgtcaggatccttcttagatcagggtggttagcaaagaagactccaaacatgtcccagatctccctttcataccagttggctgccttgaacacagagacagcagactcaatgggcgtcagctcatctgtgtaggtcttcacacggatccgtgagttgaagcgcagagacaacaggttgtagacaatctcaaaacggttttgccgagttgggacgtccactgctgtcaagtcaaccagagatttgaactgtgcattggtgtgatccctgaggaaagtcagcactgggatgacgccatcaggatggatacagacctctaactcattgaagcaggacacctgaacttgttggacatacttgggcaagatttcagccacatactctccaaaagctgagagctgcttgtgggccacatcattccgtggtctgacagtggggcgcgtgtcggccccggcgctctcccgcctcaccggcagcaacagaacggagggtcgcccagtccccctggtcagcgccgaggcccccaagatcccgcgccaccacagcctggctaccgccgccgccgccatgttactcagatg

SEQ ID NO: 158388 - DNA, 1000 bp, Homo Sapiens
tttttttttttttttttttttttttttttttttttttttttttttttttgttgaattgtaataagctgtttatttacttttgccccatgaggctatgaattcctccaggacaaattggctggcactttgctgctgtttaataaatatctgacaatgcatgaatggcagtgtcctggcagaaaacagaatagtccaccttgagaggcaacaagtcctaacagctttttgtttacacagaggctgatccaccctctctcagagatcttagaggtggtgctgaagattgataaataggacacgaatgccctagggtcccttctgacatggtgattatggggcagtgactctggcagggggctgaaggggatctttgaaaagcaaccaaggcccggtgagctaatcacttgatatcagtttggttcacagcagcttgtgttccagaaaggtaaaggaaattcattgcaaagcagcaacaggcgaggagttactctggttctgttgtcccccaatccagagccagcctctgtcacacccacccctgctctcctgagtacttgctaggactgcctggactcattgggcatagagaggccccacaagcctgaaggtgaggcaagtttcccaagtgcaaatgcccggaatgtcttttaggcacgtccccctgcagccaagcctagccaaatcaagctatttgtactcagtacctacggtgtgtcaggctccaggtgaacaagacagacaaagtgacttttcccagcccagtggaacttggcctctcgtaggccatcaagacaggggacaaaccaggtttccaggccaggcccgtcagtggtgatggatgtaccagctatttagaaggccagcatgggcatatttgcaggataggccaggaactcatatagtgctgtaagccccagggcaggtgacattcagagctgctgggtagactgtttgctttctgcagtctacctctgaagcacaaatctttccagaatatctt

SEQ ID NO: 158389 - DNA, 1000 bp, Homo Sapiens
ttttttttttttttttttaacacttcaaatcagctttattatgggtgacagatttagggttcttaaatagcgatagcagtggctagaagaagcgcttcatccccacagtggagttctttgttgtgaggggagggaatgcaaggagtcatcagcgggggtggcccttggccacttttcagcacctacacagtgcctggcacatagtaggtgcccaataaatatttgtcagccatttgtgggcagtggggacaatggatcataggggcaccctttggaaaccatatataggaaagaacatcttacatcccatatgcctgcaattcttggttccaacttaggggtatttccactccactctgccctcctgtggcctgtcttattttctggaggaggactgggcctgcctcatcctagcatcttaaaccctctttccagagctgcagcttctccacgtggaagatgtctgctctggtgggcatacattcattttaggagagaaactaaactcacaacccttcattttgggggatccatcttaaaaccaggaaggccttccagcctgccttttaatgggtaatcatttttggaattcctccctaccatgtattcttctattttttaccctctcctccttggtttatgggcatttcttggagggctgggggaccacagtcaagttgaggtgatccccgctccggggacggagtaaggcaaggaggcgggatcggaatgttggaggcagaaccgcaagctcccagggccacccaatcacagggccagtcatccgttgagaccctgcctccgcgcccggcagccactccgtatcttcctcgcattatcgcagggttgggccgaggcccgcgcatgcctgcagaaaacctacggccgcgaggggtcgggcctcctcctgctcctactcccgagaggctccggcaatgagaataggccccgcccccccgcgcagccaagtctacggaccaagtccgagcctgcagacaag

SEQ ID NO: 158390 - DNA, 1000 bp, Homo Sapiens
ttttttttttttttttagatctctaattttaatagttgagaggaaggttataaaataaaacagacaacacagagcttcatgacggcctcggattggcagtcaacccagggatacagaaatgtaaacaaaaacagagcttccagataacattactgtgtgctatgtgactttcagaatacagcagcgtcccagacactctaaagtcaagtgaaacaagagattttagaatcaatctatacacatttcagagggcagtccaggaaggagccttcctctcaggtcagcccagggctgggcctgagcctgagcccggggacgtgtagacactacccattttgggcaggggaggccaaagtggttctgcttcaggtggggtttggctttaaggggctgcccagctggctgtgttctggggacctcttttgcatttgcctctggcaggctggctctgacccctgcctgtttttccctttggcccacaagacgcacacctctttacacccagaacccctttcccagctgcagcaagggagcaagggagccagccagccagccaggacgggtctccccacagccactccaaaccccagcctggtcaggtgaaaaagtcagaaaaaaggcaacagatacaatttggtagccatcaaatcctctcctccctctggaagtttctgaggtgctggtcatcattctgtcccattttttgccactgtgctaaggcttttgactcaaccaagaaaagggccggtcttccagcctggccctgcaagagtgtcctagtgcttcaggtagtggatgggcatcgtcattcgtcccaccttcctgccccctaaagccccaggaggacacactctcagcatcaggccagctctccgggtcactggggcttggctcaacaggatgtgcagggcagagccgggagggaagagcagaagatgccatgggctgttcgcaggagcagccgtccagggcgccgctggaggaagatcttctagtggct

SEQ ID NO: 158391 - DNA, 1000 bp, Homo Sapiens
ttgtgtaaaatagataagcatctcttattattggacagtctttgtgggaaggtctatggcacattgaagatgttagttaatatcaaattgctcatattttctgcaaggtgccttccctattcccagatgagggtgctatgtcctcttgctagactagggcctcaggtcacattttgtgcacacgtctctccagggcctcaagctcagccaacacctctttgggcagatcctggttgacctgctctgtcaggtagctccgaatgtcacgaacctcctgttcccagaagtccttggggagggagaacagctgagtggtgtctatagctctgaggccgctgagatccaaggctccttcctttggcaccagcccaatgggtgtctctcgggcactgtcctccccctctaaccgccggcagatccagtctagcacccgagcattctccccaaagcctggccacaggaagtgccctgcctcgtcacgccggaaccagttgacatggaagatacggggcagctgggcccccttgcgcccttccatgctcagccagtgttccaggtagtgcccgaagttgtagccaaaaaagggccgcatggcaaatgggtcgtgcatgatgatcttccctttgtgttctgctgcagcagtggactcagagcgcatggcgctgcccacaaacaccccatgacgccagttgaaggcctcgtataccaggggtacccctttgggtctgcggccaccaaagatgatggcgtcaatggggacaccctctggggcctcccaggctgggtccatgatggggcactggcgagccggggcacaaaatcgagagttgggatgtgcacagggctccttgtcaccaggtttccagggtttgcccagccaggaggtcacagtaacaccaggtggaagaggctggtcaatgccctcccagtacacgccaccatcactggtctcagccacattggtaaaaatagtgttactctggattgtagccatggcgtt

SEQ ID NO: 158392 - DNA, 1000 bp, Homo Sapiens
aaatagtggcaactggtatttattacaattatatacagtcctatcttccgttctgaggtctatacatgatcacacaaatgaacatttttttcctggggggaaggacaaaactggctgttggtcaggaaggccctgctgcctggctcctcctccggaatgagcccccatctcgccatgggattagctgaaccattacacggcaagcgggggcatcggaagcgcagcgtggtttcatttgtctgggaggacgacggggcatgagtggggttggggctggggacaggcacctgacgggtccagggccgggcccagggagggagggggatggcagacaccagagggaccgcagctcctcctccactgaggagtcgggaggcagtagggacgctagctctggccatgcgtggtgtcacggtagtcaagacactcagcaaacacaccctgggcaaggcgtctgtccgggagagggggctggggaggggcttgggccccgaggcttcgctgccttcagcctgacttgagatcaaagccaaaggcagctgggcctggggctggggctggggctggggctggcggccaggcgagaggaggccaggtggacagaagtgtgactccccacactgccaccaggccgcagtgcagctgaggacagctctgccccctacctgggctccaagctgccctcccagggccagagagggaggcagggtatggccacgcacgggcacactagatgccatcctcagggctggaggcagcaggcgcagccctagtcccgctcactctcgttgctggcgccctcgggccgccgcagcttctccacctgctcgttgatctgcccatccccgccccggcggtcctccctctgcacccccaggcagtcctcctcgtccacatggctcacatcatcatcctcctcatcctcctcgtcctccttgtcctccctcttctcctcctcgccttgcacctccatccgcacctggcccttgacgtccaccac

SEQ ID NO: 158393 - DNA, 1000 bp, Homo Sapiens
tttttttttttttttattttttaaaaagtatttattgcaaagaatgctggacacagtgttgcatgtggctgagattcaataccatccattctggggaactcgggaaaatatctgcaacatgggcacgccagccagcatggccgaaatgtggcagccaatcagctacacctcagcccatgcggagaccatgccagggcagaggccggggggttgcccccactcatgccctgatccctggatgtccctctaccctgtccccagtcctcgtaatgcatccagtccagcaactcctaactcccctctgtacacagagagaaaaggcctcggtggtctcacctcagatgacatccagaggtacatgcactgttgctgaccaagggaacccactatggctaacaaatgagtgtgtccaggtgacaaaagtcaccaaaactccaaaatacacagaagcaaaggctgcagtcctaatgtcccaaaggcatggtccttgggctctgggtctaaagggcttggggctctgacagatgagtctggaaggatcttgccccggctccgccttggacatctcttagcagagcagcacacaaggatgagagaccaccggccagggccagggacgctaacttctctcagggacaggtggcatctgcaggctgcaaagccctgggaggctggaaagatgtgctaccctccaggcacaggccaggaaaggctccggacacaaaggacttgggatccaggggcctggcttccccagagtccacctgtggacagcagggcacccgattacaagtccagacactttctgacccagccccacaacttgccagccagtctgtttgccagctgtaaacagactgcccaggctgcctctctgggaccaaaagaactcaggggcatgacagacactggacttcacaaggccattttcaccagactcacgtgcacatgaatggaaggctgtgctgcggccgggaaaatcctcccttgcccagggact

SEQ ID NO: 158394 - DNA, 1000 bp, Homo Sapiens
ttttttttttttttttttttgaatgcggcatcccacaaatgggccctttatttctgaactgccaccactgcacggataaggccacttgggttgcaggcacactgtggagtgtcaggggacagagaggagaggggctgcacaccaagactgccctgtcctcacggagaggaaaagcggccgcagaagagaatcccgttggtcttgctgtgctggatgaagaaaaggaaggggtggtcggcgcagaagcgggggacgaatctggcacaccgcatcatcatgatggcagctgtggcggctgcagcctccgtgccttcctcattgacctccacaaaagacttgtgcacgaccttggacagagacaggtctgtctgggacattccagagaagtctgccttgcccagctcgaaggcatcagtcatgcccaggttgcgcaggacactctccatgtcgtagctttcctctagtttaaaccgcgggagggacacttccacctcctcttcatccatcatgtccagcctcgtccattctacgaacttctcgtaagtgagttctttctccaccgttctcaagtcagtggtctcgtccggaagcatgatgatcatattcagttccttgccaacatatggaagcaccaagatttgggtaaatatttctcctatataggtcttcttaaaagtagattgcttaaacatcatttgcacaggtttctcctcattcttgctgactttaaacagtctctcctcggtgttctccttgtcaaactgttcatcccagtttcctctgaaatagacagcattcaccagaaccagccttgtcaatggatccactgagcccggagagagcaactccgcaattttaccttctgtcttttcagctacccaggtgtttatgtgttttctggacttctctacggcgctgataaagtcaagctcctccatctctgcttggtagaatttttggcaggaatctctaaaagatgagaggaaatcacaagactttt

SEQ ID NO: 158395 - DNA, 1000 bp, Homo Sapiens
tttttttttttttttttggtagcctgagagggcctctccattctttattcagtcccaataagttaaagggcaagggtagggggcagggcctcttaggtgaggacgctgctaactgaaggcagcagttcagccagttgctccaagatgcccaccgcttggcacagcgggttaccctgcaggttgaggaggaccagcctggggcaggaggcaagaggctggagcactgcaggctgctggaggcggttgttgcacagtagcagctcctgcagccggggtaggttggtgacgccgtccagggactctatggcattatcactggcctgcagcacctcaaggcagcgcagggcagccagtgcaggtggcagggttcggaggcgattgtgtgacaagtcaagatgggtgaccaagagcagctgttccagatggcagagcactgtcagatccttgtgagccaggtgcagcacacgcacctcggcatactccatcttgagcacgctattctccagcaagaacttgctgcgcaggtcatccagatacgttgcccgcatggggtccacggccttgagggtctggaagtactgcagggtctccttctcatacagcagggggtccagtgcccgcatcagcaggatgatggtaagcaggcaccatttattctcaggctccagctcctgcagctccttacaggattccagctcagactgcagcactgtggacttctccactgacagctcacacctgaatagctgctcgtctgtcgtggagtcccggcaccagccctcctggcggccttttaaaagcacgcattctttctggacatcgcctgctgtccaaatgacgcgaaatgtatgttggggcaactggtcgttgagggaggcagcaggcaggtcacagagccagacatggctgggccggttcctgccatctggggtcctccactccacaatcaggggagaatcatcaaccatgagcagcaagatctccatcctggagcccacta

SEQ ID NO: 158396 - DNA, 1000 bp, Homo Sapiens
ttttttttttttttttttttgtaggttggttggtttatttgtaaggaatgtgtaaggcattttggtaagttgaacagtaacttctttttccaaagaggaaactcagacagaggtgccctcctttgagctgctgccgtcctctgccttttccagctgttcctgcagcttcttcaccgtgtccttctcccttgccagctgctcctgggtcgtcttcagaagctcctgcagtctcgtggcggcgcgccccaggtcacttgttaacttcttctctttttctagtctctccttcagctgtgaggcctcctctgtttctgaagactctagggggccggctgtgcggagcttctccaattcttcttgtaaccgacatgccgaggtctgagcctcctcaaactcggccatgagcttctgccgctgtgtctgctcatcctccaggatggcttctgtccactccagctgcgtcttcagctgaacggggtcctgctcggctgggggcgcctctggggaggaagctggggccccagctatgtcaccatcctctacgtggctcttcatttcactcaactgctgcctgaccagggcaagctcatcgctctgtttctgggcttcgctcttggcggcatcgagctgagattgagattctaggagaagttgcctcagccctgccacctccttggcgtagttctggcactcggcgctggcggccgccatgtgcttttccagctctgcctccaaatgcgacgtgtgctccctcacctggtccgaactttcaagttctccttttagcttctctacaatctcttcgagatgcttcactgtgacccgggacttctggagctcctcctctgcggcgcccaccttggccctccacacctgctcctcctcctccacgctcttctgcaggtctctgagcatgccctccgtctccgccaggatgctgcggtactggtcacactcggcctgcagtgtgctctgcgtctcctcggcctccctcaacttg

SEQ ID NO: 158397 - DNA, 1000 bp, Homo Sapiens
tttttttttttttttttttgaacagcaaaactgagtatgtttactttacacaaagtacaatccagtatatgcagaaaggtactcagcatcacactcgtgatcaatatcctcttatttccatttggtatgtcactgaaaacctggcacaccacttagctaaaaatcacataaaagaacccctagagaaatcaaactgatgttttttttcccccaaacaatagatttcctcttcattagtcaaatctgatagtgatattcattaataaggaaaactaaagttttcaagcatcaactctgaatggcagagaccctaatctgactgttattagccaccaagaactcagaagagcaaagaactcaagaagaggcaagcaagagcactatggaaattatattcttttctgtgaaattcagtcccacagctatttgagcaagggcccaagacgatggagaggcggcaaagctgctgggagggcctgttcgcaggcaggaatgcactggctgtgcctcgccccgccatgtccttccacaggtgggctcttcactggcttcacttcagcttgatcctctggtctccccacagcttcctgggagactttgggttgtaatctttacagttccaagaatcaattttggttgaacgcaagggtaacatccccatccaaaacagaaatgttctcatggtatgaaggccattctgtagagtgcacgtatatatgtttatatttatataggctcctatgcgagacagtttccttcctcttagcaagagaatactgcatccagcaacactgctttggctagctcttttttctgtatggcctcatgtgtgtggcaattgaagcagctatttctcccttcctcttgttctggccaaaataatctagaaactcaccatctggtccaatcaagtacattattattgtgtgatccactatgtagtcttcatcttcgtccttggggccagggctgtaatacactctgtatgctctggccactt

SEQ ID NO: 158398 - DNA, 799 bp, Homo Sapiens
aatatttgtcttattaatgtttttcttattttataatgcaattacaacaatttaggagacaaaacaatataaacaaaagaatgttaaatagtttttttaaaaaatagcttgttgcttgcaagaaagtccatataatcttattcccccccaaatataattttatactttgcactaaaccaaaatagcttatggaaaattagtattaaatagctaaacacagaaaacctacagctataaataacataaaatacagtttaactttaatgtgatgcttaaacaaagcaaactatgatgcaatatgaatcaacttcattaattggacaagtccagtgaggcacaaattagataagcactaaaccctccatgatgtgcaagtgaaacctccaaccccagcaaggttctttctgttcttgggctatgtccaattccattccagaaaagccacagtttttacatgttcttgacttttttactgaggagacgcacaatatatttcacccaagtctgttttggatttgcgcacacagacaactttttctttgtgtgaaagatgatagcattgatgtcacagccttcattggccagctgccgtgtgaagcccacaataaatttaggatgaagaatacggtctgtgtatccaagacagcagtcaaagttgcttgctgcttctgattcgccgcagaggtggagtagcagcactgacatcaaagcagccaggagcaaactcttggtacagcacatggtttttagctcaaagaacagatctgctcagtgttgagtacccagttctttgggagtg

SEQ ID NO: 158399 - DNA, 1000 bp, Homo Sapiens
ttttttttttttttttttcttttcatttgcgtttatttaaacacagttctcaaaacatttgagtgaaattgggcctcctttggtaagcaaaggacctgaaaataatatttaaaaaatgaacaggcaaagtcttcagttcatccatgacaggtatagtgttcccttatcatgtactttgaagcacccggttttttcatatagtctaaaagctagaagaacaagagtgtatttgtggtggaatgtattgtcacttgctgataactagttgaaataccattatccccttgtaacacctttaagaaacagccttttaaggcatacactgtgtaactcttcgtatttcctgctatacatattacagattacataaaagccgacaaatccacattgatataagcattaagcactggctgtattttaagatttttagttctaatactagcagtacagagttacagagcataattttaaacacttagttgcaggtatataagtatggtatgtttcatggactggaggaaaacgggcatttgtctttaaatttactactgacaatctgaatagttctgctaagcattgatatgttagaaagaaaagtaaaaatcaaactgtttattgttgctttttgccatttggtagcattttacacaggcttcgatcttcagaataccctggattcagtagaaaaaccttttaaatgaagttttgtacaatagaaacttctcagcagtcaaaatttagactgtaaaaaaatacatgcaaaacatacttttctgaaaacacttaacttggaacaaagcaccaaactacacaaatgcagaatgaaaacagcatttcaactccaccaaaagtagtcatcgtaaaaggtgtaaaagtcacctaacttcactaggcactgttcactttttaaacaagagacaataaaaaatattgcccacaaacaatatcccagctctagggcaggtttcagaaagtcttcatgctttaatagcgacgaggt

SEQ ID NO: 158400 - DNA, 1000 bp, Homo Sapiens
ttttttttttttttttggcatttcaacagattgctttaatgtcaaacctcacaatgaaggatacttgctcaataaaataatgcactttagtgtaatgaaaagtttaatacatacaaataatactgaaaaaaattcctagtgactggctagctggtaatatgctactcaaaaattgcctttcaaacctaaaggacctagattgctttattatttgtttacactatcaaagaagaatattttgccacaaaatgaataatggacaaagaggccattgacatgtatacttttaaaaatattaactaaaaaaatagttaaaagtaaaaaattttattttaaaagtaaggaaaaagctaaactggttatagttgagattttaattgttatactttgtgaatgagggggagttaagcgcttgaaacattttatattatttacacttaagagtatgaaaaacagtgtgagactacatctggctatgttattataattcagaggaaatcattatcaagtcacaccccttgtagcaataaaatataacaaagcaaaaaaaaaaaagcaaaccaaatagaatccctcagccaacacaaacttagtctattcttaggggttgccatgatgtttctgattaatggtaacatattccacgagtgcaaataaaacatcagaaataaaatatctttttcactgaataagaaagctgttatttgtgtgatcttagtaaaactctgaaaggaatttgtaaaactcattcataatttaatcaaatgccttagtttttttttttacccccttggtataaaagtttacagatgagtttcatatttcatcacagttatatggtctagtgcatttcagagtatttggacattatcaaagctgtcctttcccaatgaaaacatttaagaaaacgttaagcacttctcaagtaacatgatgtggaattacactttttgctcttacctcttttaggtacacatgtattattcaacaaagcaaaact

SEQ ID NO: 158401 - DNA, 1000 bp, Homo Sapiens
ttctttcagccaaatgcaaagtagctttttaataatggatttgttttgccagttgtgcctgacaaacagccttgcattgctttagcattcatctgaaaagaaaaggcctccatccactgtaattgcagaattctttttttttccttcaaagccagatagcacatgcttcttgagtcactttaaatagcattaccaaatattgagggctacaatgatgcatgcacaattttaaggttaaaataatccctggccctaaaatatggtattgtatttcataaaaacatgagtacataatggaaaaaaattaactatgcatcttctgataagattttcaagaaattatatctttccaaaatcatgttgggggcatctacatttcagtataaaaattaggtgaattggcattttgtatttctaggtggcctgcaaaacaacaaaagaagtaagtaactggttatcatttttatattgggatttaagaaatctcgagtttcaagaggcgacgtgctccccgggctgcgagaggccacgataactgcactattggagccctgactcagacaccccttgggtgtccttgtagtgactagaattgtctccctcttgtcccagcgaggacaggggtgtcggtgaccagaggggagcaggccaggctgagcttctataattctggaggaatgagccgtgcctggggtgggccacacggggaagaggggctcagcactttgtgaatcagctggtccaacggcacttgctctgcagagacctcctgggtccatcacaaggcagaaatggcccctgtgatgatcaaggagggtgcagccttgctgggggcactgaaaatcgttcttttgtgagcctcctgttctccgacgtgtgctgctctaaccaagtttcctaaataggggagagaatgtcttttcctttgcaatttctagatgacttgggtagtcctaaagttttggtggctctccaagatcatttagggcagctaatatgt

SEQ ID NO: 158402 - DNA, 1000 bp, Homo Sapiens
ttttttttttttttttttgagtgtgaaaaataaactattttatttcagtgtttgctccttgcggttcagaagcacatctactgcctggttggaacccaaggcttttataaaaccgtagagaaatagagctctatgtatagagaaaatatacatgttgattaattgtgtgactctttcctgtgcaaagcagaaagttctaaatgcaacagcatgattctctccaagtccttccctgggatttggggggccctggaggctgtgatctcacctccaatagagaatccccaattcttccagcccaagggaggcccagtcatgtagaaagagcaggagataaagtcaaagctgacaactcatgggttccccaagcttcctccggggcaggggctatgtttgggggccttagccctgcaaagaaggggtagctggggtgccaaccttgttggttagtgaccagcactggcagctaaggctgttgggaagtctaggcattgcagcgggcaggctcatgggtagagcaggggtgtccagggctcttctcccctagaactggggtctgaagggtggtacctgggcataggaaggaaccaggacagggctggggacagaaggtggtcacagtcatggtttcactctcagaaatatcctgggcctatggcttaaggcttcgtggagcagggagtggaccttgtggttatttacaaggctgggccatataaaagcattgcaaacatggagtggagaggatccttggagatgagctggttcaatcactcctctgaccaacaaggaaacaaaggcccagagaggagaaggcagtgcctggccagacgtgggacctgaacccagccagggctctgactcccagtcccccagtcccctctctacctccttgtcttggctgagtctttttttgataaaggccccagacagcctctccgacagtctcaggtcaggctggggttataaatggagcagtggactcagagtcagaggccca

SEQ ID NO: 158403 - DNA, 1000 bp, Homo Sapiens
tttttttttttttttttgcttccagagcctttatttgcaaatcccaactttccagactatccccaaagggaacgttctttctttctcttgttttctgcttgatccaaggggcagcctcgccttcaatgcagtccagctgagtgaagctaaggtattttctgagccaacaaagatgatttcaggctctatggctcgaggcatttccctggatgaaataacacttcaaaaagacttaaggccacttgtgtctctctcttgggccacagactttcagtaattccaagagcaaagctccttatacaaggacacagacagtacgggagccttggaagccagggctggctgccccttgccccagcttggctctgggcaaaccagccaggcaccaaaagcgacttccctgacatggagttggcagcagttcaagcaggaccttaatcaccaaggagactgagcacccttcaggagccagcatgtgaatctcaatgtccacatgaagatgtggtagatggggctgcagcgacctcgggcagggaaaccactgaacaccgggctccagccaaatgcagcataattttgtggaagtctagaaatgctgactgtccttgggaactgctcaatattgggaaaatgttatcagctccgcacactgccagctctccccaaagagacatgagagcctccaaccggaagaggcagggcggtggggaacagctctcaggaggaggcagcccagggcaagggaaagttgctgagtcggctgaaagtctgaatggtgccagctccactgcacacaggctgtgtgacctctggggagcccctcaacctttctgagcttcaaattcctcacctgggatataagactcctacctcggcctcctaatgaaggctgagacgattggtacacagctccagcgtggtgtcaggcacacaacaggtgctctccctaagggcttcatgagagcgactcagcagcacaaagccatgggagaggcaccgg

SEQ ID NO: 158404 - DNA, 1000 bp, Homo Sapiens
ttttttttttttttttttttttcaggatggataaactcctcttaggaatggggcaacaaacagctgcagacaaaaatatactctgtaacaacccaacatgctagaagattttccagtttaaaagacacaaaatcctaaatgtcaaaactgcagaggaactcaagaggccactgtccaaagtctgtcacagtcctccatatggcaaagatgaagaaaattggcaatctttttaggggtaccaaggatctcagtttgtacggtctttataaatgcagagcaagatgtggctttcctgcccccatttcacctcaaggcatcttcagcaaccccacatggcttccctctgtgcgcatgaaataacttgaggccagggtctctcagctttaaagccttggaatcctatgcattgtttgtttgtgtgtagatgtgcagtttgaggggtagcttctctaaggtgtcaaactccacaaaagttcagaatcatgtcactggatcctgagtccatctccacagaccagggtgccgctcaggtcagttgctgtggtaactgcagcagatggtccctttagcgatggagtccaaggacatcatggccaagacccagagttttatatcaactgaggaaagtgaagaccagccagagaggctgcagtttagggaagccagaggctcctcccccaccacgatgccaggaaggactatccccagggtgacggaaagaaagcactggactccagcagtatgtccagctgattcaggtgtgctaggttcccagcagaggagggtaagggaggagatccaggggccctggcttagtcatcgtatctggtacacctttctcccccggagaaaattcttgcaaaaaggagaggatcctacacagaccaaaaatgctggtgtcagggcttttacaaagtacctctggtgctgtagaacctgtagcaaggtgctcttggcaggcacccggtatagttctgccctgtcctcatcctcaaagtag

SEQ ID NO: 158405 - DNA, 1000 bp, Homo Sapiens
tccaagccaacatttattgttgcacaagcctgttgcagtcctgaggggatcttctggcagaggtgtgggtaggaagctgagtggccactggggtgaagggcagacagaggaggctgtgaccagcaggctcctatccagatgatacatgagatggaggcctcctcagccacacgccagggagggtggggtggcaaggggaattcaggataatggcattaataatacaagtggtaaacaaataaccaagaggatctggctggttacgatacacaaaagttagcagtaagagtccgtgctttcacattcctatcagacagatctgagttcaaatcctgtatgtgtagcagggtgaggtatctgctttctgtcagagcccatgggtgcacatctctgagcctagttacaacagttggcacataggtgggtggacaaggagggcagctcttgattcctgttgcttccacagcacagagagataagtatggctggtgtgacagatcccacttgacagatgaagccactgagacttggagagcaggtaggcttagtccgagacctagcattcgctggtggctgccttctcatttcccagaggcttcagagtccctcagtccttgggttgcaccgtcctcccaccagactgacccaggggccagtccacttcggtggggaaccactaagataggtgtgctctccaaacaaaaactccagaataacccactttaaaaagctgataactaagcgtaaagagagaatagggtagtgagctgcatcttcagtcaaatgcctgagtggtaatgcttaacccaaaggaacttgacagcaatggtgaaatttcaggcactaccgtggtgttggtgctggtgaccttccccgggcagaacctttctgccctcaggtcacaccagtgttgtttgaggatccaccggttgctttcctccaattgggcagaagagccagcagggggcagagtcaggatgaaagtatgtagactttttgc

SEQ ID NO: 158406 - DNA, 1000 bp, Homo Sapiens
cttaaaataaaagttaaaaagaaaagtaccatcctcccacagggtcaaatacatatgtagtcgatacaagatacttcaaaaaagtcttatacaatgagatttggttttgcagcttaaatttcttcaatttaagggtacatcaacaaggaatttattgaaatacagtgtatcatacaaatagaatattcacatgaaatgatcaaaggaaggggtaaggagaaaagtattaaaactgaaaatttacctagtgaataagtggacataacaattgagaatctatccacttcatgtcacttatggaaacaacacattaagattaaactacatgtttgctagagtaggagaaagtatataccacagggaccatcattactctagagtgggtctatgcataactcctcaaaaagaggccatcgttggtgtttatgtgctaaaagttgtgtattttggcttctgagaaccataaaattgactcaaagaatagtttcaaagagtaaaagaagaaatgcgtgacaattgaagacatggaattaaattggtttgtctctaactgcctcttagtaatcaagagttcttgcttggcaaaacctcataaaaacagatttaggatttaagacagtgtcagtaaattggtacaagcccatacacaagtcctcaaagtgatcgacaactactcagaaagtaaaaaacctgggatcagtacaacgtgatttaaaaatgagaagtgaatgattattctggatttaattcttatttactaggctacttggttctttgtgtttagtagtattttatctatttaagttcccataatagatgtatccagtatatagaacaatagctaaatactcagagaggtatggcgagagagagagagagagagagagagagagagagagagagagagagagaatgaatgacaaccagcttgataatctcctaaactggggtggggtttaggggaggaagatgagaggggataagcctcttcaaaatctcc

SEQ ID NO: 158407 - DNA, 1000 bp, Homo Sapiens
tttttttttttggggagcagactggtgctttatatatacacacacacagcagaaggtacagggcctcaataagaaaatacactctgtgttcaggtgaacccccatcaccacccacgcagaacactctgggctgaggagagggaagggcacgaccataaataaagactagaagggagggtcactgctggaagggcaaacacaggcggggcgcgcactgctaggaggagacacgacctgttctttcccgggagagagcgatgcagcggcacaggagaacagtagccacgactaagcctgcaatgcctggcgggggcacctaacacgaataagagaagcggggcggacacgagaagcgagattgcagagagggcttttttttttttttttctgtggcaggacccagggctctcaattaacatccatgaactcagagctgggtggggagctgcaggcaggggaggctggggcgccagatgagccggccggggacagcaggcgtcgcgccacgtcctggcgttggtagaagaggacataggctgccttggactcgatctgattctcattgacaggggagacgctgttgtcatcaaagtagtgccactggccgctgtccttgttgcaggcaaatgttgtgtagtgtccatcacgcatgcccccataatggttggaaaccgcgatgaggtcatatttgtacagctccggattcgactcattctgtggctggatgacaaactcagagaagtccaggtcccggataggaaactccacgagggtgtccagcttctctcgggagaacttggtgtaggaaaagcgtttcaggtggatgatgagaatctccggcagcatccacaggtccagcttcttggttgccagctggtgctgcttgcaggaagggcagtaccaggggttttccttctccagggtctccacagtggtgaagagctcaatgcactcctgcagccgcacgggagccttcttcatcacgtacccgacgcagtca

SEQ ID NO: 158408 - DNA, 1000 bp, Homo Sapiens
atttttaatcaaatgctgaaattgtaatatctcaattatatcaaccagtagtttcttttttaatgagaccctgctttgaacgttaaacgttttggaataatggaaaaggagctaggacaattcttgctttcaagtaaaattgtgactgagcagaaaatcagccagctatcttggtgcagagaggtactccaagtaccgtggggttctgatgacttccacgtcactgggatccaacagaaggaaagttttagaagattcacctaataaactctaccaaagaaacaaaacaagcacaccaaatacagtcttatattatgctccagcatcttggcatagcaaatttttgcatatttgttttaaatctttaaaaattcccattactgatacgtaagtgttctttattccacccagagattgaactgtcaaacattatatataaggaacatatgtgcaactgaaaatagactgtcacatttctccccttgttttatattttaatattctaggtgtaagaagtaaaagctctgagtaatacagctgtcacttctcggacaactgctgtcattatggtaactttttcctcattggctacactaacttggtgtgaagccatgctaaatgttacagcataactatagcttcaaagtgattaacctaatatcagaataaaaaggcaatgaaaaaaatctagaaacagtgttacatcaccaattttccacatcaaccaaataatttaaaggttaccagccttacattgctcatagcaaaattgactccagtggcaaagaattaacatgaaactattggtgtggctgacatggatgggctctgttttgttgctgttggttttttttttttcttttttgtaaaggagctgatccaactgccatgaggcaggcaacactggttgcagagtgcagtgggtgtaacaagaaaattaacttttgtagtttgtgtagatctgtgagtctcatcaagaaaaaagtttcttgcttaagaa

SEQ ID NO: 158409 - DNA, 1000 bp, Homo Sapiens
tttttttttttttttttctcaggagattcttaggagagttttattcattcattgatccagtatttacaggggctagaggggtcaagctgtgctcagcccagaggcagctgccacacttgccagcaccccccactcagtcactatgtacagataaaggggcctgcttggatcacctttttcaaagccatctggcagaggccatggggctgtgttggggcctgggctccagaggcactgctgggcccattaccccttggcatcaggtcctctggaacacaggggctccaacgggttgtcttgatcctgctgtcccccaccctgagtgccttgcagaggctgaggaaactggagtagcaggaagagctgagtggtgccagcttcctataagcaaccctgtctctgctacccctgagagggagacatggtaatactgaggggctggacagaggctcttctgagcctcaagcgccagggacagagacctagagcccaatttaggcccatagctagggccacaacactgaaggcgaagagccctagaaccttgctatggagagcagtcttgaacagcctggctagaacaaggaagacagttcacaggccactgaacagttcccacatgctctgctcaggccatgggatcccagcagcctgctcaccccaaccccactgggacaccctactcccaacccagcccagtgctgggtccctgagtttggcactctcctaagaggaatgaagagagaagacctggcttccttacaacagggacaggctggtggctggggctagagcagcagggcccagagcccagggcccacccaggcccccagctaggaccctgtagttgggaccgtggcatgatacaaggacctgggcccaccaggacagctcctaggagagaaagcatagtcaggtaggaacttatgtcaacatggtggcatgttgggttggagcccagaaaaatagatgtctctgataggtaaaatatatattctgc

SEQ ID NO: 158410 - DNA, 1000 bp, Homo Sapiens
ttttttttttttttgctttttatttttcggtttatttaatcttctttaacacagccattgttggttcaacaatccaatatttgaggttacattattgcaaaaataaggacatagctgaataggttatgccatcaatatgtttgttaatcctatcccttttattaaagacaaagcacagtttgttaatattgtcttggattaactctatttgtaaggttacttatagtggttcatactaaaggcaggggatttgcttcctgggccaattgtctttaaactataatttaagaaatcattagcattttgtaattaaaaacagataaagcaatattttagtacaatgttaggcagcagataaaattaccctgtctgaatatatgtgtacatatacataaaacgctagcatgctttaagaagttaagaaatattaatattctgtgaaattaatatgtaaataaaatataatctggaatgaaattcccattatgtacaaaaaaagaaaaaatagaatctttcacttccaaaacctatagattttagcatcttataagcctacatcacatcacatggaatgtaagggttagtttaaatttgaagagcattaaagaatagtatgagctaagtttccacaaaacagtatatattaattgtattttgaagatttatattcgttccagtgttaacaagacaacatccttttgaacttccttaaagaaatatttgtaatgtcctttatttattaagaaaaatacagctttaacactataaaatgtttattattaaaaatattagaaaataaaaatattttgaagatgacatgttattccaggatatacgaacttctttagtatttttatttaaagagtgaaatagttaagctactattgtaagtattttactttcaagcacatacattttttctctgttttcattcttttcggcattctttgtttcctgtttctctcattttccaaattttctttcttactttttgaatagt

SEQ ID NO: 158411 - DNA, 1000 bp, Homo Sapiens
ttttttttttttttcagagagaaagtgctttatcagccgggctcagccccgcacacggactcgccaggagtaggtggtcagcacgcgctgctggcggcgcaccacgcaggtgtaggtgccctcattgacggcgttggcgatgatgctcaggtgcgcctcgcccagggccaggtagccggggtaggagaactccaggggctcctggtccttgtaccagtacactttccctttcttgtggaggatcttctggccgcaacggaaggtcacgttcctgccctcgggcaccagcctggttttggtcctggggggcggtggggtggtggccaccgtggggaaggggaattcgtagcagaagtcgcagctgctggggcagagcctcttcatgagccgccggcgagcgtcgcagaagcccctccgcgcccaggacgcgcacacgaacagcctgtcgaggcatccgtagagccggtgcagcccccacagctcgtcctgggacaacgccttccagccgcgcagcgtggcgttcaggtgcatgagcgcccggccgtgttgtgagtgcatcaggcccagcgcgtggccgatctcgtgggccgccacgtgcaccaggtccgtgagccacacgcctttcttccagctgtagcgcgtggggcccaggacccagtactcgctgtcgtcgaagtggatgccgccgtgcggggggaagaaggcgtgggccagctcccccgtggggccgtcgaagcagtggtgcagcgcggagaccaggcagtccgtgtggttgatcgggtagaagcctatccggaggtcgctgggctgctcgggggccacctcgcggaagctgaagggggacacgtcgctccacatgcggaaggcggcagctagggcccgccgcgtctcccgcgggctcagcaggttccgcgggaaggagaggatcctgtaggtgaggttgaggtggtcccagcgcagcctggctggagtcagtgtgtagcggcgtctgcggggggcc

SEQ ID NO: 158412 - DNA, 1000 bp, Homo Sapiens
ttttttttttttttttttattattgttcacattttttattgaattccaaatgtagcaaaatcattaaaacaaattataaaagggacagaaaaattaagaatcaaacatcattctggaccatgggaaccttgaaaaggcatggcagtggagaccagtaactagtatacagcttgcctgagaaggcttagtaacaaatgaattcaagtcgtattagatattctaaaccttccttaatataagatgaagtgtcatatgttaggaggtaaaaacgtaacacaaaattctgggaataagaataaagtctggaccctgagctcagaatgatccatagcatctactgtgcaaatatattacagcagacattatagcatattacctcctgctgtacacacatgcacaggcctgaaactctccaagagcaccataagaatgattccctttacctcatctagataaaggctgaaaaaaatgtattctgttgcagatgggagggaaaaaaatagacaattacgttgaaaatttattaaaacagaccagcttgaagtgagtttattcttgtctgtataatcaccaatgttatttccaaatgtccgtgaaattatctataatcctatctccttgcttgctttggtaggagtatagctaacaatatagccatcttttgccctcagtaagggctatcagcagttccaagctctgtgagattatttttgcccttcttttattcaactctagttgaataaagttacttccaatttgaaagctttagaagacccccccaaaactgttttggaagattgtctccctagagagtaagaacaaatggatagctctattccatttaaacctaatctctgacatcagaatagggatcatgctcagcaaatccaagagcaaggtcatttgtatccattgctctgacttcttcctaagggtactcagtgccctactgccagctcagggtagagtggcagactttcctcctttctttcactctcag

SEQ ID NO: 158413 - DNA, 1000 bp, Homo Sapiens
tttttttttttttttttttttatgtcagatgttttatttatagataattaaaatttaggcatatacatgacacaaacattatatatagtacactttccatgatagaagttatgatgctgttcacagaaaggcctcaattcagatgacataatgcatatgctacaaggggacacctgggaggggggacaccaaatggccttctggtttttcattttggtttaaatatcctctggatgcattcaagtaatactaatcatttcatgttcaaaagtcttttaataaacaaattcagagtaaaattaattgaaatatttataatacgatttgttacacagttatttccaatatacaatcaagacgactcacgacacttgaaagaaaggagaaagaaaaaaaatcgattgcacccacaagtaaaaaggctttattcattttggggatgctgcaatttggtatttatataaacatttacacactttagtaaacacagtcctacatgtaatgcagcattacgggtgagaagacccttggaagtcgagcgtccacagtgttccacgcgcacaggcggaccttctcactgtcattcccatcacggccagtcagtctctccactccctcctcccgcctggctcgaggacggacgcttctcatcagacacaccaggcagcctacagtctacacagcagcgagcgctctgctgcctggctcaggctctcatctcacgaggacgtttccccatcttagtgtcctgttaaataatcttgtgtagagtccgaagcaaaggagtcgacatcctcgttatctgaatcgtcgctgctgtcgtcggcggctggctctcctgtaagtgcgatgcgagcgtagtcatctgtgtctatggacttgcagaagtggatggcgtacttgagcttctcctccagcacctgcttgcaggaatacctgggcagcttcagcaagaagaaacaggtgtaggactcagggaggaagtggtctggagggttgt

SEQ ID NO: 158414 - DNA, 1000 bp, Homo Sapiens
tttttaaaggttcaaaagtgttctgtttaatacgctttgtctggtagtgcttgggtgcctgtggttggtttctctcactggaaccagtcctgggccccactcgcctggcttcctccagtcgccccaggtcctggggctggtgtgtcagaagctgcctttgtcctctccattcatccatccttgggcctgtctggcctatgatgccctcattcagctctcagggtccagaggtgactggtgtggatcctgctcgctgtgccaagatggccctccagatgcggcataccatccctcccctgatgcgggtgtagatgaggtcatctcgagtggcataggtgagcagagtgtggagggtgaagctatggttcaacagcatttggatggtgcctgaatccacattcagttcctgtagccactgcaccaggccctggtccgttgaaagagcagttggaggctctggggccaggacataggtccgggcttcctcattcagccgctgtagagcccgctgcaccagggcctggtactcccgttccttccccgccaggatttcgcgcagccgatcagtctctgccctcaagaggctcagctgcaccatcagaggagcggggccctgctcgggctccaccggaagcgggctctgctggcctgggctctgctgggagtccccttcattactcagctcctctgacctcggtgagaccgcctccttctccacctccggtcctagcacacccagggctgcccgcacagcacggctgagcagtgagtccagaacgaacatccagtgtggacggatctggcgcttgcggaggatctgcttcaccgcatccgggaaggcaaacagcggtctgtgcagaagcgcaggcccaaggccctgggccctcagccgtccttgcagcgcccgcagctcctgggcgagctgccggcggttgggagtgtggatgtgtgccccgaggcagcgcagcagctcttccacatggtttctgcccagacgggc

SEQ ID NO: 158415 - DNA, 1000 bp, Homo Sapiens
tttttttttttttttttttttagcgtttagattggtttggaatgtatagccattgatttcaggtgttctcagaaacaggttaccatttccttggaaaacaggtgggatacagtcaatgcccacagaaggaaatgtcttttaaataagttagttactcggacaatattattcactccttagaaaatatagtaggataacaagtcacagctggcagggtatgcagtacagcaccgatttcacagggggcttatgcaatcctggagtcagcggttgttggcttatggtacacaaaataagagcagtcactggaagtggggagaaaatggtgaaaggcaggcagtctcccgcagtcctacccagccttttaacttgctaaaaggagaggctgtgtttttagcatctttgggagaacatttgagacagttcaaaaacaaaaacaaaacccccagtattattcccagaaagtccttgacagaaaagagggacctggtcagggttcccatgggggactgcgcctcccatccacttctgtctccacgtgatacaagacgtcagccagggtgtgctctaccacggcgccccagcccatgtcactcatagggcggtaagtgagatccttcggaggatacttgaagcatggtccaaagttaatggaaaccgtgcagctcttgtacagtgagatggctgggaagtaaaccccctcaaaaatatctttgtaagccacaccttgattgacaccatttttataaaatattatctcactatggggagtctgcttcaggctcttctctgctttatccacaaagtctttttcctcaaaatacaaataactcttgaattttatcaaagccttatctttgtatgtgtctggcaatgacttggctgtctctgtgtcttcaggaagattaatataaaatcccaggacgtctccctgtccatagccagaagagtagtgtttgccaatggactggtggaacttggttccctttttgctccgcca

SEQ ID NO: 158416 - DNA, 1000 bp, Homo Sapiens
ttttttttttttttttttttttttttttttttttttttttttttttttttttttggatttttatggactctttattagggtattaagatattgaaaataatacacgtaaaccacaaaagagtagcattccattttcttgaagtgcacatgatattatgaacaatacaaatgcattatttttatcattaatagtttaatcattaattatctcataagtcaatgcagagagtgaaattactatgaattaaacttctgttcacaatgtacagtattttgcatatgttgactttacttaattgtacatttttgtttccaaagttaatgttaaatacctggtgcataggttgttgtcaagcaattactctcattgtcttgtcatacatgctaacattttgctaaatataaatctacaagtatcacagctgcatatatttctgaagtggttagaacagaggaggatgctggaaagttgagttctttaaaatcttcgttcaaaacaagagattttcatctatgtcctcttctttaattccaaagcagtggccccactccttcagggtgatgtgcttatccttgttggggtcacactcctcaaagaaacgggttatgcagtgttccatgggcaccagagatgctcgcagaggagcaagttcagaatgtgtcaagactctatccatagggtgttggtcaagttcactaaactgccagtgcacaggatacacatacatgtggtagtttttcttaaagtcccttaagagaagatcaatgggatggtccccagccaaaagcctcttttcatccaggtaaattttcttgactttatttctctgcttctcatttagataaccagcatgttcagagttggcttcataaagctgcatgaggatattcttgagccagtctctcatccgtagaggaaactgaatcacttcaaagtccgtacaagtaggaatagatttgcaggctccaaaataatccagctggagttgatgcccctttt

SEQ ID NO: 158417 - DNA, 1000 bp, Homo Sapiens
tttttttttttttttttttttttttttttttttttgtcattttttaaaaaatgtttattgtttttatagacatacactgtcaaacggaagaaattaaagccacatcctcaatattaggcaacagagtttctaagagtggacagctccaagaaggttgtgaagtgagttatgttatgttataaaaatgtgaaagccattaccactatatcctaagttttattttagcaaggtattccctattacatatagtatattgcagaaaatgaataaacattccttgtacttaatttgggaactgctcagcagagaatgcccaaattttatattctgaaagaattaattacacttgctttattttttacattaacagtacttttaaatcacagttctctaatatattctatatttttaaatatgatgaacacaattaaatgttttcatttatatatattgcaacactccctccaaatctttcatactagagagatcagcaatgttgctttcttgccctcgtcctcatttcagcgaaatgtaataattctcccattaaaaaaaatcagatattcaaaatattgatgtaaattgtaaagtttaaattaatcctttcacatattcaaaatattgatctaaattgtaaagtttaatccttttacattctagaatgtactaatatattaaaaccatacagtgtgaataccatttatttatgtccaaacatggccacttttccccactaagtttaatttaggtcacctagtgaagtcttttttaactcataagataggggagggactctcccttaaatgtgcagtgtaacaaaacaaaaattcttttcagaactttcagcagtcagtggtcacgagatgttactaaggttaattaaaccatattagccagttacataatttctaaaatgatagattacaaaacctattcccttcattaaacagacatgacaacccaattctctggttcctgaaactggattttcactcacaga

SEQ ID NO: 158418 - DNA, 1000 bp, Homo Sapiens
ttttttttttttttttttttgtacttggcagcagcttttttaatttgaacactttcttcttgaggacacaccttcagtacagttaacaaatggttacacctgaaatctgctgagagcagagctcaagatccacaattgcaaaggccactgctggctcacttcctcacaagctgtattacctttcagagctgagtgaggctgtgctctacgtcccaatacttgttactgagtggacatgaggtgcaagtttagcaccttaaagggagaaaaaaataggttagtatgcagaatgtgattttgtcctcacttcaccttaagtcatctttttacacttgccaatgtgagttctgaaaggtactactatatctgcttagaaatggctgagtgactgtcaattaaaagccacatgataaggtaggttacaggtaagaggtaaatcaggttagacatgcatgagaacatgtaggcacagactgaatataagcacaggaacactcgtgaaacccaactgagcttttcttttgcctagaagggctaaatcctgccttctacatcagttcccatttatgctgaaaacccagttgaaagaattgtttcctacctggacagtgacacagtagtttgtttcataccagaaacacattgctaaacaaaacttaagagtctcagtttgggtttttctacaataaagtgaattccaacagttggcatttgccacagtagagaccactaaccattccctaattgtgatgattttattacccagcaccatcttctggagaaaaatatctgtaaggtgctcagtctcagcagaacacttcactgcaagctctagttcagtcagttcagaaaggctgtgaattgcccaccctgatttacagcactaattttaataatctgaagacaaattcgcttggggcttatccaagggactagtcttaaacctacgtaatttaaattgattgcattttataattaataaaatcccctgtaactcaat

SEQ ID NO: 158419 - DNA, 1000 bp, Homo Sapiens
ttttttttttttaacaaaattcacattttatttagattgaaataaactatacaaaattgattttcttcaccaaaaataacagcaatattttccatatttttctagataaaccacaacacttattttgtaggttttccaggttttgcttataaatcaagatgaggcagtatataagagtcatggaaaaagacagagaaaaaaaacagacaaatcagttgtcagtatccatggcctctgattctgtctcaaccatgaaacagaagtgttcaacatatacctgctaaaaagcttaggaagatgcaggctccacaaaggaatgtaaacagcaacgagatgtggaacaacagcaggcttttccattcaaactttgtcatttgtttctttaagttcaagaaagacaaaatctacactgaaatccttgtttggtgagctcacaagcttttctccggtaatttcttgtaactgtccagtatagatttttaacatacttaaaactcctattagtcaaaggtcaattgtgggcttcactacaacattttataaaatgtattccttcctcccacacctcttcaaaatatatttcttcaaagaattcataacacccaacaagtagagatccacagtgataataaatgctatgtctaaaatgacttaactgaaacaattccagagtgccatcaacagagatcacgcaaaaggaaacatggcactttcaacgttctcttctggaagaacaggtaggtcttcaaagcttgagagttcaaacaggggccatttaaacaggtagattatcaatggctaatgtattcaatggagtcctataggcaaagatatttagtgattaagtggtctacatacaccttacggctttttcttccaaatatcaaatataagaaagcctatttttaaaagtctcttaggtattttccacagtttcggaattatctgtaggaagctctgacttacttgtatagagtttaatatatgtgtccaccattaa

SEQ ID NO: 158420 - DNA, 1000 bp, Homo Sapiens
ttttttttttttttttttttttttcttcttagataatatatattaaaaaataaacctccaattcagggtataaaaacagagcgaaggcacttgggggtgggggtggaggggtggcccccacaggcaatactgagatggcccgggtcaccgtggtgccctccagaatggagccctgagtcccccaagcagagggcaggagggagagatggccgaggctcatgcggggccagtaaccccagctgggcccctcccaggcgtggcccacagctccctctcctcaggccctcggggtgtgagatgctgcggcagctgtgtgggtgggggtggtccctcacgtcctctcccccattcctctccttcttgcaaaaggccttcctgggcgggaacctcaagtgcagccaggctgggggacagagttccccccaagctgagacaggaggggtctcaggcggcaaaattcctcctccaactcctccagctgcttcatggtctcctccaagctgagcaggttctcctggatttcctgggtccgtgctgggctcagggggccgccccctgggaccccatccccatctcgaggaggccccgccccattgtcttcctccgccggaaacagaagctgcttcagggacagcactttccgaagggccgtggcagcgagctggccctcggggcctggtctgcagaagggcaggaggtcactgaggattctctcggtccgggcatcagctggagacgtctctcggccaccattgccgttctcagagctgctgaggaggggttctcgggtgctgctcgggctgggccggggcttagggcgagaggcaggggcagggactttcagggatccggcagtctcagtgatgagagcacaccagtttttccgctccgacacagtctgtgccaccagctcgtatatctgggcctcctggtcccaggtaaaaaggacgtagaaggctttgtgatcggtggccacctcgcgggtcatggcggaggtgag

SEQ ID NO: 158421 - DNA, 1000 bp, Homo Sapiens
tgggttctgagtcttcactttattactatgtcaccagaagtcaccaccttcacttggttcaccacagatggatggatgtcataaaggagggtgccacggggccactggattcactcgagacttaaccaggtggtgggggggtctagagtgggggcccaggatggggaccgcccttcaccgcacacacacgcacacacacacacagatatatttgtggagccttatattatacatcttatatatagaaaatatatatatttatactatacacaggcagtaacgctgcgggaggggccggggcaccgacaagggctgtgcgcaccaggacatggggagtgtcaggtcaagtgcatcgctgggaggcagccggcccagtcccttctcccataaactcctgggaggggcattccccctttcgtgctccttagagaatcaaaggggtcttgggccaaggttaggggtctcccagggctaacaggcagggtgtctcagttacatggggaaacctgggatccccgaggctttgaagatcaagaatcaccagggaaggatggagtagggaactaacgtcagtcccctgggaattagcccctcaactgcgacacccccaggtggataggagccgtgcaggcaggacagtctgtgactgcccaggatgagccaactcagaaggcagaagacctgactcctgaacctctccctctgtgcttgaccttggacaagtcgctgtctccctaccccagactctgccgactctaagcgtccttgcgactctacacttatgtgaaaccttttttcctgggccctctcttgtgcttgatggggaggagggagccaccctgcagggtccagctgcaggagggcccttctccaaggaaagctttgggagcaagggagaagtaggggagggcagctgggaggaaaagggataccggacagagttgggcctggggttccccaggggctgtcctctgccaacagaaggagcgagtttccccat

SEQ ID NO: 158422 - DNA, 1000 bp, Homo Sapiens
ttttttttttttttttttctgaaatacattttattatcgctgtaccattctggggcactggagatggcagctgagaagcagagaagctggagacctgaagcctccacccttggctgtggctgccgagagaggcccctgcagagggagccccaggccacacccagacaccacagccagctcacagtgcggccagagggcacaggctgcttggggggtgagggtccccattcctgccacctctcacagaccatgacccacagggctgggggcttcccctgggagaaagtccttccctccccatggcccagccctggggaaagaaagcagagactaactcagggactgcagtaggctgaggacaagggaggtgggcttggggtgaaggccccccctcactcgcagagaagggacactaccggcagtagaggacagggaggcaggacgacggcagttagagacgaggcgtttcaggtgaactgtatgtagtgttactccggacgtgagcatggcctgggtcagtcgaatgaaatgagctgggcctcgctgccctgtgccggcggcccctgtgcctgcggttgctgggccacggggggctgctgctgggggggaccgccagagggtgccatctgctggtacatgggctgctgccccgcgatgtagggctgctggggtggcagagacgcatcctggcttgggagggtggtcatgagattctgcatgttgtaaggctggtagcccatggagactgactggctccccatgtagcccatggtgctggactgcggaggctgagagatggccgggaggctctgtggggcctgggaggccacgttctggtagcccgctgtgggagtaggctggtaggatgagtaagcggggctggcggtgggtccggcctgggcctggggggccgcctgcgccccagtggcccctgctgggtacatgtaggcactcaccatgctgggatcagccgcagtgctgggcatgctggggtaggggc

SEQ ID NO: 158423 - DNA, 1000 bp, Homo Sapiens
ttttttttttttttttcatgagaattattacttatattttacattttggtctaatatttttttctgacaagtatcaatgaaagcagaagaaaatccactccaatacttagttttcaagacacaatcctaaatatttaaaccccttgtagctggcctataatatatatatattagatgttatatacagtagacttaccaagtcaatagtttaagcaatcaagccacttcactgttcagtttctttacatcatgaaatgaatacttggtattaacctctcaaatttcaagaaaatgtagaataactacagatgtatataattagcatttaactgtccacaaatactttaggaaatcctatcatagtgtttcctctatataaaactgggaaaaaaacaagaattaagtccttttggtgaatatagcaaggcaatgtttagttcatttggcctgtaatatatatattagatgttatatacagtagacttaccaagtcaatagtttaagcaatcaagccacttcactgttcagtttctttacatcatgaaatgaatacttggtattaacctcccaaatttcaagaaaatgtagaataactacagatgtatattaattagcatttaactgtccacaaatacttttggaaatcctatcatagacagtgtttcctctatataaaactgggaaaaaacaagaagtaagtccttttggtgaatatagcaaggcaatgtttagttcatttttataatgcggaaatcctgatacatggtgctttcatctttgaacttccaaaaggctataaaattggctcttctcaaatattttagaatttcatttcagctatttcctttttacgttcagaagattgggtgcagacactttcactttgccaggaatgtttcttgataaatctgtgtcctttacgctgcggaataagtctttttctcttgctgttgcttctttggaatgcatgaaactattcaaggctgtttttgcagctttt

SEQ ID NO: 158424 - DNA, 1000 bp, Homo Sapiens
tttttttttttttttttggagttccaggtttttaattttccctgaattttttttttaaacaacaaaattggcaagaagaaaattcttcgacatttgggggctggtcgacatttgggggcaagggttccactgaaaaatcccccaaattcacgctgaggtttcaggtcatggttgctgaggtggaagatgaggtcagggctcttggagattttccaacccaccctagaacttgtttctaaatggctggggaagaggtcagtataggtccccccgttactgcagatgaaggcagaagtcattctctcccccacccctcaacttcttcagagatgtggagataggaggcttcgatctctaattgcctacgatctcttaaaaatataaaacacgtgcagttgactttggtacaaaaaagaaaacaaaagaacaacaaaacattctggtccctgtgggttttttccctcacccccaacaaaccattatggccaccccaacctttattccatcaactccaggaagccaggttatctcccagggcttccatgaaggacggagaaagggagaacagcagtaagaggttgaggggagaggagaaagggacatggccctgcccacagccctcctttatttaaagggcagtagggtgctgtggctgcagcctctcctccaagacggatgttgcaggggagggccgttagggcaagaacccagcagctgcgtggatgagcctgaatataccccagtagtgttcaaggacaaggccctctgatccctatggcttggttcccatgtccctggtcctttaaatctcccctctccccccataactaataaacaataaataaataaattttcctaaagttgcgggaagaaggcatgaaccactggcatctgtggtgtagctttcggatgtcccagggggtgttgtggcctaattcccctagcttcttaaatggccccaggtatccaaggatcccaagagctggcaaggacaatttgc

SEQ ID NO: 158425 - DNA, 1000 bp, Homo Sapiens
acccatggcttgatgggaagccatgaggaacaagggtaaagtgataaaactggcaagtggatcaaggaataaaagccaagagaattctgagaccagagggcaagaaatatctagtcgggattcaaggacagaactgaagttcaaatagaaaaagaatgttgcctcaaggattaggagctgagctggctatcagagctcctagtacatggtgatcaaataaggggcagttagagataaagactggattaagcaagagaaatcaggaccaagaaagattctaggtattcacaataattaaatgaaaacaagacagaccatgcagctttaaatttcctagcatagtagttccaggattctcagtacagaaataatctctggaaattaaggcgagaagataatgccactcttaagctcctgtgctatgtagaatgtttcccagagaaataatatctgagaaatcaggcagttatctggccaggggctacatcaggttcttcagttccctcaaaacaacttaatcacatacagtttgtcttaaaaggaagcctccaagcagctaaaacaaactttcaacagacattcagtttaacagatcctatactgtggctttaggaactaggccactgactacctaaaaaccccagcttgcccacttgaagttaacctctagaaacattagtgatctgtgaagttttcaccattaaaacaatgctttatcatccaaatcatacttgttcttctctttgctttccagttatgaatttgttacctttttgcatttgattatttccagtggtttggttctttttttttttttttttttttacatactcttgagcaatgctaatctgcgccccctactcccttaagtccttcttggtaaataatgttaatcttccaataggaagaagtggagtacattaccatttaagcaccatttatccagcctacttacaaataaagctatggagccaccttatacatgtgaaattccttaaaa

SEQ ID NO: 158426 - DNA, 1000 bp, Homo Sapiens
ttttttttttttttttttgacaaatgaatgaggagctaatgcattgctctggtttattgaacaacagtccaactttacagcattaaataaggggcaaccgttcaggaggggaacgatggcttaaaaataaaaatgaagacagagccgggacagttcacatttccacgtgagtgaggaaaagcgaaggattgttagagacgtgaagagaacgctggcaatgctacagaatggagcccacggaggcgtgggctgccctgcgtccccggcctcggggcagaacagggagcaaccccaaagcctgccccactgtgtcccttccagctgcccttctgccgagaacacccggagctgagggttccaagttcacggcggaaccgcttcccttaaaaagaaagcaaaggttacgtggatttctcccgtgcttccttttccacagacttaaaccggctcaggacgtaaggataacattctgtgctgcttgcagccctgagaagtcagcagccgtgaaaggcaggtagttcctttgccctctgacaccccgagttcttggggtctcggcagaacactgcctggagctgagtggggtcatccctcctagacaccgttctccccagcccagcttgtcttcacggaggcagagaacccgctgcacgtagaatccaagcaatatgctaagcctcctgaagtatttttcctccagttaaaaagcagttctacatgttggaaaacgtctttctgtttccctgaatgactgaaagcaactcgcaggaatccagccacggaaaacccctccgggggcaatattttaaaattcatttcccctatggtattcagtttaaaagagaagaatcaagagtcctttccggtaatcaaatcaaaaacaccttatgtggaaaagctggccgcacgggggaactggacttttagggctgagacaccgaagacataacctccggacccgtgagccacccacttttgttttgttttgagacggagtctc

SEQ ID NO: 158427 - DNA, 1000 bp, Homo Sapiens
cttaaatatggtttaatactcttctccatttctgtacatcacaacaccaagattttgctgcttagtatctctctgcagaggctatagagaatgcaaaggctacggttttcaccccctcttatatgtgtttgtatgtgtaagtgtaatacatatcaatatatattgatacacacatcaatatataatgcaatatatatcaccgaagagaacacattgattaaagaaatacaaaaatttggcatcatttccaaacttaaatagtaaaaataaaaactacaaaaggagctgcataccctaaatgtatcatgtgaaacaacaagcatattcaaaaatgtaaatttacatccaatttctctggtcttgtcatatcacatcagacccatttacaatggcaaaaccctaaggtactgctgtgaagagagcgtgtttgctcgctcttgggtgttctgcaaacaaatagcagagcccaaagcaaaaaagcctgttccggtgaagtctcccacgttggtgaacaccaaataatggactcttctcacagggggttgagacatcaggttacacattgacagacagtatttggacctcagagtacagtgtgagaaccagaaactttacatttaagacatactcccttcattcaagtgaaacaggattattggaacgataggcaggtctgtaacctgggaacaaggagctggttcagaccaataaagctacgagtgactgaatcaagtcagtaaagaacagcagtcaggcactaaagtgttaaaagtacccaatttgaaaaccaaatgcaccccactaccctagtcagtgtggaggtgataccaattgacttttaaaacctttggtccttcaaagtccatttggtatacttttttccatcgctaccactgggcacgtactatacactttgttcaactgtcaccaccctggcacgccatgaccttgcatatcagctgggttcaagtctgacttacagcccagctgtgaagcatca

SEQ ID NO: 158428 - DNA, 1000 bp, Homo Sapiens
tagacagagtttcgctcttgttgtccaggctggagtacaatggcttgatcttggctcactgcaatctctgcctcgcaggttcaagcgattctcctgcctcagcctctggagtggctgggattacaggcgcccaccatcacgcccggccaattttttgtatttttagtagagacagggtttcaccatgttggccaggctggcctcgaactcttgacctcaggtgatccacctgccttggcctcccaatgtactgagattacaggcatgagccaccacgcccggccaaaaacatttaaaaaatgactgtccctgctcaaatactgcagtaggaaatgtaatttgacatatatcacttccagaaaaaaactttaaatctttctataaaatgaatttgatacatcatcagcatgaagtgaagttaaaatctcttacaaagtaaattcaggtatatcaacaatgagatccaaaagtatcggttcaagatcaaagactcatatgaggtaaaggcaaataaagcccctcatgctttcagacatttacttgttatccttaaaatgattattgttctaaggtgcaaatcttatcattcagtgacctatttgctatttggctgtttatctcctttaaataaaataccatacaggttataatgtacattttaaaatcaaatatgaaagtacacatatgtgaacaagacattaatttaaatatcaattatattcataatacagaagtctaagaatgctatttggtcatttcaattagatgctgatatatttggtcaagaaaacccacattcctatcagcctaaggcaaatagtaaatgcctctatttttattaagtggactataaacagtagacattattgtttgatactactggaatgctctcaattagaacgtacactgataacaaatatgtctttctaatctgggtgataacctcaatgattacatggaaatctacaagtaacagtctataacttaaagcagtagagca

SEQ ID NO: 158429 - DNA, 1000 bp, Homo Sapiens
ttttttttttttttttatgtaattctagggaaaacaccctaaatgtgcatgcatctccaagtcctccaggagccacgcgtgctccacattctttcttttcctggcacatttttggctgccaggatgactgagaaaataatcaaccttcccatcagtcacctgtttctcttcctgagcagtttccttctgccactcagtcaaaaggcccacaaacatgttcaccaagtcctaacctctagaagggagagagacttcagagactgatttttagctgcaaccaaaatgtccacatcctctgagaagctgaacaccttctcctagatgtacacaaaactctaaatcaccttcaaaggtctaaaacagagtagtttctcagatattctttttaagaactgttacagactcacaagccaaatcccatgacccggctgtttttgtgaataaagttttatcaaaacacacggccatatcctttaaaaataaatagagccctgctctagtgtaatgggactgtactgtacccctaggcactgttggggaccacctaagcactctcctatcaaagacatgagggcctggaagctacaggacttaactggctgcagcaactacaattagtaaattttagtcccctcacggaaagtcaggtggcagaaggcacatgccttacagctcggtcttttcactcccttttataagtactgggggacacatgggaaaaatcctggagacgaattcctattggggtggcctccctgtctgcacactcaacacaatccatgggtgcctgggtaacaactaagtctgttcaccatttctgtgagtacctgggattcaaagtcaacttttttcatgaagacaggaagttacttactcagaccaaccatagacttccacttctccagtttcaaggcccctgacccagcttgacagagccaggcttaggagcaacgtggctcaacgtatgtgacttctaaggactgccttccttctgatgaac

SEQ ID NO: 158430 - DNA, 1000 bp, Homo Sapiens
ccaggagaagctgaagaaaacagctttttatttgttactataagaaccaattacagaatccgaggttaaaaaaacggacaaaagatctttatttctgagaactggcgtacaaaaggcagagggggaggggagggaaggaaagagcgagcgtggcctggggttgatgccagcttaggggcctcaaactccaattaggaaagtccggacaccggacagaaagagaaacccccaattaggaaaaaaaaaaaaaaaaaaaaaaaaaaagacatggcagtgcacgcccccctcccccaaccaggtaccaccacctgttatctgtttactcttcccctccccatcccctttcacaaagggaggcaaaacttttaaaaaattaaaaaaccctccccccaaaactgtccaagacatctgtgggtcctaccccccaaaacaggctaggttcccacatgggccaagttcctgcagtctgtcctccatcggcaagcatggaggcatgagacaagtctcgaggtggtaacaccagagggcgcccaacccctccagggacacacactcacttgctctcttccttaattcactcctcactcccttcgacacgaaagggaagggaggtttgggtgccctgggcatccaccctctacctctcagcccacctcccttccccacaggtgctcagtcctccaggacaataggctcattggtgctggcaggatgtgagggtgcaggtagagggacagggggccgcactgcaatcagcgttggcttcaccttcaggggcaagttgggtcggcgagcagctcgccgcatttccagatgggtcagagccttccgtagggccctggtatcctttgtggccacaaacaccacaggattgggggcatcagctgggtttagtttctgacgcttggctgctggctgtgagcttgaacgaatccctgaagccagaggccttccattggcagagaaaggaacccctgcccctgccatagtctcataggcc

SEQ ID NO: 158431 - DNA, 1000 bp, Homo Sapiens
tttgcacctaaatagctcatttatttaaaaggactcttttggaggggccctaggtaatggggagtaatgactccccttctcacccccagccctggcaggggttctaggcaactcaaccaaccctcacacacacacacacacccactggggtgcacccaaaggtggcctcacgtgggagtcagagctgttatggccgttggagctcaggggccaccccagctcctgctgagggtggctcaggtgccctgaagtgagggtacagaggtggccccagtttgggttcggcctctgcgtctccacgtggcagggagggtggcctgagcccctacagcttatctggcaggacctctcgccgtgccccgtctgcccgagggcaggatcccctcgtcctggttgcgggtcttgtgcgacttctgcatccaggctcgccactggtcgtagaggcggaagctgaggttggagcagtacgcgtgcttcttgagccagcccaggaactgcttgagctcgcgccgcaccggccccgagctcggctctccgccccgcggttcgcacgccccgccgcccgggcccgggcgctcactgcggggagtggaggcggctgtggggtggctccactcactccagatcccggctttcttggagccatagatgccaaaggggttgcagcgcacttgcacgaagtacacggtgccgggtttcaggccggccaggcggcaggaggtctggttgctcacatcgtccaccaccttccagtccacactgtcctccactcggtagcggatctggtatttggcttgaaagaggaaatccttgagggcgggtggcgacacccagcgcacgctcagctggtcctccaggcccccgacgcggctcacgtgcacgtcgggcggggggtccgtggtcaccacatccaggatatccagcgtgagtacatcggagcgggcagagcccaggcggttggtggcctccacccagatctcatagggcgtaaagagagcca

SEQ ID NO: 158432 - DNA, 1000 bp, Homo Sapiens
ttttttttttttttttttttcacaaaagccatctctctttatttttcattcctgccgttcaaccagtttgtgcaagctgaggatgagtgggttttggaacgggaggcagagcatctggggacagaccctcctggaaatggtctatgcacactgctgaggctggttagacttgagaagcaattgacaataaactctacagaactggaaatgttcaaaagtgtcaaggtggcttctggctgttttcctgcctccctgtgggggtcagttatacccatcagtcctgtgcaaaggtcctgggactggcccaggggcagccggattcttcgctggggacaggagctgtcctgctcacccagcagaagcatgccaatggacaggtgctcgggtgtgtgcccaggtgctgtggcccccaaactccgtggctcctcaagcatgtcttcatcctgtctctatgtccgccctttgaaagtgttcatgcaggtgtaggttcctgagaatttgtggatctcctcgagtgcagcctgtggaagtatgcttttcaagataacgagggcatgcattgtccatgggaggaggaggagggcctggttgagctgcacagcttccactgtcctccgggccaccgtctccggcttcagtgggggaaagaggttgggaaacctgactctcatgccctggaacatctcggtgctggtgtggaagggcagcactgtggtggcgctgactcccggacagtccagcagccccagggtcaggctctccatgaaggcgaaggctgacgctttggatgtgcagtagtcgatggcaccggggatggcagacagtgccagcacggagttgaggcacacgatgtggccattctgcagctccagcatacgtggcaggaaggccttggtggtccagaactggcccagggtgttgatgtgttgggacttgaggagggcatcatcatcactgtccattaggctcttcccatggaccacggcggcattgttcacca

SEQ ID NO: 158433 - DNA, 1000 bp, Homo Sapiens
ttttttttttttttttttttgtgaaaatagactttattataataaaatgtctttttaaacaaattcccccaccattccacacccctggagaccaaggtcaaggtgggggttcagtcaaactatctcccaccacagcaaaggaaacatgcaaagacacactcacccctcaaagggtgggggatggattggatcgggtaacggcggaaaacccctaccccactctgaacagggaatgtatgaaaatagctgcataaatctgtccttttctccagcccctggactccaacaggggttagaaaaaaactatgcaaaagaacttgaatccaatgagcaaaataagcaaacccaactccgctttcggccccgctggccccagggtctttgggggcgggaccttacaggggccagcaggccccggcagggaaggatggagcacgacgggggcagggtggggcccactttggcttggcctttctccttcctgggcctgtgcagtggaagcgaggtggaggaagctgaactgaggcactgagtatatacatatatacaggctccgcccgcctgcccgctggggagatggggctccaataaaatccagtgcaaactttccttcaggggagggaagacaggatcaggacagccagagccatcagggggcacaggctcctttctccctccagggcccgtcctgggactgggaagggtggcaaaagggactagcgcagcactgtgggacactagtagacgaggtgggtggaccaggacgcgagggtcctgggtccagtcctggctcagtgaccttggtcaagttacatactcactgtgggctcagtttcccctcctgtaggaggaaggtgcttctctaaaaagttcatccttaaggagccatttagctctgaccttcaccaaggctctttgattccctctgaatgccacagtgttaacgcaaaagaacgggggctctgggcccattctgagccttccctgctcagcaaaaaca

SEQ ID NO: 158434 - DNA, 1000 bp, Homo Sapiens
ttttttttttgcttgggcagagttggagtttatttgctgcagttccttggcgctagtttacaaggcaaaaacaaacaaacaaaaacaattagaataattatttcttaaaaaccctgtcaacaactttcagtcatttctttatatttttgtattttgacaaaacttcttttaaacaaatacaaaataatctaaaaggagaaaaactatacatagattatttacacctctgataaatagactaatactgacccaggtgcctctctgtctaggaaacacttgagaaccaggccagggcccgggccagctggacaggctccagcaccggcccaaacacgcccagacctcggcaggcaccacctggttctcccacccagaaagttcaggtttccagcctggaccctcttctgtcaccctcacaagctctggcacaaaagtgcctaaagccattccctccaggtaggatctacacaaagtggcggggagggaggtgacagactgtccccctctattcctcccaccactcctctgcaaaagctatttccagagatgctcgccaaccctaaaggatcagaggagccgtggcgacgcggccctgtgaaaacccgcagctcctccacctgcctcctcggggctgcgccctgcaccgccctggtccagggtcctgtggaggggcggggcgagacggccagacagccagccacctgctctgcctggactggcatgctggccctggcggagtggcaggagctgccctgagagtccctgagagaacggcaggaaaatgctgcgtgtcacggctcccttcatactgtaatgaggaggggcagggccagctcacacagcgcctgcaggggaagacagagatgcgagaggcagcccggccacccccctcactccagtgcaccccacggagcagataaaggcccatcttccctctagggggcccaccacaaaatgcatccagagtagtccagttagggctggttttgaggcagaaaaa

SEQ ID NO: 158435 - DNA, 1000 bp, Homo Sapiens
tttttttatttttaatgtttttaatctttaaagttttgtatattgacagtcctttaaaaaaagtacactatcatactgtacatgggatctttacatacttttagcatgagcggtaatcttttaaggttctcttaactctaggaattgtggttggccagcatgttatcttgaccagacacttctgaaaatctgctttgtgtgtcttaagttggcaatgtcattgttccagaccagcatgaatcctggtctccagtccacacctctgccggacagaggtccatgccagtgataccatgactgggaagccaccactgagcccatgtcctcagtcttccctcaggccttcagtgtgtgtttgtcactgagtggacctctgtgacatctcgtcttcgtgacacttaggttaagcttattagaagttgaaaaagacaaatgaagttttttagcccagaaaatagatgacttcattgagagttaactcactgtgtaataggacacattttaataaacaaatgatcagcattttacacaatccattttcttcagaaaatctagagcaagggataacttcattatttgcataacatttcagcattgcagtttgaaaacagctgaactttcagatgaagttgacttctacttgattgcaggattcagggtttctcagatgttaatacagagtcaaaagcggtggataaaaccttgcaaatggcttgtgcttgttccaggctgttgcactgataaacccacaggctgtattcctcattgcttgcatctgtggtcttcagagccagtaagctttttcccgcccccagaccgtcatcgtaacacaccatccggattattaagtagagagcatgcctgtgcaaaacatcatattgatctgatgttgatacttttatgccatacttggaaactcccataataaattcttcctccggaggaacaaaaggcaactttccatcttgctgggcaacgtctatataatttatcaggtcta

SEQ ID NO: 158436 - DNA, 1000 bp, Homo Sapiens
ttttttttaattcaaaaggttttatgagatatggtctaatagtatgaaaaaaatcaaagcccatgtctgttttagttaacaaggaaaacacagtgatttaaatgctgcacataaactcttcttaagatgatgtgggcattgtgctcccagtggtccacagcatttacatataaaaatctaagaagtttctcatagtccaaagcactgtggtcagggtagcaatcaatacctatatataataatgatctgtttagtcaggtaaatggaaagcattacagtcaatcatccaaaatatcttcatccagattgatatctgttgtgtcaatatcttctaattccaaattatccaaatctacttctagttcgagtaaactcttttcttctttgttggctgtgtgggaggccacaataaccggagtaggagaagcaggtttcccatcaagttcctgttgagctgtagatcttgagggctgaaagtcttttccctcttccatgacatttctctcttcatttggcgtgacaagtgggtattgtttggctggccacagatcagcatgtgtttccttcacccattcttcaacaacaaaggcttcttttaatccagggaacaggttttcatactctgttgggtcagcaagggattctgctgctttctgattgacttttgagagattctctctccagagtttcactacccttgaaacctgactgggtaagtaagttcgggccaagaaggcagcttctggcagccgtccagttctaattaagagctctaggcaggcatcaaccttgccctgtaaaaagtagctcatgaatgccacattatttttgccatctctctccgcaccctctgctagcttgttcaccatattagcatttccagaggcagtggccaaaagcagcaggcccccataatcctgtgcatgatgcaggcactcctgggctaggccaaactgacatttactaatggcaagttcagcaagttgtttccacttctgtt

SEQ ID NO: 158437 - DNA, 1000 bp, Homo Sapiens
cagacagttaccttacagcttgcgtatttattgaacaaatactactaaaatagctaaaatacattgggtacttgtcatgagtgcatcagtaaagatcacactgttacaaaagcctgcattttcagcagtacacaactgcaactctacataaatgccacagatgcagaatactgttttcttgctctatttacacagctgatatacctattctaacgaaggagggagaggagtaatgcacaagaaactcaggccaatgggggagcaagaagaaaacgaagaagtgcagtgcatgcgtcatcggtgtttaacagtcagaagcgaaacagttcagaacaaggcctgccctgtcaaaagaagagctaaagacagttatataaaaattaaggtgggctttcagactggctaacacaacaacattccatgagtagatggtaatttatttttgtttatccatttcgttgggagcaaggacaaaaatgtaaatctacaccttgcttatcaaaattgccgaaaaaagaatgctctgccttttaaaaaagtatcatgattttgtagaccttgttttccaatttaatatttggaaaaggtgtcattttcatattcctactcagatgccagtgttttgggtttttttccagggggagtttatttaaaacggttttgctctttttttcgacaaatatcctttcaaacagaaagaacccaaagagacacctcaaaatgcctgtaaaattattgcttttctttctctaagtcaggcaggcgaggctacggaaaggaagagatttggtaagtaaattacagttttgtgattgctcccgctaccgtgactgcatgtccgtgagcgccagccaacgagacaatggtctctcacactctggtagcattcgctcaacctacaacactgaggaagaaagccacactgaagacacaaggaaaacaagtcaatccagtctagagaacaacattcagggaaacagagtaccaacaccttcttaga

SEQ ID NO: 158438 - DNA, 1000 bp, Homo Sapiens
atacctccacagagaggtaactcctaatattcctatgatctctgaaccctatttaaaccctcctaaaataaaaatatcattttggtttttctattatatttaactctaaaggcgggctctgactaatttgcttgggcttgatgctacagtattagcacaagctataagctccctaccaccatataagccttgctcttcggccttccatcattttgaaccctaaacctcatagatttagaacgaaacactgtataaaaacaaacagataaagggttaaaatattacaaataaatagctaaaataatcttccctcccccagtcactcctaagaaacagacaccaaacattacttaagtgtccaaaatgaccaaagtccttcatttgcccatgactcaaacggacaactacctcaaacaaagttgaacaaccttcatgcaaatgcatcaaggaatgtattgctttttcattttctgcccagcccttcatatacatgcactaaaatgagtttaaaacatggcctaaaaatggaaaaagggagaagaaaatatatatgaatatttcccacaaaactgtttccctcccttccctctccctacacccctcccacccccctccctttcttaagcaagtattttaactttctttctggcacaggaacaaagaagacttcctggtaaccagaatcaaaccctgtggtttctttaatagggtctggatatgcctttctaattcacccagcttgatgtcaaagccatgccatttaggattcttaaccaaatcagacctgtctgactcaccccttatggtggtttgcctataaacttatcaatagttttttttcctctggccctgtttcttttaggaaataaggttcctaattcccaatcagggccacatccataagatcatcatcttcctccccaatcataaagtctgggctgagccttgagggtctgtctgcagataagattgtgttacttgtcatagacaaggactggtc

SEQ ID NO: 158439 - DNA, 1000 bp, Homo Sapiens
ccagtctacagcaaaaatatttattgagtgcctgttgcatacaggcacaatcctaggcaccggcaaatacagacaatagaccaaagtccctgccctcgaggagctttcattctgatggagagaaaacataataaacaagcaaaatgcaccacgtgtccaatgggggaagtgctatgagtaaagggggaagggatgggagggagcaggggcgaggtgtcaacacagggtggctctgcagctagctgggcacctcactgttccctttgctcagcacctgctgtgggccaggccttcagtgaccctggcctttggtggcagaaaaaacacaggaccaagatctcaagagtttctcatctgcttcttccactgacatttcatccaccaagcaaaattcattgacaccaacttttcggtccctgggctgcagagctcaaacacagcagtctctgaccccaagtccacggcaggtggaggaatgagacggggtgcagtggaagtgataggtcagaggtgcaagttacccctcccatccgcaaaagggaaatggtagctgcccagccccatgtggcctggaggcggggctgcacagatcttgggattaccagtgcccagagggatcccacagaacaccaggccgacagggaggctggtccgcttagctaagaaatgacgtgtgctgtagtcttagagttgctgtgcccattcaacttctaacgaccgaagacttttagtcatttcccccattggatttgattagccccaggtttcccgagtgcttgaccacgccatcccctgctgcttctgccttggaagcactttgggcagtgctgggtcacaaggtagcatcttaagtccctcgagtaggtcagagaatgtcctcgctcaccagagagtcattgagcatgtgatgcctagggttagagtgcagaccctgtggtcgttagccctgaaactgggcaagtcacttaacctccctgagccagaatgtgctcagctgtaa

SEQ ID NO: 158440 - DNA, 1000 bp, Homo Sapiens
ctgttagaataaccaacagtttattaaaagcttgcctggggctctgtgccagccccacagctgagaggggctcccacgactgccccccaggcctgggagcagccccttccaaggtccttcccttgtttccccgccccagccctgatcccaattaaaaaaaaaaaaaaaaagataaaggacaagacggcacaggacgtcagacagttacgggaagagacccaggcatcctgaccccaagaccccatcctgatccttcctgccagtaaggtggcctctcattctccctgcctcaggccccagacctgctctgccctgtggcaggtctgagggcctcactgtgagggtagtatagttctctgaatatagtatgtctagacccacccttcccctcccccaggggactagatgaatatttgacacgcacatctccctcctttcctaggtggcggagggagacccctggcaccatggtagggaggcggggctcccaggcagccttgaggcacctatcgccaagctggccctgggccactggccagccccaagaagctcatgagatgaggaggtctgaggggagctggagcctacatcttgtcccctacccttgcaggggcctccagctcagtgccctccagggtcaggctccacccacccctgccctgcccagctcatctgctcctccccgctgcacctcaggaatagaagtgggaagaaccattgaggatgtgggaagcgacactggtgctgcggctcaggggcccgggcaccgcggcagcaggggggcccacattctcactgccactgccccccgaggctgcccgccgcaggggctgggggctgtttcttagcagcagcagggctccgccacggggtgtcccactttgtgtggggggccccagccagtttggggggcctgggggagccagcagagacggctgacgccaggctggagggggcatgcctggtggaggagggccatggctccagtgtgccccagaac

SEQ ID NO: 158441 - DNA, 1000 bp, Homo Sapiens
gaattcctttttgcagagaaaggtttgttttattgcaattatttagagcgcgtcccaagggggaggggaagggggaggggaaggggggggtctctggtattaagtggaaacatgtgtggagctggagatctttttggaaaaaaagcaaaaacacaaattcctttcagtcagcaggccccggcagagcagcaaaggccctcgccccgcggctgccgcgcgctcgctcgctctctctctgtctctctctgtgtctctctctctctctctctgtctctgtctctgactctctctcacatctctgggtctctctccccctatcttgctgccacaggcccccagtacctggtgggcaggggcaggatgggggctcaccggggctggggctgatttctgggcaatggcaggaccaccctccagtccactgaggctgggggagctcggggcaggctgaggcccaaggtccgtgcgggaggggtcccagggtcccgagacaggcaggaaggggctcagaagttgctgaagatttcacgcttcctgttccagtccatctgtggcgcgcgcttgttgactcgcatggctcgagccttctccttggcctcggccgccgtggggctcaggtggaggccgctctcctcagtgtccttgtcggaaccaggcaggtcacttcgggacgagcacgcagagccaccattgagctgggcagggctggttccattggtgacgggtgacggcagaggaccttccacgtgctcctcggtgggtgtgacccgaagccgcttgaagtgttcatctgtctcggggtccacgaccagcagccgggcctcgtcctcccgtgccttgatgctggccaccacctcagcatggcgcagtccctccacattctgcccgttcacctcaatgagccggtcctgggcgcggaggccagagcgggcggcaggtgagcccgggtccacagagcggatgtactggccgggccgggacttgtcactatgcaggttga

SEQ ID NO: 158442 - DNA, 1000 bp, Homo Sapiens
caaatgcagaaaaaaagtctttattctcataataaaaataagtctgttctgtattttacaatatatttcaaatatttccactatgaagcattcattagtcccacatggtcaagaagtatacaaccttttccaaagacagagctgccgggagtgtgtttaggacacacacctcgtacagccgcacttcaccactttctcaacctcgtccacaaaggaggagccgtcagtgcattcgaaagagtatttccgccgcttgctcctcagcggtccacagcactgccctcctgcacacccacctctgcactctaatcgggacaccttcttggttgtttggcaagcagcatagccctgctgcttttggtaataatctcttatcctttcccctcgacaagagatttctcgatcacagctgtcccccgtgtatccactgctgcattcacagtagggctgccccagacctgaaagcctgcacttcccgtgcttgcacttgatcgcctggcatgggttaaacagatcctcctcttcatcacagaggacacctccatggccctccaagcacttacagctgtaggagaacgcattgatgggcaagcaggtgccatgtacgcatttatttccaaggcaagggtcattggtccgttggtcacagaggggccccatccatccttcctggcactcgcaggtgaagcctgcctggctgctgggctggcatgtgccatgggcacacaccttcttgtggcatggctcacagccaggcaaaatgcctgtttgcatcggcaccttctggaagtcctgcagctcactgttgatgtaaaggttccggatgcagccgtggaagctggttccgttctgcccaggggcctggcgcagagatgccacgttactcttccctggcatgcctcctacatagagtggagagtcaaaattcagagtggactgctttgacaagttagtgatgattttggggttcccaccatccacggacaaagagagactctga

SEQ ID NO: 158443 - DNA, 1000 bp, Homo Sapiens
ttttttttttttgtttttctcatgtcgagtttattaaaactttagcagtacaaattatccagattgcagattatcaaaaaatcaactcaatgaaatccacattaagaaaaaaaaggacaaacataaaacaatccaaaaacaatgaaaaggaaaacaacataaaggagattcattagcaagtctctcaaacttaaaatccgaaacagaatggaagtaagtttatataactcactcatccgcttttgtcttcatctgttccagggcttgattcatgatcaaattttttatttttttcatgtacatggtcattttcttgaccttttgatttttggttttctttttccactgaggatctgatcttctcatcctccttatttttcaacatggaggactttaattcattgtcctgactgctttgttttatttttgagaagggactttgatctctatcagcctttttttccctgctgttatttgagctattatgatcacgacttttagagtacattcttttctcactctcagaattttcttttctgtgtgagctcttactctcttggtttctgtatttgtctttgtttctgctttgactttcttctctctctgagctccgtgagtctctcctccttctcctcctatctttacttcttgatcttcctggtggtgttcttctctctcggcttcgtgaccgtcctcttctcctgtattcctgttctctgtatctatggtactccttgcttctgctgcgatctctgtcatgggttcttgatcgcactcttctgcttctgtccctacttctgcttcgttctcttgttctgctattataactgtgtttacctttagttatatcacattctctactcctggattgtgcgcgtctatccttttccttacttttactgtgatcatgctcattactctttgattctaactgtttagacttctctttacttctactcctttcctgatcttttcctttagaatcagactgcttttcttt

SEQ ID NO: 158444 - DNA, 1000 bp, Homo Sapiens
ttcaaatgcacataatatttaaatttgctcttcattgagaacaaccaaatatatacttaatcaaatcacaatacaaatgctttatagtgttgaagacagatcttatgggggaaaggtgtatgggaagaggtttatttagaattacggtgtttctgaaggattactaggccaataattctgataaaactcaaggcagtcacaaaaacaggtctttgttgatgaagagtttaatttatttctgttttaactggacacactggacttcttcagtcaaccttcaccacactgtatattttggtaacaaaccaaaagcatgcaaagaagccaattgttcctgtaaaaagaaagaagatcaaaaccattatcatggtataaccaaagtacagaattgtgcttgctgttcccgtgatctgcagttttgaaaagaagtagtgtactgcatagattaagaaataaactgcagtaaagccactcgtaaggaatgaacgccattgccaatgataatcctctgcacataggtggaaatagcaaagaagtatagttgcttcagaacaggtaataaccaaaatgataaacaccagaaataggaagccaaacatgtaatacatctggtgtgaccaaatactattcagaatgaagaaaagttgtataaagatgcagccaaagggcaaaatccctcccatgataataccaggcaagggcttcgtgtagaacgactgttcaggaatctgacgtggaatctgattggttcgaactgggtgttcaatggcattcttcttaaaaccaaagtatgcaccaataaacgtcagaggcacagatatgcagaaccaaagggccaatatggcaaccagtgtcccaaaaggaatagctgctgaagatccttctccccagaggatcagattcattataaagaagtcagcaaatacaatcccaggacaaagaaatgatgttaataaaacatttgttttccacttctcacctccaaaggacttatagaatc

SEQ ID NO: 158445 - DNA, 1000 bp, Homo Sapiens
tttttgtttttttttttttctttttaaataacaaatttatttttcacagttctggaggttgccccaaaaagcttttattatctagattaaggttaatgcacttttaaatcataatgttaacattttttttcttaatagagacagagtttagccatgttgcccaggctgaccttgaattcctgagctcaagtgatccgcccacctcagcctcccagagtgctgggattacaggcatgagccaccatgcccagcccacgttaacattttttatgaagaataacttccaaaacaatccaaggagaagggtggcattttacagtctctttagtatcttgttataataaacagttgaattcttacagctgcttctacatccaaacttttttgttgaagtaagttgacttcacacagatacgcagttggaaaagtttttaaaatagccttttcagctaattgtggctattctttgataccacaccaagactacaagtgattttttttttttttttttttttttgaaatggagtctcgctctgtcacccaggctggagtccagtggcacgatctcgactcactgcaacctccacctcccgggttcaagctattctcctgcctcagcctcccgagtagctgggactacaagggatctgccaccacgcccggctaatttttgtaattttagtagagacggactttcaccatattggccaggctggtcttgaactcctgaccttgtgatccacccaccttggcctcccaaagtgttgggattacaggcgtgagccaccgcgcccggcttactacaagtcatagtttcttaaaggcaatgtagactccgaaaacttaatgcactcttatattgttaatacattaaaatccactggcctgtcttacacttttgaatcaatctttgagccatgcatgattttgtaacatcacgtactggtcacttggaaaaatggttcattgaattcttccaaatgaaatgcatttcattata

SEQ ID NO: 158446 - DNA, 1000 bp, Homo Sapiens
cggggtctgaggactgtagggagtgggtggggcctgaacatcagctttggcctcctgacccaaagcatgaagcaggaccatgggccagagaggggagcaggcttcctgggggctggactcgagtcttctctgcctcagatggggtgggccctgactttgagggagctacagatgggtgagctgggggctccccaggcctcggggcattgggggcagccagaagaggaggggctatgggatggcctggagctggggcagttgccagaagctggtctcactcctagtagcccggacagaggagttaagagcgagtgctgtgtgcatagttggtgagggacacactcccggcctggcaggtccactttccgctgtcctcgtctcttgcgcaaaccttcagtttttgcgataaatccaaggaggccaggagagcagctccaggcacaacacctgctctggaggccctgccctgaccatggcatccttcgagcacgctttcctctgacccactgggctgcacctgttgatttctcaagcccccatccctgcccagccccactacatccctgctctgttttttttcaggacgcagctacctctgtggagcaggtttgggatgctcatcccttgacagtcttgggtggacctgtcgtctgtcctgttttatcccccacaccccccaagaggcctccccgtggccaccaccgccactaccacttctcaatgatgtggctcatgtagtcctcggtgggcacgcggcccggctcgtcggcatcctcccgcggcagtgcctccttggcccggtgcagcagacgctcctcgcggctcctcaggcgctgctccctgcgctccagctgccgcttgtactggtagcgctgctggaagaggtccttggcgtagtcgtacagctgcatgtccaggtcgttgagctcctcgatgcgccggatggtgtcttcatccacctccacgccgcccgcccgcgtgctattgtactgcatgaagg

SEQ ID NO: 158447 - DNA, 1000 bp, Homo Sapiens
tttttttttttttttttttttttttttttttttttttttttttttttttttttttttttttttttttttttttttttttttttttttttttttttttttttttttttttttttttttttttttttttttttacattgtaaacaccacatttatttgtctgaggcttgcaaacctctggtaagaagcacagaacgcagggctctccttcatgctgccctgggccccagctcgccaggcatgcaggacggagctggcagatgagtcagaaatctttgggagcagcgccagggaagcagcaggccctgctccttcccatgcccaatcccgccagcacgggcctggactgcagccaggaaggtgggccagccaggatccccaggtaacttcgccacagggacctcttcttggagctgccttcccttccctccccatccctctccaatccccgcagagcttagagcctgggccacatgcttggtccctcacacaaggaccaaaccagctgctgtcaggctgtttctgtgggtcctgtctctccagtcaggaagccagcagggcagggcaggcctggctctcctcctggaatcacaccgtgcacccagctcagcgctgggcactcagctggggaccgggatggacaaagccttgtccagagaaccactgtaggggagacgtgcatggcagccggactcagcctcctgcagcctccattcatgggctcttggctgggcctgaaatttgttagggcctcaactctctgtggtgcagatgaacacctcctcctccaagaggcccctcaggcttggtgccaggcttgggactgggctctggaaagtcagccaaggctgctacttcaaggccctgaggacagcctccagcttcatggccatagccaggtcgcccttcaccttcagccgtccactcatgtaggcccccaggggccgcagctctctgcatagcagggcccgcaggtctgcctcggccatctccaccaccacat

SEQ ID NO: 158448 - DNA, 1000 bp, Homo Sapiens
ttttttttttttttttttttcttgtaaaaaggcatctatttggcttttaatacaaaatgatatagagaaatacagaaagaaaatatcatacaagccagttacaaaaaaaaaaaaaaatcccaaccaacaaatttgtcacattgggcctgcattagaaaacaggaaaaaagaaaaagaaaaaaaaaaacagtccctgaaatctggcaggtggtttttaaaggccacagggaagcttgccttagtcatcctggtgaaatgggacaaaattggtttttggaatatggccaccgcctcctgtttcttgctagcaatggtcatctgaagggagggtgctagcctggacatccaacatttggcatcacttatgcagtctgaggtctcaaagacaagcggccttggagtcttccagtccatatcttcactgaatctctcccatatacagtctcttgtcactcgatgctgagataatgatgggctcatcagggtggaaagccacttcattgatggagccagcatggccgggcagcttatacaatattctcctgcttgtggtatcccacacataaacaaacctgtcggctgagccagctgctattttgcttccatcaggtgaccaagaacatctcagaaggttcttttcaaagttgtgcacatttccttgaaatatctttacacatctctctttgggggcaaatggccggacatcccagacacgaactgtattgtccattgcattggacaaaagataagagccttcagaacttaaactcaggccagtcactgaatctgcatggcctctcatggtgtaggttagcttgttctggcgcaggtcccagaccttgatatcattgtctattccaccagaaataatctgatcacttgtgtcattgaaggtcacagctaacacctggtacgtgttctgaaatgtctggatggctgctttcttccggatgtcccaaagcttaactgtgccatcgtcactgccagtgcagacaagctg

SEQ ID NO: 158449 - DNA, 1000 bp, Homo Sapiens
ccaaagtaaacatgtttattctcagttctgccttaggggtctctagttttgcaagcatgagtaaatggaatcaacaataatcctctccttaaatgtctggcattaaaatttgtcacttaagaagtttcctgttttgcctaaagagagtgtgatttgagggtgacctgaaacaaggcttgaggcttgtggacacatagggttaatcgccttatttcctgccaaatcgcagagcagtgaaaggccaaaggcaactataaatagcagcccggcagatctgtccttccaagagggaaagaacttagcaacaaagagagacacgaggggtgaagtgggcaaagaatcattagcccagtttctgcccatgccagggcatgtgacccttgggaatgctgcgaggcccagcagaggaagaagaggatcaaagctttcataacctccaactcagtgcatcccaaacccagacgggcctggaccgacctgtgcatttactcctgaatgccctcagtcagcagacacgggagccaacaggtgggaaaacgtgtcctccagagtgctcctttttttttgaggtggaccacagctcccagccaagaaatggcagagaggagagggatccttccccttggagtggccttctgtcttccagggttcacaggacagtctctcggatgaccccaatgaggctgtgtggccgctcagcctccactcgccggggcctcctctcggctcggggcctccccgctggtgtgaaggtgtgaaggtcgccgcagctctggaggtgcagcaggccaggctgtctccgcgagggcagcctgtgggccctggatgtgctgggctgcaatggggccattatctgttctagaaaactggcacttgtgatggcttcctccatgtgctcctcatcagatttcaaaacagatttaatgttttctacaagttcatggatgtctggggtcatggtacaagaggactgctccaggaacctcgccaccagcagctt

SEQ ID NO: 158450 - DNA, 1000 bp, Homo Sapiens
ttttttttttttttttttttttaacagtcttaatattcatgtatttattctcagaacatacaaacttatcttctcagagaatagaaaacagagatttcactcagtgacaaagatggacacagccagttcaccgtgtccccccatctacttagaaaatcccctgggggaggggatgcctagagcatacagcaccccttggtgcggggctgtgcacaggtctaaagactctcaacttcctttaccatccaaacaggaaaacagctgtccagatgacagtaagattccactgtctgtaatcctcatggtgccaggtctcctggggcatctagggcaatgatgctactgcagtttatgcagttacacagtcaagtctgtgccaaaggaggtcccatccggcggccaggtttctgttcagtctggggagcaatgccaactggctgcccccatagcctggcatgagctgatggcccagtgcaatcccaaagcaaagaagggcagaactgggccaagaagctgtggtaatttgctctccctgcctccgacagcgtcgtcctctccttttgcagccccacacgcaggcctcctgacctgagggtctgggctagggagttggattgttttcctaagcccccatatcccaagagtgaggacctggaaagagggatgtgagggttctgaaaaacaggcatcaggcagctttggagatgccctcagcccacaggaagagtgctgtgtcaggcaaagatggtctcttcccggcgcttcttggtgaggatggtgcctggcttatgctgggcatctgggtggttggctagttcggggggacaggaagacactgggctttccaggatagcttgcttcagctcgtagaacacagcagagtcctcttttgtgaggaaggtgatggccaccccactcttgcctgctcgtcccgtgcggccaatgcggtggatgtaatcttcaatatttttggccatatcatagttgacaaccatagaca

SEQ ID NO: 158451 - DNA, 1000 bp, Homo Sapiens
tttttttttttttttctttcttacttttctttctttttcttttttctttcttacttttctttctttttctttctctctctctctctttctctttctttttccttccttccttccatctttccctttctttctttctttctttctctctctttctttctttctttctctctttctttcagacagggtctcactctgtcccgcaggctggagtgcagcagtgccatcataactcactgcagcctcaaactcctggcctcaagtgatccttccacctcagcctctgaagtagccaggatcacaggcatgcaccaccacacccagctaatttttagattttgtggttgttgttgagataaggcctcactgtgttgcctaggctagtctcaaactcctggcctcaagcgatcctccttcctcagccttccaaagtgctgggtgtataggcgtgagccaccacactcagcctgaaatccttttgaagttgtattatgatgatcaccattttacagataaggaaacaaaatcagagaggtagtgtgactgcccaaggacacaggccagacgtggctaagttgggatttgagctcaaccaggctgattccagggcacaacatacaaatgtggacagctcttacaatggtgtcatggttaagggcagcacctcccatgccattcagatctgggctggggtcctatgtctgtttcctgcctgccaggctgctgaggaagagtctatcgcccaggcctacaccaggggtccctccatgggtcctgctccctggagacacctgagaaaaatgagtcaggtacaacttcttcctgcctatttctcatagttcaggtcttagttcgatgtcccttcctctaggaagtcctccctgactttccaggctggattgggcctagtccctatgcttctccgacttcagccctgaccactctgcctgtgctttcaacacctcacctcctccattaaagtcctgaccattttgggccatca

SEQ ID NO: 158452 - DNA, 1000 bp, Homo Sapiens
ttttttttttttcttattaggaatatacaaccatttattcactgttcactagtatttacaataaagtgaacaaaatacagttcaataacattcagattaccacaaagttgtgtttcctggcttttactgaaccagtaaagcagatactgaaaagactgagcctatgtggtttttttttttttttttttttttgagatggagtctcgctctgtcgcccaggctcaaaaaaaaaaaaaaagaaatttagcatgtagttctcccaccctctgcatcgtccgggatgctctgacaaatggaatgccagtgtccctctttccctgcagtgactccctcctccgtgggtccaacacagagctcacgccgcccaggctcaacaccagctttcagatccacccatggccactgtgtctcatggtcattcttcaaagagtctgtgtgttcagccttctcctgccttcccaagtggaagctctgctggctcgctctctagtcctcttcctgctgagccagtcttcaaccaggaaccacactagagccaccaggactagaaaggccaggcccatccgaaggagattctgggcagtgtgatcccagagggcatggtctttctggagtcccgtctctgtggttaaaaggtaggtgccccaagtgtctgcaggaaaggtggggtcttcaggtgcaaggctggtgttctcaatgtcgcctgtgaccaggagcttcactggctcactggggaaagaccaggcatggttgttataggagccaaaacatcggtatgtccctcggtgggctgtggtcacagggcccagggggaactccgcctggaccttcccgtatccgcgctgtacgtggctggatcttccctccttgagcagtaagaacatgcttgttgcagtgtctagacggcagtagaaggtcaccttctctcccgagatcacttcgggtccaggatgaaccgagagggtgggtgtgtcatacatttctgttaccaccagatcca

SEQ ID NO: 158453 - DNA, 1000 bp, Homo Sapiens
ggtttgtgcaaatggttttttttttttttttatttccacatttatatcacaaggtgtccacttactggaccaaatagcaaagttgctcccttctgcgtcctgagaacacagaagtctaggtactgtacattcactaaggctccttgtttttgcaaatcgcgtttatgacaaataaccataaggcaaacgaatctaaaggaatggttatgagtgtttccagcgtacagacaggtcttccccctcgccccacagtacagcataaaaccagtagcacccacaataacttttgtgttgttttggggggactctagaaaggtgaagttttctagatgtgtacaggaagggaaaaaagaaaagggaggaagaaaggaaaggtttttttgtctggtggtctgatggaagaggaattgtttaaaataaacatgagaaaacttaaatttttgcagcatttctttaaaaactgggttataactgaaaccagatataaacaggtggctgcccatggagtgtgggtcacactggctggccagctggcccgcctgcccaatgccagtggctcaccacagctgagaagcttctggcacatgacagacaacactggcctgacagtggctgggtagggagcaaacagaggcagtggcatggcccactgtctcaagacactcagggccaaattaaagaacagaaaatgcaagagagatgagatgcgtgcttctgttgctgtgttaaaggtgacctctcccacaggttttctgtgcctgcctgcaactgaggccccagctttcaggtgctggaaagtgtccgcacctctttgggggtgagggactaacgctttttatagctggtttgctatagagttctgaactcactttgccgtccttccttccacgcggtccttcttcgcaattttgttagtaaactggtagcagcatttcacaaaaagagttttgagggaagagcgcagagagaccgcgtgactcccgccccctccctcccgcct

SEQ ID NO: 158454 - DNA, 1000 bp, Homo Sapiens
gagacggagtcttgttcagctgcccaggctggagtgcagtggctcgatcttcgctcactgcaaccaccgtctcctgggttcaagcgattctcctgtctcagcctcccaagtagctgggattacaggccaccaccatcatgcccggctaatttttgtatattggtagagacggagtttcactatgttgggcaggctggtcttgaactcctcacctcaggtgatccgcccgtcttggcctcccaaagtgctaggattacaggcgtaagccaccatgcctggccagatgatgtatttaaatatcataccaaactctgtgtatttatataaagagagactgttaaaagacttcataatataaaaaaaaacaaaaacaaaaaaaaaactttacgcttaccattgctgcatattgttgcagtataaaacacacacttatctgggatcatgagaatacggcaagaatgtcctgcgtaaactgtaactttgacagcatttaaaaaataaaaatcaaattaagtgcctttgaggccacttcttcccagttgccagttttcttaacccggtactaaaatactgccacacacagctgcatgtctgaggatcatatttaaatatttaaaatgcatctacagtctgtcttagttttctttatatttgggaaaaattttgaatcttaagtgtgaaaatgtaatcacaaatgtctttaccaggaataaaaacacatctagggtagccagcaaatttaaagcaaataaaatattttgtagtcacagactaatactgaggtctgtaaaaagagttgaatgaataatagacagacatcaaggatatattagttccaacaccatccattattgtttctataaccaataatactttaaaaacatttgttaatcaaaataggctgacattgatataactatttatgtgtaaaaatagtgcacgatttatcttccacaaagctagtttacatcctaagagctggtaaacgctttttttgttt

SEQ ID NO: 158455 - DNA, 1000 bp, Homo Sapiens
tttttttttttttttttacatgtttaaatatattttatttcaagttaatataacagccatgatttgttcatttaagtgaaatgcttcgataaaaacctcggtgtcacttggttaaaatattggagacagattaaatgttaagccactatagtagtgactctggttctttagactattgcatgtaccttgttaatgaactacaggaatgcacattgatataatgcacaatgtcttcacatgtctcaatcctcattcctcttcctttcatgcctccctaatgcctcagtatccaatataaaactacaaaaactactgttcttttcgtttgagtggtatttaattaaaacttcaattctatgttatttccacagtccagtaatttattttaaatttgagtaatttcaaattccacaaacaaaactgaagaacagcaatattttgtttgaatttctctcttctgtacactcagtgatctaaaacaccacaatatccaacatacacaaacctcagggaagggttagtaaacacacacaagattggaatcatggtgctctttgctcctgaatggaatggtcccacagaaaaagcacaggatacagcacaacataagggcacctgttacatatgaagtgagcaaaacatactagcattttctatatgcataatggggaaacctgcataggttagagggccttttacgctcatttaaaaatcaggcaagttgtctgtaacatttttcaataatctgggaagcactgcaatccagtgtacgatgtgctgattagtgttgtctttgttggcactgacagtcttgcatggtcatatgccagtgtttttgctttagcttttctttgaataaaacagatttaaatgcatttagacaatacgtatttgtaagctgtttacatacactaaatttaagagattcaatattagagtttctttgtttctttaaacactacagagtgcaaatcaggttcttcacaacagattgaatatt

SEQ ID NO: 158456 - DNA, 1000 bp, Homo Sapiens
ttttttttttttaccgggtgaaccaaagactttatttttcaaaagcaggtaacaccaaagtactatgtggtatccatattcgttgcaaaaatgataattactggaattttccaaacatcaaatgaagggggatcaatggttaccactatcgttttcaaccaatatacagatgttcgctcaaggtctaggttttatttctacatagtagtattcacatgagttccctattctgaagtattatcaaaacgaggacccttgaaggtcgagcccagctttgtcttgacttcaaagatgacacagcagccaacctagaatcctggcttgctgcttgagtcctagaaatcatgtcttctcatgttttacaacaagctgtgtctctgaaaactaaaatcagactttagattcctctgaaacagttctggttcccaagcatccgcaccatggtacccagacatgctcaaaatgtgctttcccttatctttcaaaacccaccaccaggaaaccaaaacggaccccactctgagagttccatgatgaaggtgtttaagaatcacattaaccccaagtaaaggcagtagatgaaattatccatttctttttcttttttttttttttaagtgagactacattggcaaatgggaaaatgacaccaatcatttgattacagaaaatggttttataaatcctcctcttgaaattatgttcaggcccagcatggtagcttatgcctgcaatcccagcacttcgggaggccaaggcagaaggatcgcttgagcccaggagttcgacaccagcctgggcaacatagtaagaccccatctctgtttttttttaaaaaaaagaaattctgttcaaaagtatttcagaccaaaaggaggtcataaaaactgttcatataattactctatgagaaaaaaatccctgtatggaaaggggcactgaagatctggcacagagaaacaaggggagacagggcagtgataagatccagccctatttt

SEQ ID NO: 158457 - DNA, 1000 bp, Homo Sapiens
ttttttttttttttttttttttttttttttttttttttttttttgtatagagtaaaatttattatagggttgtagaattcatacaacctaaactccttacagcattcagcacctacacaattttgtgcattccacaatacagatagtagtgagaaagaatcactgcattagttaaaaatgactgtctcatgaaaattgttcacatataagtcaggttaattacagagcacctaacagaactgcaaagatgtaatttctaaattcaagaaagttgtacaaaatgaaaaacaaaagaaaccaacaatgttgagatctgatatattttacacaaaaagttcaaaaacaatttaaaatatttcaaattttaaaattgctccaccataagatgaataaagagcttacttaaaggaaaagaaaaaacaaacaaacaaaaaaaacaacggatggaatttattgtcaggatgttaggtgatatattcatgctgctttcagaaatctaaaccctataaattcaaagaaaaaatgaaactcatgtaatttcagtttcaaaaaacaagcaatgccaattaaactaaaatttgacaagagcttgcagtggttagtagtttttttttttcctttttttaaagcataagcaatagagtaaatgcatgagtaaatatcttgagtatcccataaaccttaatgttaaagtcatattgtaaatctctgacttcttattaccaaggacactctatctgttgcctcttactcttgacagatcttggtctcaacaataaattcgttggggaagtgtctaatcttccagcatttatcaatggcacgtttgttgaaacccagcaagaggtctctgcgacgaaggcggaaggactttctgttattgcaaagttggtaaataaagatgccaaggttactaacatcacgaatttcctccacagcaactaggtcttctcgaaccacataagtttgaggcagatatctgccactcgccagtttgcca

SEQ ID NO: 158458 - DNA, 1000 bp, Homo Sapiens
ttttttttttttttttttttcatatatacattaataattttaatgatttctttgtatctaaccaatttaggtaatattttcttttacacagaaggtcccaaaataaagaataatacacagaatacagtcaataggttatatcaatttacttcacataagagcataattcaggccttttccatttaataacaaaaacaatctgtacagaaaacccaaaggcaaccacatagcatatgtaaaatgtgcaaatacactttaaaatgcaagttattctatagcatttgcaagatagaatttcactgtaattagggaatctagttcatcctaacttaatagtcttttgcatgtatagacaatgcaattctacaaggcacaactcagcgttgatgctaaagtatgaaacacatcctcagattatttatttgaaaatattaaaatagcatcgtttattattttttaatgagtcatgagctcatttctaaagcttcataaagcattacactgataacatatgtgtggtcaggacaaactgttccctgaacttaaaaggtgaaggacaagaccccatattattatcctgtattaaaaaaggaaatatacatatatgtacacagacaccccatatcacagacaagaaacttcccataattcaaagggagaccatttccttattagcaaaggtgcgcattacagtatttcatgacagttaaaaattacacacctaccacctgttttggtcaatcttgctaaaaaagacactgaaatagacaattttcttctttaaggtaaagacaatgtctaatttagaaaatcttcctcttgagattgcacagtgaaaggtatcagttaattaaatataaaagcttaccgtttttgtttttttttgagacagagttttattcagtcgcccaggctggagtgcaatggcgctatctcggcgcccaggctggaatgcagtagcgcgatctcagctcactgcaacctctgcctcccaggttca

SEQ ID NO: 158459 - DNA, 1000 bp, Homo Sapiens
ccctccgcctggtctttaataaacagagtattttcacagcaccggcttctagtggcttccaggaaggacaaggtcctcggtcccgtagaccctgatccgagactttgccaaatgcataagcttttactgtttttatattaggaaatcatacaggaccaagaaccgctggggtcctggccagccagggcaggcccaggatggggctccggggccatggaggcgaaggcacagtggcaggcaagggatgaggtggtcacaggtacacgggctgctcctggcctgtaaggaggcgatatgtggcagctggcatcgtcttgatatgcacctcgccataggcctcggtgagcagctcgatgatgcgggcgtgtggcgtggccaccacactctgcccattgatctcaatgatgcggtggccgacgcggatgcccccacgctcggcgatgccaccacggaggaggctgcagatgatgccgtcctccacgcagaagcccagctgctcgcgggcgtggggccggtggatgatggcggtggtgacgggagggcagtggacgatgctgagtgtcaccgacgtctgcgacttcgtctcgcggacagcggcctggcacgcagccaggggcagccccaccaggctggtcccgttgatggcggtcaggcggtccccgatgctgagggcccccgagcgctcagcaggccccccgtgcagcaggttggcgatgacggctgtgggcagcagggagccccagcccgactccaccagggccacgcccaggccctcccctcgccgcttctcgaggtgcacctcccggcagttgtcactgttggagaagtggtccaggtccccattatggaggtggcaggcgcctgggctcgggtgcacgcccacctggctggggtcaataccgctttcccgtaggaactggctgtaggcggcggcgaaggcctggccaatggcctgggcgatgagctgggcgtcctccgcgtagaatacgtggcagagcat

SEQ ID NO: 158460 - DNA, 1000 bp, Homo Sapiens
tacatttcaaatatattttattactttccatcttagaaagaatatgaaacctgcatgcaatgctaatggtttctgacatgtacatagcatataacacagcagtacaatgcggcatatactggggggcagtgtgtggagggggcgttcttaagggtatatgtacagaggaaagggcgcatggtcatcttagctttcgaaagaggactgcactgtttaacattgaagaattacatggggaatcacaaatatattgctttagtactgcatgttctgttgtggtgagggaaagaaacatgctttgaaggttttcccttgtcaacagaatgtgtgtctgtagctgtgtattgcgcatgtattcatatatttttaagttttctcctaaggtttttgctgacagtgttgggaacctcacatgcttctgaagcattaaatattgaacctgtgaacctttcagaaatcctcaggttgggaaagaccccacaccttctttaaggatcatttgtctcgccatcacaggatcttggaaatgtttcctagggtgtgtaaaaattaaccaggggggaatgaagcacatttttctggcaaccaaacttgagttcctcagagaacagatgcagagagacctgctcctgcttgcccggctacaggggccactgtggagtcacactgaggctgtgaccggccataagcccaggagagcccgtggcagctgtgccgaggcgccaggacctctaagcggaagcttcccaagctaggaatggagcaacactgcaatgaaatgtgtccaccaagctcattgttcctcccgggcgcttataaagctcagatgtatagtgacgtatggacaaatacaaaaaagcattttttaaaaaggaaaggcatgagttttcccctttttgataaaaagcagcctgtgatgaagtctggagcacaagagagatgggtctcccatctggaagcctttcgcacgcagctataaaatgtaaaaactgaccgttgg

SEQ ID NO: 158461 - DNA, 541 bp, Homo Sapiens
ttttttttttttttttttttttttttttttttcgattttaatattttttattaagggctataaaaatacccagaaagataaataaatgtgatgcaatgatatctgtcctaatatgaagaactttctttcactgcattgttttccttcacaatggccttcaaatcacaggaggcagtgattccatgccatttcctcttcttttattacacgctacaggatttctgaatcagtatccccgccctcagtcttctctttataaatcaaagtcattttcaatccaccgtttaaagggagcgtatttttttcttttccacgaagaggactctttgtttcacaactggatcataatgcaaaagagtcagtttttcccgcagtcggtttctcttggtgttgaagcagaaacctgtcccagcttcgctcaccattctcaccagaatgttttttgacttgctcttggcaaagaagaccgcggagaggaacatggtgaccacacctgggcagtctccgtcaccggccaaaaggcccccaaccaacaacaact

SEQ ID NO: 158462 - DNA, 1000 bp, Homo Sapiens
tttttttttttttttttttttttttttttttttttttttaacggtttaacattttactaaatcaactcacacaaattccaaattgcaaatataattaaggacaacagattctgctttgccttattaaatctttcattttcaaatccatcaataagacaaaaagtaaccaaaaattaggtctgttgcaaattcatgattcttctgaggggggaaaccaaaagaacattagagtaaaaagaacgccactggaggatgtacaataaagcaccacaacacacgcttacaaacggggcttcctggcttcggtgacaggtaaaagacgctgttctccccactgctgtgcgtcaatcagggtttcattaaaataaaactataaaatctcctaggttacactaagtcagacacggtctggaacacagtgcttaacaacagtaatgccaactatcagtgctaacataaaaacattttagaaggtcaaaaacaattaaactggaaaccaaagccttattttccctagatgagcaaaactgaaaatgaaaggggtcccacctcccagtaggagtgaaggggattttttttttcttttaaactgaaggtggggtacatggtgcagctggttctgtcattgctcagcctagttggcgtccagcttggccatttcctgcacatagatgcctatactctcgctgtcaaaaagcacgaagtacaccgttttgatggaagaggacattgtagacacgaagtaactggagatggccttcagaatcagctgagctgctgtctgctttggaaaaccgttcctgccgctgccgatggatggaaatgcaatggatttcagcttcttatcatcagccagggccaagcagtttttcactgtcttttccagaagttcttcacacttgtctgcaccccaaactggactattacagtggatcacaaacttggcaggcaggccatggcctgcgctgacagcagctccagctacttccaagggcccgtt

SEQ ID NO: 158463 - DNA, 627 bp, Homo Sapiens
ttttttttttttttagtagcaggatcaagtttaataaacgtttattgagcagtagaatacaagtgagtgcctggatcctgatcaccaagtcctgtacaactgaggtaattatttcacaatgatgggtggctcagtgagattctgattgcatgcgctgcatgacaaattatctactcagagtatgcctgacacgccggaggggctgagggggaacacactgaaagcagtaccaggtagcagtgcatctcacagatccatttattcatgccatgaagtaaacggtacttatacaagtgtacagtgactgtccacgctccccatctaacacggcttgctgaaatttacaggcagactgacgttttctttcacatgtactccaagtaaatctggttagtgatgaccaggagcaggcgctgaagctttcaaagccttacttcttttatcagcagcccggattttataaacgatgaagcccatcagccccattcctatccaaatctcctggtaaactttggtgtagtagggcttcatggggatccatatgtttttaataatactttgaagcatcttggcgcaggacagacggctcagaacgcaccacaaatctgcagccaactcggaaaggtc

SEQ ID NO: 158464 - DNA, 1000 bp, Homo Sapiens
ctgtttcaaattctttattatacatcatggttgcacaatttgaggctggttaaatacaattggttttcaaaatctctttgaatattttctggcttactacatgcaaatgaccatgaaaatatttggcattttaaaattctgaaactctgaataggcacttacatgaaggaaaacattaccattcatagatatccacatgtagaacagatgctccagcacatggtggtacatggacccttttgccagtaaagttggttcctgaccattttatcaaagtgccatagtagtaaaacaggtttaaagaaatgtaatttgggttatttagcttactcataaagtaaggttaactgacaagacttgcactgaagtgcataaaaaatattggtacaaaaaccaatgaaccataagtgaaagtagtttccatacagcaggtttcattttggttcctacactccacatttagtgtatttgcgatcagaccccatgcatatgaatggatgactgcaatcttcttttttagagacttaaaacaaatgacttgaatttagtgttaaaaaattaagagactagatgaagtttcaatatgagtttaactagccaaagttcgagtttaataaacatgaaattacccagatctagataactacatgcttcacaggtcctcctgagtcccccatcccaaaattttcccctgaaaagaaaatgaatgtatgaagaaaataatatttgcatacacatggcaaaaagattccttaaattgaaatatataaatacgtttcaaagtatttatggaaaaaatagttttaacaaatctaaaatgccaagctaagtcaactccacattgcagaaaacacacaacggtactactggaatatagcaaaactgttacttaatatggccaaaaaaaagaaggccataatgacctgccacataatcccttggggaaagaaatctaatattcatagcacagaagacctcaaagaggataaaattctggaag

SEQ ID NO: 158465 - DNA, 1000 bp, Homo Sapiens
tttttcagaggaagaacagcgaggggcatttaatcttagaacttaagaggtctcagagacaaaggctttggaagaaaggcgtgggcattcctgaggctttactttccccggaaaattactgcaccataatttgtgagtttatttcttccaactaagaaatagaggcaagaaagagggagtaacccgaagtgaagggctctaggatccagggaccaccagccagctcaagttggatttcagcagtcggggctgcctggggcgtgcaaaagctgctgtgtgagcaaaacgctgccgtgaagacattccaggcggcttccaggaagcggctgtatgtgctgacacgcatgtggacaggcagtctggctggccacctctcaagactggtgtttcctagagctttccattggcaaatgctgcctcctggaactgagggacaaaggttttgaaataagcccaaagtgatcaaaattactgagcagttctctctccctctgaggccctccaaggaggccctctggagcttggccagttcctctggggctggagcagcttgcagccagtttttgcaactgcaaaggccaggacttgctcccacgggctgcaggcatctctgctcccttggcatccctttgctcttttggccatttcatttccatcccatctggggctgtacggataatttttttgggcctgggagtaaagctgtccactgttggtaaagtgataaacggactgaaatgtgagagttggctggtctcgagggaaaaacagaggcaggtcaatgtgtacaagaaaacaaaaatctttccacatcagcagcagagtgagttttgtaaagccttctgcatcatattccacgacacctgtgccaaagtgactgagaaaagcagcaatatactctcttcttttgtgatacccttgaatcacgtactgcaccttgttggtgagcaggtggcatacttgaggaacgtaatcaatgagacatcctcctcctggaaaa

SEQ ID NO: 158466 - DNA, 1000 bp, Homo Sapiens
gccttcctgagtagttggactaacgggcgcccgccaccacacccagctaattttttgtatttttagtagagacggggtttcaccgtgttagccaggatggtctcgatctcctgacctcatgatccgcccgcctcggcctcccaaagtgctgggattacaggcgtgagccaccgcgctcggcctgcattttgtttttgtttggaggaacaaaaaagggaaagaaaaaacaaaaccacaggaaaataaagaggagaaaccctgaggcaaaaatggcttttccttttgagtcttcgtggagctgtgagctggatcacaaggtccccggggcattctgggcgggaaggccctcctccatccagagggcggcggccgagctgctccggggagtgcgcctgtggatgcgccgcagccgcagcaggtacagcaggatggccagcagcaccaccaggaagcagccagagaacaggtagtggttgtagacaaaggaaacgccccgccagtgggtgtgactggctcggaaggcctcctgctggatgtctcttaacggtagaaagcgggtcctgtagaggatggctccaagggtccactgaacctccttgtcgtaaacttgcaaggcagtctttaagcttttatagttgacaggaaacgaaaagcccctatgaaacacctcaaacatccaggccgatttgaagcactgatacttaagcctgtggaggtcagcatgagaggcgtacagtcctcggtcaaagcgttcccgcaaaatggaccactttgttgcacaataatcctttgcagctttagtaaatttagcagcattgtagtctccccccattcgtaacacatcctcggtgcagtagtagaattcggagaagccatagaattcactgttctggaagtgaattgggggctggtagaccccattgagggaagtctgggtctcgtttgttttattcatgaaaggctggatagtctctcgacacaggtcaaagtctccagtccc

SEQ ID NO: 158467 - DNA, 1000 bp, Homo Sapiens
tggcctttttaagagacttttatttgagtggttcttacaaagattgttgcaatatgaaagtcatttgtttgatagaaatatcaagctgtcttgtcaaacacactgaagtaacccaaaaatatatttcagagctcacagagcttaaaaagagcaaagattatatgcaaccagacaaaacctatttctgcatttcctatttctttctcagactgctttgcctaccagactctcacgtttaaacatcttcaggaaatgcagggatcattttgtttggaattttaagacacaccagaacacatagtatttacaaagaaacttttacagatacattaattgaaaagataccatcaagaaatataattttgaaatctccctttcttgccaattgatcagaatgcaagatgagatgctaaccaaacagccctttagctgtcttgtatttccatacactaaatgtgtatttcagaaactgctcaaccatcagccaaatatcaacattagtgaaatgtgaaatgtaaccactgtgtaaaaagttaggcttctgaaacattaaaaacattacatccctggtctgcctttttacagaaagcacatttgttctcctagagctattcctatagttcattaattttctacatgaacattttaaaaggcagaacaagagaacagttttgtatacagtgggatttactatttagggagaatgagcacactgcattcctgttaacatttttattttttcaaggtaacaggaaattgcatacaaatgacagtagatccttgcctctttatttttatctaaataaaagataactcaagatgaattctcaagaaagaaaaaaagctatatacataagggactatatcttccttcatcgtctacttggaaccagtagctgtgttgctgtcatagaatcaggaaacaggttgtggtaagttggaagaggtacatatgctgctgttatcattttaccagcaaaccacctgccatgcaatgcat

SEQ ID NO: 158468 - DNA, 1000 bp, Homo Sapiens
tttttttttttttttttttttttttttttttttttttttttttttcccagttttaacaaaggattttattttgttccctaaaaagtaaaatctagaaaatagcaacccactgcaagaagagttctatactaaaacattttcaatcattctctcttctcttcacatggtgtactctttcatgtacacatcatcggaaaacagactgataaatgcaaaccctgtgtgaaaggcacatggcactaatattgctcacacctgctacacctccttgggagccaagggaagccttttctgcaatctccccattttgatagaaacttatcacaaatttttttatagcaaaatatttaaaggtctctttccctgctcttcacttatctactaggaaggtatagaattaaaaagctttttttcccccagctgtgatcaagatgtattaaaagaatatgaaagagcatctgggttattctagaagttctgtgatcaaaacatattaaaaaaaattaaagcgcatctgggttattctagaagttcctgggctttatacttggatatttacagaggaagttgaacttcaagttctgccactcttcaaaatgggtgacaggagaggacgtgataggacagttaaaaaaaaattgatagtcattctctgatggagtgaagcaagctttgtcaaccatcaacaaatatgacttcattggtcacaagccctgcagagatccaacaagatttgagttttaaatacagaacatatttcaaacagaaccagcagagtgctgatgtatgaatggaattgattgctgaaggcagagagtataaagaatctcaagaaacttttagtgccattttcatttaataagccattggtatagcaacctaaaaaccttggctgtgatgacaccaggatgtgtttatggaattgctgcaggaaaacacaattggcagctgacatcctctggctcacagcaccagcttctccaagagacttaaggctggg

SEQ ID NO: 158469 - DNA, 799 bp, Homo Sapiens
tttttttttttacaacatgttcattttatttccctcacatggggcataccctttggggtgtaaaacgtactctacaccctgttggctatttatctggggttagacctctggagacttttcagatagacttgaagtctctggccttgcccgggaattactggctgtccgaaaagagactggagaaagtggtggtctccttgcccttgtggtcccgctatggctcattttgattgagttcctcgttcggctggtcagagtggctggatagtgttggcccactccattcctcaggtttttttgaagcggcggtcttttatggagagccttttgttcctggaacttcctcgatgggtcccttttcccttccgagttgtcttgggaacctctttggtgttggtgggtggttgttggacaatgggctggaggctcgtggtttcctggacatcttcaccagaccagcgtctctcaacagtatactccagtccacctggtctctccaagcctcccccaggacagtgaaggcaggccagcaggcatgaaactcacagtgcatttttatgttagtcttgtggtagaattccttttccaggaaaccttggtcttttctcttaacaccttcaactaattggatgaggcccatccacatattggaagttaaactgctttacttaaaatcaactgattgtaaatgttgatcacatctacaaaataccttcacagcaacatctagactactgtttgaccacacagctgagcagtatagcctagacaagttgacacatagtactagccattgcac

SEQ ID NO: 158470 - DNA, 1000 bp, Homo Sapiens
tttttttttttttttttttttttggggtgcaggtggcgtttattttcatggatttatacacactggaaaagcctctgcgcccatgcccacgccctcctccctccccccggcgctgggtcccctcatatgaaagggaagtaacaccgaggagcacacggagatatagggtgtggggctgggggggccagcgctggggccaaaagtctgggtccccagcctcccacacgcagcccctcgggccccttgggtgtgtcaataaataacccaggtccaggctggtgtgggcctcactcctcgctgtccagcttcaggctgatgctccgtgctttgccccgtgccagggtggtgggtggtgttcccgggccctcacgctccgcctggctggggcccctcgagcgaagcagctggctctgtttgcgcaggaagtccacgggggcagccacaccatagctgctcttgcccaaggcagctctcgggggtcccgaggaggcatgcgagtgcgagcccgcttccagctggcccaggtgggccacatagccgtctgacaggaactggcactgcgcctgtagcttccgcacggcacggcccacgatgtaggtctggctcggggacagccccagcgccgtgtatacagccacatctttgggagacccataaccggccacgatgttcagtcctacctcctgaaccaggctctggagaaacattgccttctggcgtagtgggtcgtgggtgaggccgtcgcagaaggagacgacgccgtgggggaagttgtgctgcgacagccatgccaccacgcggtgcttctgcatatccggccggcctgtgacatacacgatcaggtagccggagtcctgccagtgcctgaccacgtccacggcgccagctcgcaccttggggtcgctgcccatgatggagacgctggcggtgaaggagccgtcgatgctgaagaccacagcctccgtgccgcgggccaccacagtcaggcagcattcggcat

SEQ ID NO: 158471 - DNA, 1000 bp, Homo Sapiens
ttttttttttttttttttttaacgtttttaatcgtgttttattccattgccacagcctactctaccttttctaccaccccgcagtatctgcctctgggtccagggtcctttctgctccggcactgggggctctcaagaggtggggctgccacgtgggtggcctctccctggagctgagcccaccctgggggaccctggatcatgcccctttgcccccagcccttggtttgcagggaggccgcctggcgatgcccagcctgaaacagcacccctggcagggctgctcagtggcagctctcactttgtgctcaacaggaagcaatcagaaacacataccagaagccaaatctacgccaacaatttctcagacaacgaaaaagcaaagagcaaaatcaacatgatttggaaaaggaattttaaaccttaaattaaaaaaagaaaacattttcacacagaagaattatctgctttgagaaataaagaaattagaaggtgtaaaaaaaaatttttcaaaccccaaataatgataaaaatagatgtatcctctgtaaaaatctggactaaactattcagtcattcatggttattcagtattcagagcatgaagtgaaacaccaaagtataaaaaattaaaaaaaaaaaaaaaggaatccgagatactgtcgtttgttgccggcctcggcgtggacgccccgaccatgggccacgcagggcgtctgcctcctcccaccttccgcagacctcaggccttcaaagctcttccttggtcctgctcagttttgtggcatgttcttctataaacttgctcaaatgctccagatctctgtctccaccctcaaatttaactgggttctttttgtccccactgggggcgaagtagatggtggggaagccctccaccttatagcggtcgctggggacgtcgttggcagtggcgtccatcttggcgatgaccaggcccttttggcccttgtacttcttggccaggctgttgtacacg

SEQ ID NO: 158472 - DNA, 1000 bp, Homo Sapiens
ttttttttttttttttttttttttttttttttttttttttttacatcttaatttattttatttctttacaaattaaagatgcattgaaaaataaaccaatgaagagaaatgagaggtccagagcaggggcatcccaggtggggagcaggcaagcctggccaccatcaagcctagcccttgtcctgcccccaagccagttggggttggaagataactgtcagccactcagtcaataccaaagcccaagcggtgtcccagcaggagagaacggcgctccagctgcctctgcctctctccccaacaaccccgggcctggagaagcagtgtttctcgtgggagctcagagtgggatgtgaactggctctgtgaggtattgcaagttgatgaccaggctccctaggctccctacagaaccatccagtgttggggcctctccagctggaaaggaagctggtacctctaccagatcttaatatattttgcaactcagttctccggtcacctctgacagtgtgcctctctatccacggagtgatcatcaatcattgcaggagagagcgagcgagcagtgaaagcagagaaacttgactgctaacctccaggcccaagaaggactgaccacttttctctccaccacctatgggctataccccagctcttgtgcacctatatgttttatccctaatataggaagttgtggatgacactgagccccctgtagtaaccttaggatccccactctttcctgcctgcccctctcctcttgggagactggtccaaagggacacataatattgccagggtctgggtgcctccaaacccccaataccgaatcatatacagtgaactgagaagctacattcattatgacaggattagcaggaaaaagagggtagaatgagggaacaggggcaccttccatcagcaggacatgacagagtggcaggatacttgagcccagaaagaaggtgtctccttatatctccccctccccccagag

SEQ ID NO: 158473 - DNA, 1000 bp, Homo Sapiens
ccttcttaaaaatattacatgttttattatcctgtccccagagggtggtttatccagaaaccaagaaaaaaaatcaatcagaataaactcaaaaaaaaaaggtagggggagcaaaaccatcaaccaccaggcagccaggccatcagcccacctccacctctggagggtccccagagacccacgcccgacgcagacccggaggagcatcagcaaggggcccgggcagagaatcggctatgtcttcattatgagagcaggagagacggcagagatatgttgctaggtgaatatatatttatataataaatccgtaagttaataaagtaaatagtaattctctgaaagtttttaattctttcttttttatagtttttttgtttttgtgattttttttttttttggtttttgttgttttgtgttttttttccttttttttttttggttcttagaaaatctgagacacgtgaggccagacaaagcaaggccggggctggtgggatggggtgcggttcaggggggcccggtctgccaactcagctcctctgctgcaaaagcggggtgcttgttggggccatctcctggcaatggcaagtgagtctggagcagagaggggagaggggctgggtgggtccccagccgtcaggtggtggtggcgccctctgctggcccctcgcatggcccaggcagttcctggacaaggcacatggggctttggcctggattggggaggccttgaagggacctcagagcaaaggaagagacctgggtgtggtgaggcatcccagggcatggaagggaccggttgtgctgtgggaatccactggcccctccttggttaaaaaagcacaacacatcatacatatttaccagaccagaagcgctggccccaagtctccccaacctggtcgggggaacctcctggccaacccacaaagagagagaggagagagcctgccccagcccctccctgcccacccacccaccccggaggactgcagag

SEQ ID NO: 158474 - DNA, 1000 bp, Homo Sapiens
tttttttttttttttaggcacatatttattttattttttttaatataaaagtaaaagagtacattgttgagtagaggattaaaggagtgacgaccctttctaaagtggggtctcccatcccggatccctaagactgtaacatctgctacatacattaaaaacaaaacaaaacaaaagcaaacatgaaacttatgacctgacttcactccacccttcatgcctgcattatgacagaaacacgtcccactgctcctacttatgtatgtacatccagagctccaaacctaagctgtggccccctcctcccagccctacccacatccaccctacttcccaaaagcctgtagaagcccccacttagaaaaaaaggcagacatacacatacacagaaacacatatctatctgcagctcctccatgtgaagcccctgaaacatacacaccctggaactttcctctccttatgcacagatggacaggctgccttcccctgtctctgggctcccccaatagccagaatcccttccgactggtcccttgccctgaatatctgggaaccccccccacacacacacacccctgcacacacatgcacacacatgcacacacatgcacacacacacatacctgctgcccattctcttcccttgggagacaaaaggatgtattgacccaaattccggttccaccccagcttaggggcagtggcctaaggtgctatttgggcaaggtccagtggaaatcctgaaggggctgtctcgtggggtgagggtagatagggagctccttagcctgaaagggtggatcgtgaagggggcttcttgggagtggcccttggacagtcagtggatgctcaaggccagggcagcggagtggggagatggcccctgcccactcagatctgctccttgtgcttcacatgggccagcttcacattctcttcctcgttggagggtgggggctgctccaggtggcagccgatcatcagctggtacacgaag

SEQ ID NO: 158475 - DNA, 1000 bp, Homo Sapiens
aatgtttcttgaaaaaacggggtttattgatttttaaactgcaaatagtcgttacaaaaagtttttttttcttttaaataaattcacacaaagaaagagaaatagaaagcgacggtagtgaccagcaagaggaataataattacattcatcttaatgtgtgtgtgccagttctgtttacattaacattggaaaactccagacctggaatccagaacctcaaatctgtgagtggaatgtcttgagatgggcacgtggaagtcaaagggtttctctttttttttttttccccttttagaagctatacataaaaagttgttttccttctgtactgtcacagaacttttacatacattctcagtcctagttgtgaaaggcctaaagagaaagaaactcaatttgcagtccaacacaaaggggggaatttctaaaataaataatccaacagttttttgcatttttttaaattaatttttcatttttttaaaataaaataaccaaaaaagtgtaaagttacaaaaaatgtcgttgaagaataatatattaaaactgtggaaaaaaaggaaaaagacacgtcacaaaattttaagattaatatgaagatcataatttaacataaaagaatatattctatggatttgtcatcccgataaatatgaacaaaattaacaaaaaaaagcatagtttggcaataaatacgttttgataagttaaataagcttttttatattgatgtgcagtgacaagcaaaatttttgctctccaatttctgaaagttatatgaagtttaaaacccagggaagaaagcatggcgtgagtgctctaaggatagacctacggtattctagagcaaaaaccattaaagctacttctacaggaaatcgttttacacagatattgtatgtggaatgaataccattaactgctcaccccttacttttttttttttagcttttctctcattttttttttgttgttattttttttaaaaagatgtcacat

SEQ ID NO: 158476 - DNA, 1000 bp, Homo Sapiens
ttttttttttttttaacgagcaacagtttatttataaaaaaagaaaaaaacaaacaactttttaacgacattttatagattaagtaaaaataccagtattaatatatatgtatatacatagtgcatatatatatatacatatgatataacattaacattacatgcttctcaggacagaagaattaggacatgttccctcctatcaatttaaaactcgatcacaatttaaaatcatggaagaaaacttgcttcctttattttctgcttttagacttcaagtacaggaagttatgaaaccaggatctaaatgtggaaaccatctgctatgcaccaattataagggactgccacaaatgatgagtcaggggtcttctgaattcttacataggtctctgtaaccctacaactgtgtcaaccttctacctgagatgagagggaatgatgaagcatgacagtgtgtaggtttcatgtggacgttcacattgacattggaacaaaagcaaacggaaaaatgtcttcctagagcaacaacactgatcataaaatcaccctggaggaggattcccttctcccctttccttgccaaacaaaacagaaaaactgtcagaaaacaatacaaaacaaaactcagggtgaagcacctctggcgatgatcagcatacagcaagggacagagaggtagcgtttccttggtgacagctcctggctgactccgatgatttcaaacacaccctcttctgcaaaaggcactcacatattgtctgtttataaatcatacagtgggattccatacatgggagtttctcctacaaatataaaagagataagctgaggaaatggtataacacagaaaagcgtataagaaatacacattttggataaatatgcacttttcttttttaaaggacaatcaatatgatagttaaaaaaaatgtcattgaaaagttaggaattccagcaaaattatcagtaagaagcaaggtactggaggatgagagat

SEQ ID NO: 158477 - DNA, 1000 bp, Homo Sapiens
ccttaagaaaataaatatttccacgaggtcaagccaaagtacaggggctggagacggggtgggaagtggggcaaacactttagatgagcacagtagctcctgctagctggggcatcagggcactcaccatgtccctgcacaagatgctcacccactccaccttcccatcctggagctgcacaaattgtccctttcttgaagttgatgcaatgtgtctctgtgttagatatgagctcccaactgggcccaaggacttggggtgatggaggctgcaggctcttgccaaagccaggtttaaatccctgtttctattttaccagcagggaagaaatgagagtcgagttgagaaaatgctcagttaagacagtcagtcacgggacagctgtatcctcaggaccagcctgtcatcgataagtccaagccctggctactgctgctggagaggcaaaggaacaatcttgcctttcagcgccgtcggaaagctcgagatattctccaggcattgggttcctcatagcggttgtacaagggttcaagacgctgttgcttcttctgtttgcttagcttagttgggtctgagaccttgaagaaggctggggcaaactccacaagccaccgagggtcgatggtggtaacttcacgcatgtattccttggtggtgagcaccagctcatggtacaccacccattctggctgtctgttgaagagggcactggaaggatggatatagaccacctgctggtcgatcagtgtccggtaaccctcctgcgggtctttcttggcagcattacggaagaacccactgcagatggccttctgcactcggactgtggacttgccacaggaaacaacatccagcttgtgtctgtccattatgcctaacatctgcttgcgaatgtcctgggcccggcgcagggaacgagcctggataaagttctcatagcaccatgggttggagaacttgttgttcttccaggagttgtacacagctagcagggtg

SEQ ID NO: 158478 - DNA, 1000 bp, Homo Sapiens
caccagcagcgtcttccctttattttagtttattaatagaatacagagtgcaggcacttacagtggtcaaactgagcgaggagtgggtgaggtctcctcagagagaggccgccctgggcccacccatcagggaggcatgggcgggagctgagaggcccccaagaccccccgccaccaccacccacatagcccaagcccagccaccctgggggacccaggaggaggaggaggagaggaatagggcaaggccggcccgggccaacggctccgggcctagcaaaggcacctctggcagccgaggctgggccaggctcaggctgtgtggttaatatggccgggaaggactatgtacacctcaggcctgccagctgggcactaccgagcccactgggccaggcttgccgctggggagctcctgctaatgggaagttgatatacccctgcaccccagcaaggcctggggatgtaggcgcccttggtgcccgcacttatagaaggcctgccctacatgggctttcccagcccaagaagaccttggtagagtcccccccaggctggacccctcattcaggatggtgtcaagggttctggtcccccctctgccaccctgagactccatcccccaaagtgcaacaccccagcgccccctgcctggagctccagggcccctttgcgcagtgcggtgtccagccaggcacaggggccggccctggaccggggccagcgttaaggaagaggccagggctgcccactgggagcctggtcccagcataggggcggcggagggccccagaccactgaagctcctgcgccgcgggtgcgtgaggcccccccgagagcacgcccccctcgaggcctagtcgagcagggatggctcggctgggcggataatggtgggccggctgggcgcagcagggggtcttctgctgggcactcctgggggaatccctggggggatccgaactggccgagatgggatctgaggcggggctgggaagag

SEQ ID NO: 158479 - DNA, 1000 bp, Homo Sapiens
ttttttttttccccatgacagaaaagtttaatctctgctctcaaggatatcatttggccttctccccgaacactgtattccagttcctgctgggcagggtaatctgaacaggaaaactctctaccttcctgatcgggacatcgatcttccaggaaagtgaaaagggggaagaggaacaaaatttaactaaaatggtcacttttaatgggaaccagaggtatagttacaattacatagtccgacacaaaaaaacccttgggtgatcaggaattggaaggttacaaaataacgagggtaacactgggtacaggacaaaaagctgttccagaacctggggagccaggctaattaatacggcctctccctgcgatcctgtctgtgctcacccctggaatccatcttgccagggccaaagccacctctgtccccaccaccccggccccctcggaagcctccacggtccccgccgcggccccggtagccgcctcgatcatagcctcctctgccaccacgacgatcatccccgtagttaccccccatgtgagagccacctggtccccctcctgggccatctggtttaggggccttacactggttgcattcattcctccaagagaagttcatattctcacaggtgggattaggacacttccagtcaccagctcgctgctgtcctccaccgccaccacctccactgggaaatcctcctcggccaccaccaccactgccaccacctccatagcctccacggcccatgggtcctcctcgccctcggcctccacgaccattgccaccaccccgattaaagtctgcccggcgagtagcaaatgagaccttgataggatttccggagaattctttaccatcaaaccagtcaatagctgctttagctgaaggtgggtcatcaaaagagaccgttgcctctcccttcagcttgccagtttccctgtctgtgtacaaattaatcatgggctgtcccgttttcttgtttgtcttaata

SEQ ID NO: 158480 - DNA, 1000 bp, Homo Sapiens
tcaagataccactgtacctttaatttattagctttccataaaaacacataacatacacaatctacagtatagaaagtataatttacaaaaatataaaatcttggttattttttagtattcccacgttactatatgtgttatttcaatatgcatgtttaaacaacccacactcagcatgactatctctgtggggaatggtgtcaacgccctccctttttgttgttttaaaataaaatatatatattaagaaaaagaaaccaatattggctacatgtgcataccatatggataaaagctctgcagtggactttgaaaggaaacactcatttacaccacgattatcctgttttccaaaatcactatgtggcccaaagtgttctgaactgagcatttaaacagagttctttccgtgtgcagggagcgagcgccctaagatttgcatagtcttcttgctcagttatgagatgatgatcacatcaagccaatgttgtggatatgttttgttttcaagccttcagaacagtgggtatgaatgatgggccactttcaggccagggctaattcccagattccttcaggtactcaggctggcatttaaggggctagtcactagcaatgaaagaccccctaatgatgcactggcggacagctctctctgggccccagtgatgttgcccatgagctgtgctctgtgtctgcagctgcaccacaagtcctggttgcagaaggctccgagaaggcagctctgctgggcgtggcttctttccaccctggagtggtctcaccggcaggcacaggtgtccacggacatgttggggtacaccttcagaaccacattccgattctcatccaggaagaggaccccaagggagttcatcttatcgggaacacagcagggctctgggatgccagggatgatgcccacagccctgacaatgctctggatggtggcatggttggatggacgaacgatcttaggcatggggaactcacatgctcc

SEQ ID NO: 158481 - DNA, 1000 bp, Homo Sapiens
agaaatgtaccattttattacaaagaggctcacaaaaatgaaaatagtatctcaaaaaggaaactagactagcaacctccacctgcagaattaggagaagacagacagagggcaggcagtgtttcttggctcacttgaggccagtgggaaggtacgaaaacagaaccaatctaaaaatggctgatgttactttaggagcctgaaaaaaacaggagatccttgaagacccagccaccccttctagaatgttcaataagggcacctttccaaagctactaagcaggcacttggcatttcaggagtttgtcttatggttgcataaaagtatccctttcacccagacctggcaccctttatggttcaaagttaagaacgggaagaatgggtggcaaggtggctcctggaagagctcacccagcacagctgccctgagctcggggccttggtttctgtccctggggatatttatatttaataaatttttatataaatacacagagaaatagaaaatataaaatctgaggggttggggaagaaacgtgagggactcagcaggaagccagagctggagaggtccattcaggccaacttgacctcctccttgacccctttggcttctggcttctcctccttggttttctcctcttcggtgacttctttcttctcctctgggtctttctctttttcatcctctgttttgactctcttggcttttttgaagttggaagagttcttgcggcccccctctccctcctcttcagaatcggagaactcttcctcacaggcaattcgtttgtcagaggagcagatcgagatgcgcttgtcagggtcgtcttcgtcctcatcgccactctcctcagggatggcgtcctcaggaatcgcctgcatttggaccccaggtgcgtgcggcagcattctaaggttctcaaacagtcgctgtttgatcttctccaggtactcattcgtgttctggttagtcatattggaaggactgatgtgg

SEQ ID NO: 158482 - DNA, 1000 bp, Homo Sapiens
aaaagtttaagtcagcattttataaaaacgagaaacaaaataattgctttcacaatgtagtacttgaaactaaagttctccagctatcaacagatgtgactccagcatcaagggcctagcaggaaaattctgaatggtttacaacagtgcacataagttgcaggtggctggggccgtgtgtctatttgatgcttcccagaatgtgtgctgctagtcaccatttccaccattcacatatttaacatttttattagacttttatttagcctcatcataagaatataagggagatcatagatttgatgtatgaaatttttaaattcacactaaaatacattacgattaaaatgaattatcttcaaccacccgttttgctatcttttgctgagtaatctgtgccagtcattgtgaaaaagtctttattttaagaaaaaaatttagttaacaaaaaatttaacaagtttcacttagcaaaatacacccaaaaggaaatcacagtacaaagaaagttttaagtcaaggcctcaccaattcctacagtattagtattgtgtctcaattctcaaaactaacttttaaaaagcttaaacttaacctaaaggattttaaatgaaaatataaactagaatgaacaaacatgagaaatatttctttgaatcagggagctagcacctttgagttttccaaaaaagcacgtctccccagtgtgttcactgtgatgtggtgtaaaagatccacatttaacatacttaaactacttaaacttagataacatcactctgaagtatactaccaaaatgttaattgagaaaagctgaaaatagttttagtttactcattatcacatgctagaagaaaattttgcatgagaaaacactgaagaggtaattttttaatccagatttttcacaaactcatggtgcaaaatgggtcccccagcttcctctattataactgctcttaattgcttgttggctgcctgtgaaaatgattgaagtaa

SEQ ID NO: 158483 - DNA, 1000 bp, Homo Sapiens
aaatttataaggcaaactctttatataataaataggttacagggattcagtggggggggggtgtttttgaaacgtatacaggtacattcagacaggtttactgaaatggtacaaatttccttaataaattgccttttgtttttaaatatatcagtgctttcagtcatttggctatacacaaagaaccttttttctgaacactacaaaaaagcaatcaataatttttgtttttaaaacgacctacttattttctaaagtaattgtcccaaaacacaaaaactgaaggtgaatacgatacagggcttttagagacatctccagctaagtgtgtcccggcctctccctgtgccccaagtgcacctctcccaacctcagacaggtttccaggctggagccagctcccttctgcacagggtggcctgtgttactggcaatgctgtccatagctctcggcctctgggctggcacaggggagcatgacttcaactcaggagggggcagacaccctgcctagctcttccagatgctgcacccggcatgcaatggtcactacagtcagcactctccgcctctcagaggagggaggggctgtcaggtgttttgggagcccaaaaccatgcctaatgagggtaatggcttttctaaggagatgttttcgccatggaatgggaaggggttttctcacatctaagttttgctggcgatcgggtgacagccaagagagtgcaagccccctccatggtcattttattgccctgggaaggggagggtggggaatagagatgtcacagtgttgagccctggaggatggggtgggatgtgacggaagtgtcttaaacagtaatgcccacggggcacaccttggagagagaatgcccaccacctggcctgtccaggaagagctgcatctgccaacattagcctgacctgtgcccacagcagagcgtcccagcctcctgcttgggtgggcccagccccattctccccagctcttcagctc

SEQ ID NO: 158484 - DNA, 1000 bp, Homo Sapiens
tttttttttttttttttttttggaattcatatataataattataataaaaatatacattaaacaaaacaaaaaaacaaacaagacagaaatctagccgaactgccagcaccgttcaccccatttcccctaccccgtgccccacccccccgacatccctctcctcttgctccctccactgggtctcactctcccaagtccccggtaccatggccaccacctttggtggcccaaggagacttcaatgggtgggctgggtgggggagcgagagggcaggccactggtgagacaggcttgaggggtgctggcaccagggaagcgtggacccagcctaagcgagccccagctcctgcccctcactgagatggtgagcaggccgggacagcgtggccagccaggccctgtggcctctcgtgaagcccctcattcctcgtttgtgtgccttctctgctcctttctctggctgccctacccttcccctccacgctgcctgggcagcaaggacagggaccaacaggagcaagtgtgccttcctcagggcccttcctgagagctccacagcccaccctgtggccccctgcttggcttggcctggcctgcccggccccagccttccaatgctgctgcacgtcctcattttcctttttggtcccctcctgccccctctggctgttctgcctttgggcctcagccccagctgcctgagtttgggcaaggttctttctctgtggccttcaggctcacccccagggctctgacccgggcctctcccaccggccccaccctacctgacagctgcacccctggtttcagctcttctaactgtgaaagccccatccaaggctaacattcgagaggcacagggctgccaagggtttcttctgcccacttagtccccagtggctcaggctccttccttggaagttccctggggtaggtgaggcagaggcagatctccgaggaacttgactgactgagcaacgaagaccctctctgagttt

SEQ ID NO: 158485 - DNA, 1000 bp, Homo Sapiens
tttttttttttttttgttcgccgattcctttatttatttaggaggtgggggcaggacgcggagtaagtttcctatagggaaagagttgagaagagtctgcagggactgacctagaaagcagtgacactccgtagttggaaaaaagcagagcacatctttaagtacctggtgtgagttttgtaagaaaacctaccttatgaatgagtacagtggaatactacttagtacattcatacatgtttctaccatctcaagatttttatatatacagtatatgatctgtttttataaatgtacagcttgaaaaaagatccttcttgtagtaagtacagcatttaaacacaaaccaatatgggccagccacattctaattgaagacccagagaaagcaaagccagcagcccagcccccagcccccagcccctgacctgcttggcggccctgatggtcccggcaaagtgtaaaccagtgcccctctgtcgccctgggctcagcaggccagcttacccttggcacgtacatgggaagtgcctgctcacgctaagcccagtctgcagagggcgggtcctccctgaaggaaggtggcagagaggaatgtgtctatcaggtatggacaagagagatgaaagaaatgtgctcttcaactaaaggcacttgtcagcggccacctacagccattctctaggcctggtgagcaagcagggtgctgttttgatagaagcctacaaggtctgagcagacctcacttgtcctctcaccaggtttaaatacaataaataaatcttaatgcatggtggttttgtcctcctgggttcctatgaagaggctaccttttaggatcacttatggagtgatactccctgtccccaacccagccttttcagtgtcctccatggggaaggtaccagaatagctccaggccttggagaagcaattgctcattgtggattgtaaggggagcccctaaatatcccctcccctggtctgtgcctggagctcc

SEQ ID NO: 158486 - DNA, 804 bp, Homo Sapiens
tttttttttttttttttttttttttttttttttttttttttttttttttttttttttttttttttttttttttttttttttttttttttttttttttttttttttttttttttttttttttttttttttttttttttttggttttatagatttattttcaaagagtaaaacacatacaatttaaatacaagtccatcagaatcactctgtcagagtcagcaagaatgccaaaatgtgtcctcactgccagacattcgtcactatcatctgagtcctctctcagcaaagccaaagggtctgatactttattcatatacatccttcttatctgcaatgtaatctacaatttcttgtggacacattaacttttcagcatctatatcaggaatttcaaacccaaattcgtcttccatggccatgataatctccacttggtccaaactgtctaagcccaggtctttcataaaatgagaatttactgaaagcttctctgggtcaatcttgtcatagagtttcaatacgtaaagaacacggtcctggatgccctctaacgtcaaaggaggcatgtcgctatactggcggcacaactgtgtaactctaccaggaacctgcgcgagcactaaggccggctgcaaagtcccgagcctcgtctgggtccccgcggagcagagagcggtgctgagaggccgggccacggccagcatccggacccggggcagcggcgcaaaggccgcgggcaggcggctgacataggctgaaaggacacgagacgccatggctacgccaacccaggatgcactgcgc

SEQ ID NO: 158487 - DNA, 1000 bp, Homo Sapiens
tttttttttttttttttttttgtcatcaaaatggaacagatttattaggatgctcacaagaatggagaacacatgaactagcactctcctcatgtgacagagagtacatctgacccacatggtggcaggacacaggggaagggctctcagagctggtgccaagtgtccaccaaagaaagtcccattcaccagagacaggctgtttccttggactccaccatctctgttacagctaccagccaggtctccatgatcttcctggaatccttcatgccagcatcagttcatgctctctgagcttgtcactcccgactctttcaagacccaggtcaactgccccatggctcacccacccaggctgcctccggagtcctgcagcacatctctttggtatgctgctgccctgctaccctcaagggcatggttgtgggtagggggagaacatcaacatcacattaccaaaagcaaacagcaggggtacattagtaaacgacacttggacatagccgaacaacctcacagaacacatgcttcctccccaaatgatacctaatcccccaagagcaaatgaaaccccttgatcacttgaacacgtatgaatgattctgtgtgccaggcacagggacacacaatgaatgctgtttaattccaccacaccccgcacacaacaggaagctagtggctgaaagctggaaccagatctctgtcctggctccatcagctttctcctggctctttctgcctttcaacggtgccaccaccctgcttctgtctgctctgaacacttgttccaaaaagggaggataaaaggatgaaggatggcagagggagggaggaaaggaagggggatagcaaccctgtaaaacagaacaaaaacaacacaaaaatccagaaaccagatttagtactacattttataacaatagagagtagctgaaaatactacatgctaacacagataatatgatacacaacctcaggggggaagctggcagggagc

SEQ ID NO: 158488 - DNA, 1000 bp, Homo Sapiens
tgcttttaaaatatttattgagcagagaaaagggaagggagctaaaaagatgaaatagatgttgagttaacagctttcttccaagttctggtggacttcagactttaaatgtgtggctcaaacttcaattctccagctggccctgatggaggaattccttgttgtaattttttttgttccatctgctgtatgacctgatgatattccagcttctgagcctccagttgatcatgctgacgttgtagctcttctttttgtttctgaagctcatctgccttcttcttaagttcattttcttgtaaagcaataatattttcatattcttttagttcttcctctgtgaagaactgttgctgatctaatgtctcccagctatctggctccaagaattcttttttttctgtggctttcaaaaactcctccagagtcaccaatctgtctttgttagtatcaacctcattcattacatgttccctcattctaagcctttcttcttccatttctaccatatcatcctcttcatttttagggtcatatactttctccaactctttagtaaatagggcttctaattcttgttcatccaggaatccatcactattgacatcatgtaatttgaaaaatgtcttggggtcaaagtcattaggatccaatccatcagtctcttcccatacctcttttagttgatctttgcttcctgggtgattaactttagggtgattttcatgctttttcttcatttcttcaaatttagactcttcttcttttctcttttcttcattcaatgtttttaaatattctctcctttcatgttccttcatcatttcatattttttaaattcttcatgacgagtcttgtcatagtgttccagatcacttgttgccgctttgattagcatatctaaatctgtggattcaaacttgtcaggattcaggtggtttaggtgatcaaattgttttagaagagcttggtggtccatgcctatatcttgaagggaat

SEQ ID NO: 158489 - DNA, 1000 bp, Homo Sapiens
agcatgctctcatatttaattataattataatataatagaaccacagggaagggggatcccttgtcccagccactcaggtgcctgctggccgcctggatgctggtggccctgccccaggagtgggggtgcagtgtgtggatgtgaggagtggataggccacgcgggggtactaggccccgggggaacgcctgtaccttcccacccaggccctggtgggagcccggccaacccctttaaataatttcaggaatgggttccaaggagagctcccagggtgggcacatggggggccctaggtgcctgcacttctgccctcccaacacccaggtggccacagctgggaggggcctgagtcaaccccagccctgccctcctgaccttgggaccgtaggatgtccctctcccgagtggtgtgaggggctggggtggaatgcggcggcaggaggccagagtgctggctggcctgaaaggcctccagctctgcctgcccgcttactgcctcagcttccctgccccacaaagggcctgaggtgctgcctgggcatgtgtaaaggtgggaggggtttcctgccctgcccaccacagccaggagctcttctgaccttccctgaaacttctctaggcctgcagggagcagataactcctggggagtccccagccccatgtacctcccactcctgtgcccagtcttgggccctgcgtccagggcgtttcgggatgccactgccaggggcaccttggctgctccaaggccatctccaaccagcccccaagttcaggcaggaggctccggggcgtcaggcagggccacggcgccttcagccccgggccgcaggcagcagcagcagcagcagcagcagcagcagagattcagggagctggacgcaggcagctctgtgctggcaggacctgaagcagtgactgcatctggccctccctgtaggggacggtgacacctgctgcctgggctcactgtgggcattgagacatgagtcctg

SEQ ID NO: 158490 - DNA, 1000 bp, Homo Sapiens
attatgtaaatgcctttatttgaactactacattgctaccagattacatcacttttcagagttagagtaacataataccttggaaactatagcaaacagcttgacaaagcaagagtacattaattcctacatatatacttttatttttagtgaccacatttctttgtttcaggtgtaaaattaaaaaatatattgtacacttagcatacttggcctaccaaatcccgtctaagttctgagcacactctctcctcaaaagtatcatattcaacagcattttaaatttagagagagagtttgatgatacaggttttaaaacaaataagcatgtattgaaccaagtgatttaagacaaaatatttcaattgtttacagcttgggtatgagagggaagatgcaaatttaaggtacatttttcttctagctacgatgtatgttttacttacttgaagaccccttaaaaaaagtagcaaaatcagcagtcttgtttaatataatcaaaatattcttaaatgtacaaaaaaggatcatgtagaaagaatactgtaaaaagatactgatcttaagaataaaagaataagaaaagcttctattacattctgcacagccagttacttcggcaaattttcagtactacaaagataagcaaaggatactcatatccaaatacgctctgaccatagttctcgaataagaactagcatactggatggaaagcaaaattactgtctaataatattcatatcccatcatctaagcaagtcccaagagagggacattctaagagggcaaaagataacagagcaagaaataacatacagcaatgggaaatgtcaagggcagcattctaggaggagagagtaaaatgttttggctatgagcacatttcaggcgtgcctgacaaattcaactctgactatgggaaagaggagttgtttttcttaaaccctttcccctgagggctctcatgataagctagtcctgttaatcaaaatgaaaa

SEQ ID NO: 158491 - DNA, 1000 bp, Homo Sapiens
ttttttttttttttttttacaaacttaagctctcatctctttattcaataagatgtgtctttacaagtttaaaaagactggacaccattattttttatgaataatgcacataaccattttaaaaaacattttacttggccgggcacggtggctcacacctgtaatcccagcactttgggaggccaaggcggggtggatcacaaggtcaggagttcaagaccaacgtgacgtgaccaatatggtgaaaccccatctctactaaaaatacaaaaattagctgggcgtggtggcacgtgcctgtaatcccagctacttgggaagctgaggcaggagaattgcttgaacccgggaggcagaggatgcagtgagccgagattgcgccaccgcactccagcctgggtgacagagcaagactccatctcaaagaaacaaacaaaaccactttacttactgtattgtgacatgtttattaagcatgaacccctatcagtactcctaaactgtaaacagtaaggaactaaggtgtcaaaagaaacacattagggatcatattcatagacaaaaacctttacattttcttattgcatttatacaatcaacacacaataagcaaaactgaatcctttctaagcaaacatttttgcatatactgccttctctttatctttctgtgcctttatcttttgtttgactttcagcaattctgcctggatagctttatcttctggtgctatcccctgagctttcttaagatcagccaatgcttgatcatattcttttaatccttgccatccttgagctctgcggtacaatgctttggtatttgatgggtctagttcaagagcctctaaacaactgtcaattgctccctgccaatttgacatcttcagtttacaagcaccaatattcagtacacagcttaaagctataggttgcagcttggctctatctgctgtctcaataacagcctttgaactgtccacgtatcttaaaacttctg

SEQ ID NO: 158492 - DNA, 1000 bp, Homo Sapiens
tttttttttttttttttttttttttttacttatgaaatgaaaataatgatttacaaattttattcaatctaaaaaaaaaatcagaatgtgtagaccatacataggagagagggcatccccccaaaatctgatgttaagtgaataaaatcaatgtcatgaagcagaatggtggttgccagaggctggggaaaagagggaatagacagttattgtttaatgaatacagtttcaattgtataagatgaaaataattctgaagatggatggtggtgatggttgtacaacttatgaacatatgtaatatactgaactgtacacttaaaatagttatgacaaattttattgtatatattgcaccacattgaaaaaaaatcaacatcatgaatgagattaaaacaaaggtcattttaagagaatatttctcaggccaggaaagacctggttatagcctaattagtagtgatattaacagtaggggactagtcagcatggaaacacacacaaaaaacagagtcacgttgccaggggagatgatcaatctggggactagataattccagtcactttaaaataattttgttacaaagcaggggtggtttatcaacttcaccacggcctaaaagaaatatgctcatgcataaacctctgaacaggtgatttggtgtgcagagtgctttggctttgctgtttagagagaagaacactggaaaacaggtgggtgtaggtgttgtcaatgaaaagaaagattatcctttgtaaattaatgagatggtatcctgatttatgcatatgtcccttctgttctgagtctgtttattaggagtaagtttccctttctctgatcaactcaagattgactttataggtatgaaaaatccaaagcaaaaccctcagcaatcatgacctaccaataaatgaaatgacagtttaggaatccttctgatcccccaaaaccacaacagggcaaagttcattggtaaacagcaaaaaaaattacatg

SEQ ID NO: 158493 - DNA, 1000 bp, Homo Sapiens
tttttttttttttttttttgtttttcttgtatttatttttagttactttccatctatgttaagtgtaaaatttcacttaaaaatccatttaaacttaaaaggtttgtttttaaaaatattaagtaactcaagtactagaagtacagaagcctggcaaacattatgaaggtaaggaaggtaatacatagacaactgaactggaggggcactggtctgagtgaggactttgggcacagtaactccacctcatgctttgtgctttctgggttttgtctaatttgctgttgttgttccctaatatagactatttttttagaaaacccaaccttattttggctaaggggaaagggatttactttcatttgggttaaggtagggcagaccaaaggcccctagaagttagtggttcaggttctaactacacaacactggcaagtggaaagggagatgtggggagaagtgaaaaaccctgggcataagattccagaacagcagagtgtgcttcccttcccaccaagctgtcaaatacaaatctggagattcaataaaaaaaatcattccatgatagagaagacagaaagctgtaattctttttaatgtttaacttttctttgtaaaaaacttattaaaaaacttaaatggtcagttaaagttaaaaatctattgctgcacaatttaactgattaaaagatttccagatctcttgactccaagagtcatttctttcatttcttacagatctcacacttccagatttctctttagcaaacatgatctgaaatcatttgtaggtaatcagcacttcaagcatatggaggctctggctgaggcagcagagtcctgggagactgaacactgggagattcaatgtcccccacagaaacctagacctgggctcagcccaccactgctaggggtcctgcacaggacccatgcggctcctgcacgggatctatgtggcgaacctgagctcgatcttcgctgtcagtcctcctggtgt

SEQ ID NO: 158494 - DNA, 1000 bp, Homo Sapiens
gagcagcaacaaattatttatatgaacattccaaattcagttaactaaccacattccactcaacttacatgagaaaaaattgtgtggtttttagaaatgggatttaatatacaattcagcattaacattgttatgtttaaaagaaattaacccagataaaaagaatttggcctctagggaaaatcagagttctactcaaaatataatactaccaataaactactagcatagtgaattttcaggatctaattaaaagcttgttcaatttgatggcgaagtagtgacgtaagtgacatgagaaggaacgtacaaagcccattacacagcagtacctccttttgaactgattaacgctcactttttcttattcgtaaaaaaatacccaaaaagtaaaaactttcctttttatttttcgtagtttctactacagaaattctgattttttttacttgcatctaatttgtgtatctgctgtaacttaatctaagcatacttccaagctggtataaccaacctaaactagcatcataaaggaagttaggaaagaggctgtagctcatcaagttgcagccaatgaagatggaggacattctaatgacttgccagaaagaggctaagtggtgaacaggcaggcattgccccaggttggatggtcacctgctggtgttaaggctctgacatccgacttcccccacaacttttaggtcagtcaaggtcatctggggtcactgactgtgctcccacaagtacaatttgagatcttgagatctgacatctcagttgccacagtttgcatcatgtaggctttttatccaagatccaatgcttctgagctggaacattttacctcagttacctctttgagttgcctgctgggaagctgggggctaaatttgtagcccacttccaattgcactttgtgtacatgttcactcttgatttaatattttttcatttctcctttactcagagcatatttagtctaaatgttactgtgtgg

SEQ ID NO: 158495 - DNA, 1000 bp, Homo Sapiens
tttttttcatgtttaacatctttaattcaaatgtaaaagttcaatacaagccatttatagggcttgagatttgttggtcttttaaaaacaagaaatggggaaatgcaacaaaatgacctttccacttttcaaaagctttcaagtaaaggatagatcatagggccataaaagatccatttaatcaaacccactttcaccccctaccaattgtcttacacccattccacaatcttaatacatattcctgaagatttacagttcagctttgcttacataaccatttaaaaaatacttagcaccagcgtgcttcctatatgccaaacaaatcatcaaactacttcaatatgcatttcttctttttaaaacaaagggggcaattatttgtagaaagcaatacttagcctccagatgcatttcccagaaatggcatatgccattcaaaggcctagacactctcatgctttcaatgtggaatacgtagcctaatatgcatagaagcatgaatggcaaagttgaagatccaatattataactatttttctatttatttgaagcacagtaaaaaaaaaaaaattggtacactttggaaattcagtggcacaaggtacactgccataaacttgagggacattatacagtaaaaaagaaaaaataaagaaataaaaaggaaaaaaaaattctcctgttccaaacactgcattacataattttacctgcccaaacagaccatttacaaatattaggtcaataaactgctaacatccataaaaagatagctttcttactaaaatgcaagaatttaaaagattggtatctaaacaaaaaaacaaaacaaactggaatgaaagcctaaatatcacatctaaaatcggggttttttgtttgggccttcgtactcttctctccctctaccatatcctgctggagttccaggccccattcctctaggaccctgtccacccacaggccccgcacctccctgcccaaagcgctcagtacg

SEQ ID NO: 158496 - DNA, 1000 bp, Homo Sapiens
tttttttttttttatccatttttggaaaatatttattaaaaaactagtgaatgtggcagaaaaacaaaaccaacacacagctttaaatagcaagcatatgacacaccggttataaagcttttccaactctactgatttagtctttcacaccagctactgttgaggagggcttccgagggaagccacgtgtaaacgggtcatctgtactagtggtgagcaaaactaattacatgagaactatcaatggccatatgacttgctttcctaggcaatccacccaaaacataggtgagtggccaaatctcaggcgtgcgttcatgtggatctatagttctagttttaatttgagggttgggggaagttaggggatgaaacagtagaaagacaaacagtatcggcagagggcaaccttaaagcacctttaaaatctggaccctttcccacaatttaacccagtaattctcaaacattactgttgaaaagaatcacctgatgagactgttaaattggcaggctccctaaatctgcaattttaagataagcactccgggtgattcagtgtctattagccagccatccaatttcagaaacactgtttaaaatgcattaaaacaattcctacctcccacaaacaaaagtaaaggaatctgctgacagtcactgtgcttttgtcaatgtcaagggaccaatatgggaaggcaggcaggaaggggcctcccattcctaacacactgatctatagaagccctgtgcaacagcctgtcaagtgttgtttagggagtaaatacaattcaataagagttgttttagatcacagaacagcatccaaatcaccaacaggccaaccccattcatcccaggttaatgaactttgttgggtcgaagccagatgggacactgctgttcaaacaaaacacgggtaattgtgggtcctgacttgtgaagacatatggaataaaacatctataaaaacctttattaaacatagagcactatgccc

SEQ ID NO: 158497 - DNA, 1000 bp, Homo Sapiens
ttttttttttttttttttttttttttttttttttttttttttttgcccagaactacacaatgttttattgaaaaagtcaggcctcagctcagctgtctccattcggctcagcttggtggggggccctgcccatagtagactgagccagatcttcctgcaggcagctgggctggactccctccctggctacccttcccttcgtctctgatggtgacatccaaacaataaatatgcaataaatagcgctcctgggctgggccgggccggctgccttcaaaccccactcggcccctaccagtcttctctggccaggacaggcctactggggtgctagatagtaaagtccccaaacatcccagggtcccacaagacctgggatccatctccattttgaggcccaggcctggtttccaaggagacctagcaaagctgggtccaggacagggccaggcaagcagggctggcaggtgggtgctgggaagaggctgttaccccagaccacagcttgttatgtcctggccaagacctcgactccaggccacaagatgacactgggctcaggagtagatggtgatgacttcacggccaccaccgcgcaccaacagcacccgctcaaggccctcggtcagcacctcgaggaactccatgtagttctcgtcgccctcactgttcctgggtgggccaggcatgtttaggagaaccaggcgggcgtcgtgggagcgcgtgacaatgacttcattgagcttcacagcagtgtgcatgcgccgcacattggattggtccggcttaatgtgcaccagctcccggaaattgtcaggggcatggctggggtcccaggtctcagtcatgtacttgtccctggtccacgtcatctggatcttgtcagcccccactgcagactcatcttcctcgtccgagtacaggctctccagcctcagggccgagtgccgatccttgaccagctgggcttctcgctcccgctcagtcttggtcagtctca

SEQ ID NO: 158498 - DNA, 1000 bp, Homo Sapiens
cctgctggagttcttgtttagtagatgacctcataaactgtggccttcttgtcaccagagcctgttacaatgtatttgtcatccgctgaaatgtcacaactcaagacagacgaggattctttagactgggatatgctggctccataaggcgtcctccaggcgttgagaaggttatctttcccagtgctcacgaaccacttgccgcagtaggcgaacttgagggagagcacgcagctctcgtgcaggtgcagctggtacttgtgaggcttggtgtggtgcagcacctccacgttgctgctctccatgcccacagccagccactccccagtggggcagtagcccagcgagaagatctgggaagtgaagtcatgctgctgtagctgtcggccctcccgcaggtcccaggagcgcaccgtgttgtccaggccccctgtccacagtttggtgccatcatgggagatgtctatgcagctggccccatctgtgtggccctggaactgcctgaccagggtctggttgtgcaggtcccagacagcaatgttcccatcgctgcagcaggagaagcagactttggcgtcagggctaatggccagggcataacaggcgggagccgaggacgtcagctcggccttgatgcggggcgtgggcgaggccaggtcccagatggtgagcgtgctgccctcgccgcccacgatgagcgtgcgcccatcagggtgcagcttgcaggagcgcatgtaattgtccctgttcaggcagtccagctgggagatggggctcttgctgcctggctggctgatgtcccagatcttcacgcagcccttgccacctgtgtagacgtgcctgctggggttgctgatggtcacggcacacaccacccccccgtggctgagtgtgttgatctgccgggcgtgcctcgggatgccggggcctgccagggcgtcgtgggggaagggcacgggctgcatctgcccatcagcactcacatggaatgagtacgctg

SEQ ID NO: 158499 - DNA, 1000 bp, Homo Sapiens
tttttttttttttttttgcattgtaccttttaattgcatgggtagttttaaataaatggagaaagcacctttcagaagctacactagcaggaaaaaattccatcaagcatttacatagtaaatttctataatttcacaaaagattcttgatcttacttgaagtatacatgagggaaagagccccctcagcaggtgttcccgttgcttacagaagcaaactaaaggacctaaaactggaggcaagccaggatgccaaaaagggggaagagaaatgataaagaaccattcataaattccatgtctacttcaagacatttgtctaatgacccttacataataagtattttagggaaaactaccacccttttaagataaaagtacaatcttaaaagctgtagttctcaattatagtaatatttcttacttccagtaatatgtctcaataccttggactgctggatgtcaaaagacaatacctgggggtcatctatgagatctgaacaaatagaggaattctctaggactgtatactctctattttggctttttgaatgaagtacagacaggcttctctgctatcctccaggcagtgtaatagtcaaggaaaagggcaacagtattggatcattccttagacactaatcagctggggaaagagttcattggcaaaagtgtcctcccaagaatggtttacaccaagcagagaggacatgtcactgaatggggaaagggaacccccgtatccacagtcactgtaagcatccagtaggcaggaagatggctttgggcagtggctggatgaaagcagatttgagatacccagctccggaacgaggtcatcttctacaggttcttccttcactgagacaatgaattcagggtgatcattctctgaggggctgagaggtgcttcctcgattttcactaccacattagcttggctctctgtctcagagggtatctctaagactaggggcttggtatatatgtggtcaaaacg

SEQ ID NO: 158500 - DNA, 1000 bp, Homo Sapiens
tttctgtttaacatgctttatagagcattaggcacaacagcacatgcggttagatacaactgtttttagaagattctgaaagaaaataggaattgacacagtaagaaggaaagagaagatggagtgggtaaaatccagatcttatagccagggactttgatggagtgatggtgaagaaactgagaacttgcaggttaaaaacgcaatgtacagcaataagaaatcaacgttatagtccatgtccctcttttatatgggtgataatttcaaagtactatagccagagtcccaggaaggttctagtcacccttgtaccccaaaagccagtctttccttaggctctgagctcctcaggctagcgctggtcccagtctgcacatctcagaccataccctcttcctatacaggaggtggggcaggctttcagccctcaggtccagtgtggggagcggcaggagcaggagggctgggatcctccagctgcacatcatgcaggtgcactgtgggggtggtggggtctttgcccacaccctggtttgggtcggcttggtcagggtggtgcctgcgtacgtgcttgaccacctggaacttttgcttggccttgtagttgcagaggcggcaaaagaaggggtggcggtcggtgtgggtgagggcatgatggcgcaggccagcagcccagcggaaagcacggtggcacacattgcacacatagggtttggcctcactgtgcttgcgaaggtgggtgcgcagcaggaagcgcgtcttgaaggccttgccacactgctcacacatgaaagcccgtgcttctcgatgccgggtctcctggtgcacacgcagtgcatcagcccggttggtgcagtactcacactcgggacactggtatggcttcagtcctgtatgcttggtcatgtggtatttcagctggttgacccacttgcacttgtagccacactcagggcacaggtacttccgttcctccttgtggatccgcatgtggtac

SEQ ID NO: 158501 - DNA, 1000 bp, Homo Sapiens
ttttttttttttttgtacggaaacagactgtttaatagtgggagggaaaacccaacatgaaatataaaacaagtaatcatgcgccttgtgagttttggtttctgttgtttctttctgggtgtatgtgttttgatggcaacgtcggtctgaacagcctgctccagcatttctcggggaagaagctgaggatgcggttggtcccagggatcgaaaggcctgctgacacgccctcagcttcgccagccaccaaaaccctggacagacgagttatttgacccaaagctgaaccctcctgtgcctgatccaaaaccagagaatccgctactctgggtcccaaaaccagaagtctgttgggacagtgatccgaaagtgggggcattctgactcgcgagcgtgccgaaggatgtggtgttgctgctgctcccaaacccgaatcctcctgcgctggcagctgcagtgccctctccgaacactttgcctcccgtcgagcccagagggcttgtaaaggctggggctgaaccgaatgctggcacccctccaaacccaggggatcccccaaaagtaggagggctgccaaacactggagcagcaccgaagccacctgttttgtttggagaggaaaacccaaagccttgggatgccacacttcctcctccagagctgaaagtgccagtgggtttctgctctccaaacgacgagctggcaaatccaccaaatgtcttggccccactgtttccaaataggttagaggtatttgaggtagctgtggatccaaagcccccactggccgagctgaatgggtttttgttggctgcatcctgactgggttttcctccaaggccactgaagaaacctccccctcttccagtgtttccagacccaaacacgctaccactggaagaggatgattgctggccaaagactattccaccagtactggctgcttgaccaaacacagaaccagtattactagacccaaaacctgaagcttggcaaaagc

SEQ ID NO: 158502 - DNA, 1000 bp, Homo Sapiens
tttttttttttttttttttttagttcattggaaaaggattttatttcaccataaaaatgcaaactggaataaacaccatctttcctaacgcgaacgttacagctatttttaggtatttctgagcttcacttggagaagcaaacgattataaaacaagtttgcagcctgaaatctgtttgaaacattccaagtaaaaataatttagcaaaacagcttcttaaaaaaaccacacacactaacctttactagaaaccaaagcttttaaccaatcttttttatgcttaattccttgacgttgtaaaaagtgaatgtttttgaaggagcatcagaccattttgtaccactccccacataccgacaccttagaaagaacggcccgtttgagttttgatcttaaaggacttgtaccttcctcatccgtgactcaatgtcagcacgacgattcggcatcccacccaaactgcacttcctgatcagttaacattacaaacgggggggaaagaatcaccagggcaacgctttcttttcagtgccagtgtgactatggtggcccgtgcacctcctaggccgtgcacgcagggaggtcgccaagcagacacagaaatccccgtgtgggggaatgcagcagctctgccatcctcacgactgtcggtctgtgcaattttcctgactgagagaggaccggccgcattaaagctatcggatcaagttttaaaggactacgtgtttgaaactgaagtgccaagtacgctgcggtgagtggagaaagatggatctctaaagcatggtgtcttccttcctgccggcgggctccgtggacattcgtggctgcagaagggtcttggctttgcaggggtggacggagagcggccaaggagcggccaggaggctcgagcaggtcctggtctttcccggacaggccgtggggaggccgtgcccgtcattacctgttccaggtactgcggtgcctgctcggggaccgggagcgcgaccgctcgct

SEQ ID NO: 158503 - DNA, 1000 bp, Homo Sapiens
aagaacaaaactagtttatttggatttgggactctgaacagttctgtctctattacccgacctcctcctgccacgacttcgggacctagaggaactttggctccggctgcggcggctcctgcggctccggctccggctccggctccggctgccccggccccggctgcggtccctgctgcggtccctatttcttcctctgcttcgtgaattgtgcctctcccgactctttgatgtgcgtttgtgagatttcttccccctgtgacgactacttttcctctcggattccccatttcttttgtaggagtggtctggactagggtttctccttccccgcagcctgctgtagtagtcgtcgtggtggcccatcctctccctcctttcggagttcttcccaaaggaggagccagtccgatctggagacaagtagatgtctctattagcttcccagaattcattgttgggatttctgaacacatgaagaaagttgcagtgctttcctcttggacattgttgtatttcaaataaaccacaaatcgccattttccaccgggtcacggggcagaattcacactgcagctgtcgtcctgcataccatcgtccgttaaacagagaaagggctgcttggcattcttcttccgactggtactgaacatatacattgcccctcaggtgaggttccaaattgcagctgaccttgaactgaatcactttccccacgttcttgaactcgggcaacacatcctcatagaagtctaggaactgttggtaggtttcttcctcgctgtactccaggcttgcgtcagggtcatagtcatccctcctgcactgctccattccaaacgtcgtaaacatgctcttaataagaagggtaggactggatgttgggaaattatgtttacgtgaacatctatctccaaatctgcaagctcctgttttactgtagaagggacaattagctcgatccttctccattactctgaaatccacgggtggttctggg

SEQ ID NO: 158504 - DNA, 1000 bp, Homo Sapiens
aaggaatatagcctttttattgactactttaagtagaacaaactaaatacatatttaacagttttggttcatttatacagtacattaaataagttatgcacagagttaggtaacaaaaattcctatcagagtaaaatgacaaagcacagaaaaaccagattctaatgcattctgtgggtggtgtcacattcatcatccccctttaaaaaccacgcgtggaggcttcgttttctatttatttacattattggctttcttttgtgagcggagcctttgtagcctcgtcaggaagttggaaagccacgttaaggggactgaaggcctcttggcgcagcagccctttcaatcattcgcctaatgcttattgctgcttctctgccgactccaaggtagggatggggctgtccccaacagacaccagcgcacatgccctatttggtataagcatcactgagtgtacactgggcagccgtaggctcgaccagatggggtctgtgagggaagctccacctcaggggctgtggagggggaggaggggacacaaggcccgcccctcaggcctcctaaccttctcttagctcacgatggaaaaggtcacctgcaccatcatctttggaaatgagcacgtcgatgcccgaggaaagaggcaggtagtcaacgttttggtttcacaagaactacagacactccagagttggaagggccctgcggagccgctggcacagcccccaccgcaatctgggcagggctgctctcgacagctggccatctggcccgtgctggaacagtccatgctccgctggctattcttccgtttggttcagacacgctaccacccagttttctgcaaacagcttaaaaaaaaaaatctaaggaagttggtttggtctactgacctgggagcctggaaaccttgtttctagttcagttctgaagaaagcctccaagaagtgttctattttcagtgatttattcaattctacagtttccaggacagatg

SEQ ID NO: 158505 - DNA, 1000 bp, Homo Sapiens
ttttttttttttttttttcaaatacaaatatactattttattctaagggaatatttctgtggtttctgtaaggggaaaacctaaaagtggttaaaaactgaaaaagaacaaaaaggatgatttagatgtttttgtttgatgtttttttctcccctggaaaaaaaatgtaattttacacaattttcataaaattaaaaaagcaataatcagacgcacacatcaacagctacacttatgaggaatgaccaataattaatcaatattttctcttatgaataaatttagggttctgggcaactctgtggactaacatgcaaatgaaatcctgatacagtcatttatctgggtattgggtgttctcagtaaaagatacagatttttttttctggtatttcataacaatttatctactatgctaacaatatttgttttttcatacaactacagaaggggaaaatgttagtgtttatacaaaccataaaattcgtatagtggggactattacacttgctatttctggatagtttattggcagacttatcagacaatccaattatttgtcctccatatcgaacaaggtatggagtaagaagttttccagtcagaaatgacaaacacagatggaattaatcatacagaatcggggtggatttacttctttcatacagttcttggtaacaaaaatgagatttgttacaggcagagggacagaaccaccaagtacacaatgtcagaaggcctacttttttcattttagttttacttaaatgccttttatttgttaaaaaagaaatacacctgccacccccacctaaaaaatgagataccctgaaaagtctttcaagattaaaatttctaagaggctttttgacatctctcagttttatcatagcgtcaaattaaccttagctgaagaagttctgcaattggcaaacgtcataaaagctttgattccaaattttgtggggaagaaactgagaatggagatgagggagatgga

SEQ ID NO: 158506 - DNA, 634 bp, Homo Sapiens
attctcttacaacagcctttatttccggcccttgatcctgctcggatgctggtggaggcccttagctccgcccgccaggctctgtgccgcctccccgcaggcgcagattcatgaacacggtgctcaggggcttgaggccgtactcccccagcgggagctggtcctccaggggcttcccctcgaaggtcagccagaacaggtcgtcctgcacaccctccagcccgctcacttgctgcttcaggtgggccacggtctgcgtcagccggacctcgtaggtgctgctgcggcccttgttattcctcaccaggatgctcagaggttcgtcgcatttgtccaccaccagcaggaccgtgctgccagggcccaggccctggctggcaagggggaccctgtcctgcagcgccacaccgctcgggtggacagccagacgctgctggaaggcgtgcacgccaatcttctgggtgatctgcgccttcagctctgacaccgacatggagctgctcagggacacctggaattcgttgcccgccagcatcttcaccgtcaggtcccagcccatggctgtgggctgtgggctgtgggccacggcacaagctcctgtactggcaaagatgagttcgctgcctctcagccg

SEQ ID NO: 158507 - DNA, 1000 bp, Homo Sapiens
aatattttctttatttacaagttagaatcaacaaagacagtccaggggaccaaatggggagatgactgaaacccccagggccccaaatggagcggaaggaaaaagggaaaacagagtagaaaaaaaaaaatcaacgtaaaaaaagagctcccccttcttccctccccatggaggctgaggggaccacggccccaccctccccccagccttacctagcttaaaataaattagaacaaacaatctcaaaacagggcccttagaagtgaatagggcagctatggcctcaggtaactccagatcagggctttgcacactcccacccttgccctgccccattttgaatgggggctctgtgtccaagagatcactccccaatggggctgggaattcaatgttgttttgtccatgtccctccttcagtaaatgtccctgcatccctcccccactgcagagccagctctcctagaggggggcgggggggggtgagatgaagaagtgtcacagcaaagggggaaggggcaggtggggcagggtggtctaggggtccggtcctgcggagccttcctgccccatctggcctgaccccttagcctgagtctgaatcactggtgtctgaagacgacgacgaggaagaggaggagctggaatctgagctggagctggaagcgctaaggcgtgacactgctacttgctgtgcagaggatgactctgttttctcattcgctttcttggggggctttttagtagaattgagctgtccgctgacatcttgtaaccgcttttctaattcccgctttttctccaaagccagttcctcctttgtctttcccacaggcttcttaatggtgtagggcttccggggtttcttacgtaggcaggaaaggacatagcgctcaagctctctaagtgtggatggcttgagtgtttcaaaatcaatctcaatctcttctgggtttgaatcacgtaaagagggctccctggcttggattatatgcacaac

SEQ ID NO: 158508 - DNA, 1000 bp, Homo Sapiens
agcatttggaaaatgttaaattttattatttaacattctttaccattatagttactgcacataagactattactactaaaggtcacttcagagtccctgcaaaatggcctggaattttggcagcacccattttacacaatatttctttttccacaaaataacagacataccaggaaaatcatttcagctaaaaatatgagtgaggtggtagaaatatcatcccttataaagcgcaatgttagaatagtacttgagaaagcaggattgttttaagttccaagatttaacaaacttactgttcagcatcatattcaagcctaaaaggaagataggattttcaagatatatttccaacttctttaacatggcaccatggatgaactgtttctcagcactgtgctgcttcacttggaattaaggatgaattgggaggagacagtatgacataggtgggtaggttgggtggtgaggggaaccagttctaatagtcctcaactccactccagctgttcctgttccacacggtccactgagctggcccagtccctttcactcagtgtgtcaccaaaggcagcttcaaggctcaatggcaagagaccacctataacctcttcaccttctgctgcctctttctgctgccactgactgccatggccatctgctatagccgcattgtcctcagtgtgtccaggccccagacaaggaaggggagccatggtgagactccaattcccaggccttaatccttaaccctagacctgttgcctctagcatcatttatttatctacctacctaatagctatctaccagtcactaaaccatggtgagattctaaccatgtctagcacctgatgctagagataattttgttgaatcccttcaattataaacagctgagttagctggacaaggactagggaggcaatcagtattatttattcttgaacaccatcaagtctagacttggtggcttcatatttctatcataatccctggggg

SEQ ID NO: 158509 - DNA, 1000 bp, Homo Sapiens
ggtaccttttcaatttataaacacagtgaacttcattactgtacatgtactctgcaactacagcttagctgtaaatcctccacacacaatggtatggacattattccccctctatccccgttaaactgtacatcgagacaatacaaatttactgtcccacccacccccttacaaaaaaataatactctaaaagcaaccctactgcaactttttaattaagacgattacatatattttagaccaattgctttaaagcaagaaggcagtataaaccttctaggaaaatttttataaaagaggttaagaaatataagacaatttatacatttaaaaacttacaataaataagagaagagatgcaggcatttttgaatactagatactataatccatacaagaacatcttcatgttctgaagccatatgttgaaattcattgttcctcatgtttcctctccatgcttttaatattcatttaacatgactgggtactatggctcattacttttcacaaatactgtgactggaaaaaaaaaaggttaattttgctacgaaaatgttataatacgttttgtatgatcagtcatcatcctaaagagttcaatagagtcaatgaaaaatagcagggttatagcccctccccccaagtcaaaacaatatttgttgaagtaataagaattagaccccatcacaaatgaccttcactgagaagataattgtaacttaatcctgcagcgaaacatccatttttccttgttcttttcttgcacagttccatcaaatgaagatcacagcatattcataataaagttatataactgattcagcaccacaaaatgaattgggagacatgagcgtctgtcctgggttgcagggtcacaggttagccaggagagtgcattgtactgttccaaaacaaacctgaggacatctgaagtctgatttgagtcaagtgggtgggagtgtttactgtgaagcagctcgtcagattgcactgaagg

SEQ ID NO: 158510 - DNA, 1000 bp, Homo Sapiens
gttttgctttagtctttcattgcaaccactgggctccctttgaacccggcccaatctttggtcccagcattttcccactccagtgtatccagggtgttccaggtgagctggggaaggaagtgagcatggcctcagctgcagatctcctggagcagcggcatcatggcagacaggccctggatgtgctggatttggtacccgtaggcctcattaatgctccggagctcagccagcaggcctagcaacttcgcatacagaaaccgatcccggggccttcgctgctggcccttgatgtagctttgcagagtcagtgccatctcctcttgcagctgatcaatctcatctctctgggtaactccaggtcggtcaggagagaagagggccatggcagccaagagcacatactcaggctcttggagctgcagttttcgtagtgttccatggaagtgaaagagcaactccaaaaactctacctggaaccccacacgggctccatcttcaattgtgtagcgaagaggcccgcagaggaagttttgtgtttggagacagaaagtggtattgagtacgatgtgacagatttccacagctgctcccttgagaagggagatctggtcttcaatgggcagggaacggaagacgggcaggtccttagtaaacttgatgacttgcagtaccatgaaagtgttgatgtctgcgaagtgtgtgaccagaggcagcacaggggccagggtgggcaagggctggtgatggatgaacagatgagctggaggcctaaactgcacaaactgttcaaacatggtgcccatgtggcgggtgtgggcccccaggagtgtccggatcagctcttcttgctccttactcagttgcacaggtgtttgctgtgcccgccgctgggcctgctttgctcgccgcaatgccagggcttctgccgacagtatcatgtctttcctcatgccagcatctaagcacttctgcaacctgcaggctgggcagtggcgcc

SEQ ID NO: 158511 - DNA, 1000 bp, Homo Sapiens
atgtcataattttttattgatggcatttatcccatggtttaacatgttaattatactgtaataaacatggctttaatattaaacttttccttattatccaaagtcaccacagtccattttagtaaatataaaaatatatgcttaatactttgtacaatactggtttttggtccaaacaaaactggatcagaaaagccaataaattcaactttaagaatccccaattttttttttaaagatttccaaatggatttaggcaactttgaataatgggatttacataataaaatctgagacaagactaaacaaacaacaaaaaaatctctaacacaaaattcaaatttcaagttcacagatttatgttatgccaaaaagtacagaaacaaaattgtatttacacaagtttcataataaaataatgaaaaaggcaagacaggtgataggagaatgaaaatatagaaatagcatataattattaaatggagagtgaactagatctaacaagtccttagcacggaccattctttaatcaggcttcctctatcagaaaagtttagcgcacaatacacccaactcactcacttcacacatacaccagcacaaactcagcatagaaatcatccgtttcaacactctctaatctatacagaattctaatctatacagaattcctcagatataattacaatttcaacgcgttccatgaacgcttatcagcgcacataatggtgtagacaaagaggttctatacaaagccattcaccgtgcaggctccattcctgggtacagccagactatgtcaaatcagtgaataatctgctggatcataaaatatttttgctgaagaatcagtcaccagtctagctatttatttatttaaaaaagggtgggtgaggcagggtggggcttctgtaacgaaagagaaaggaggaaaattccaaaattaaagaagtccttaggcagatctgacttcagataaccccagcacaaagtacaatcc

SEQ ID NO: 158512 - DNA, 1000 bp, Homo Sapiens
gttataaaaatgtttattgtttaccaaaaccagtggacctcttatcaaatgctgcttggtaacaaaatctatcacagttttaataaaaagaaaaaaaaaagaagctaactatttgtctcattgtcattagttagactttctgcaaggtcacttaatccagacttattcagtgcattaatcagattctcaggtgttgcatgaactccctcttgatcttgccaggcaaccaggagctgcttagctctcatcttcatgtcttcactgtcacactcaatctgcctaatttctgagtctttcatttccaagtagggagccagaatcttccattgttcacccagcttgttggcaaatacctctatttgttctcctgttacaggtttgtctcgccgaacatcaggactttcattttccttcagtagagcatcattatcttcctcatcttcatcctcacctgtttttatttcttcagaaggaggcggtaattccttggctagctttattaccatattttcaagatattcttgtaaacttttaaactgctggttggttggctggaagaagtgagggcttctccgtgctaatagtttcagggctctccaaccataatttgaattgttcatagccttatattcattttccgccatattttcagggtctgcctgttcaatggcttcttcaaagaattcctccaaagtgggcatgtgttcccttgtctctgatttacaggcttccatattatcagggcaaagattccaaagccttgttaactcctcatttcccgtcagaatttttttggtgggtcctttccctaggaagtcctcgggtgctgttctcttccgaattattctcgtaggtttggtatctgatgttctttctttcacaaaacttgggcaaccttcatttttccacgagttccagttttcttcagtgtttaatatatgctctaccatctttgaaaatctttctccatcgggggggttttcagatagtagttgataaa

SEQ ID NO: 158513 - DNA, 1000 bp, Homo Sapiens
ttttttttttttttttttgccatgttacccaagttaaatctctttaatatcccaatacaaagtactgatgcaaaaagacaatgagaaaacccaggaagttggggggtggggggtggggagaggttttataaataaaaaaccccgagcagcttttcagaggcagaggagctaagagaagcagcagtccaaagtgaggaagggagtgtgtggctcctgggacctgccccttgtcccctcactcacagctgctcgtaaacacccctttcaaaaggggctgcaccctttggatatctgcttctttctcttggtccctgggacgcaactagctctggcttcaatcccctacaaaaattcctgagatctcggggaccccagccagcccttcccctgcagtaccccttggtggggagggctggggagccggtgagagttcatagcgtatccaggagcataggtcaggagcacaggggagcctctgagtcccctgcccgctccaaaagcacacaaaggggaaggctgccgtagagcttggggtccgtgaggggctggagcagaagcaggaagagtcccacacccagggcatagcctgccagcaggggccgcctctgtgggtgctccaaggccgcgcaaacagctgggaaacccatgtaattgcagaaggaatggcagagaaccggcccaatcaggtgtcctgtgcggatgaagaggaaagcagtgtaggcaccgaagacagctgtgtaggagaactggaacgcagcagacaagaagatgttccccacgctgctctggcggaaacgcagctgctcaataatatggtgaaaatgggcaactccaaaaaagagcgggcaggtgaacacagcagggcccaggcccatgcacggtgctaacatgggcagcatacaggcccggaacaccagctcctctgtcagcggggcgatcacttggttccgcagccaacgcatgtctgtgaggcagcgggcccaggagcggggggccagga

SEQ ID NO: 158514 - DNA, 1000 bp, Homo Sapiens
ggcccgggccctcctcgagttttctttttttttttttttacaggtcacaaattgcatttattggtagacatctagaaaacaatcaaaagtgtatatatctctctctatagatcttattaataaattttatttggacaagagaacttgtgccacaacagtttaaacagcatgattaaagactgcagcactcccaagagtggtcacaggtatgtacagtatgtgaagaagttgcacctcagagctgatcatgatcaagttaaaaacaccagacatacattatacgtctaataaatttccttcaggtcatgaccagcatgaaaaaatcagacacagacactcagcaaccattctgtaaatgtgtacagcaatatgctgcgcttaagagtttaagtcaatcctacttgtgttggcatcaggtcctttaggagatgtaaaaacccctcctttcccatttgcacacgtcacaaacgattcacacacagggctgggctggacagctggccacagagcccagcaagtccttcctgggagagaagagttagggctgatactgaaggtctctttcacatctgggcacacgtctgccttcaggctgtaagaatttcatttgtcgattgttaaataaaaccaggagaaagcaatgcaggtctctgggaatctcatcccttccataaggaaaatgctctgccaattcaagtttcattcagtcaggaagacagaaggatttaaggcttcggtgacaattataatcctctgagaaattatttccccttaaagtcaagataagataatagtgtttactgtactttctcttgactcttgaaatccctggtattgggtgtaggcaacttgcacctgcaatgaagtccgcaggagaggaaggtctctcctcccccgaaagctatcccaggtcacatgcgtggcgaatgcccactgaacctcggctctcatggaagcaggaaagacaccgagattcaagccttctagtaggttgaggacg

SEQ ID NO: 158515 - DNA, 1000 bp, Homo Sapiens
ctagttgttatcctcacagtgtcaacattgaaccatgacttctgagattcatctttaatgctgaatacgtacttgacttgctttttttcttcagttgaatttctagcatcccttttaccaattcatttattggctcagcttgttaattctaatttgcctttgactgctcagacgtggcttgaaagacttgagcattgttctgatgttgagggaatatttgctttttctgtaatgactgcagatcagatgggagctcttttacacaggtacttgaggctcagctcatcaagagttcagtatgatgtgtacagaacacaggcttctagttgagtgggagtggtagtaatgagctggcacttccatggaggacgtaggccttttaagaaaacaggtcaagcacggtcattcagagtaggttatgaataaatggtgatcacttcactgccaccaccccggacaagtaggactcgctctagtccctcggtaagcacctctaggaactccatgtagttttcatcaccctcagggtttcggggtggccctggcatattcaataaaaccagctttgcttcatgggacttgttaactataacctcgttgagtttcactgctgtatgcatccgcctcacattggactggtccggacgcatgttaagcaggtcctggaatccttccattgacttcgctttttgtccccgggatgccatgtacttgtcttttgtccaagtcatgtgcaccttctcctgataggtttctgtctcttcgtcctcatcagagccaatgctggtcaatcgtagcattgagtttcggtctttcaccaattgtgcctctctgtctcgctctgttttggatagccgcatgtgccgaagcatctgggacctttgttccatcatcaaagtgcgctcgtaagtatatgctgatatatcactgtcatgcatctccaccacttctacctccgcctcaatgcgtaagtgatataggaaggtggctaggtccttct

SEQ ID NO: 158516 - DNA, 1000 bp, Homo Sapiens
ctcccggaacacaagtttatttggcatttggatgaaatgattctcacagcatcttaagaaaagttagtgtcaacccaaccaaaaactaaaaacccttaatgaaaacataaaaaaacaggcatcaagacaatgtacagtatcaaatcccacctccgcatggcaggtcagagggcacctgggctctgagaaaccgtggcaagctggtcctagaggaggaggacccctggagcacaaggttcagcaagggtgaccccgggacttgctggtcagactggggactgcagcaggccttgcaaagggggcattctggatggtggtgcaagaacagatgagcgagtccagctctcctcatgctcccaagggcctcctggagccacagtggcagcggtgttccaggcagccctgccatgtggaccttctgcctggcccaacgtgccagtggcctgagtgcttgtggaggcccgagtgcttgtggaggcccatggggaaggggccacccagcaaccccggccagcccaaggcccaccctctgcagcctgcatggtccactttaccccgtttcctcactgccccctacgtgtctgaccggcccctaatgttcctctggtccccaaaggaagcgtcccagtcccacacatctcgtgccagccaccctgtcccgcacacacagttctgaggcctggcaggaatcctctgagctctcaggctcaggcccgtgggggactctgctgcgtggtcctcgggccctcactggccacctggcacccataatgcacatgcctgctgctctggaacctggctgccctgccccagtgcatgtgggatccacggcatgcttcctgcttcgtcctctgcagccagtaggggactcttgtggccaggacttccttgttaagtagcagcccttctccaaggggagcacaagcctgcccgcacacagcctccagcatcatgctccagcaggccaagctcagggacaggcaattcagtaacaaaactc

SEQ ID NO: 158517 - DNA, 1000 bp, Homo Sapiens
ttttttttttttttttttgagacagagtctctctgtcacccaggctggagtgcagtggtgtgatctcagctcactgcaacttctgccttccaggttcaagcaattctcccacctcagcctcccaagtagctgggatcacaggtgtgcaccaccacatccagctaatttttatatctttagtagagacagggtttcaccatgtggccaggctggtctcgaactcaacctccagtgaaccacctgcctcagcctcccaaagtgctgggattacaggcgtgagccaccgtgcccagccaagatttggggaattaagaaaggaaatacaaacacaactgagccaaggaaagaatctgactgataacatcactgcattcagcatccaaagaaatccattacttttacaactttgtatttctttttaaaatacaggcaggcaaagaagataacaaatatttttaaatggatgcttaacagcacagtgttaataaccatcttcagaaattgtacagtattaaacatgtcttcagccaagctccaacactcagaagacaaaagacttgaggtcaaaagctattaatccctttttttttattattattaaatgtcctcattttctaaaaataagcaaccagagcttgtcaacattttcttaagactgattattacaaagccattccaaagttaaatgtacaatccacagtacatcagagagagacacaataataaatgtataatcaaaggtactattattgatcacaatttattttaaagtcaggaaaagcctgcaataggctggacaaatacttgattgtgcccatgtttccatgggatggacagcagcactgagtcacacaatgagagcaacacttccttttccaccttcctggaaaaatgtttgttagataaggcaaaggatgggtggctacagaatggtggtttgaaccatgcaagaacagcaaataataggtaataggtgtgcagtaaacatctgactgctgaa

SEQ ID NO: 158518 - DNA, 1000 bp, Homo Sapiens
ttttttttttttttttttgaagtaagaactagttcttctttgataactggctcatttttatcatttatcaaaaactaaagggtagggaagaaaagtgtgatggattaaaaaatttcttttttaaggaaagataaaattcattttcacaaatttacaagtgttgttgctggtgcaggatttattctactaagcaatgagactggggatcaaatccactttcttatctcaggaatcagcattatttcagaaatatgggtttttgtgtattttctaaaatcaagcaacagtctgtttcaaccaaatgattttgatttggaagttagagtcaacagaagctgtgttgtgcacgaaccccaaggcatctccttttcattctagcccatttttgcaaagggagaaagagtttctctctaaagagccactaaagagaggcgggaagtgagtgtgaggtggtgtcctacgaagcgggcactgggcgcacacacagcgcacacagggtttacagcaggtccactcggcggtaatacaggaggtaggctgtgcgttcagcagttggtttcaccacctggtactggttgatcaccttgactgtctggtcatcgatgcgcagccagccattcagaccgatctggaagacgtctgtagtgtaatggccgcccgtcgcactgttgccgtgatggtagaccactgcaaagagccgataggttcggtggcatttaaaattcttatttttaacccctggagaaagcagttctttactaatttccaagtccacaggatattcaatatttttgataagcttctggcacccaccagtcttctcataaacgaatcgtttcaggtgcagcacgaggacaggagggagtttttccagagtcactcttcgacttatctcaacctcttgtttggtttttgtggtataaccttggacagattctcttgccaccaagctctccagtgcatcctggactgtgcgtatcttgtctgactggatatccaa

SEQ ID NO: 158519 - DNA, 1000 bp, Homo Sapiens
ttttaagagagtacagatgtcatgacatttattaaaaggcatgctacaatgctatatttgttaggaaaagagattagagatatcaagtaatagtcagcaaatatacaaactgaacgaaaatggaatatactgtagtgtacagaagcttgaattaaccatgcactacgcatttagaaaatatgttttttaatattttatcttctctttgcatttataacataattcacttcaacaatcacagactcctttttttccaatgccacagactgttacaaatgaaagctggtactgctgcttatccaaaatatacaagacaattgatgttttatataaaaccactttataagttcatttgttcccaaaaacctttttttcttttttggccttgttaaaaaaaatgttgttacaaatatttacagcattttcttctgttagacgaacattcttaaaaactgaaaaggggaattttgatgaacagaccacgtaaaacaccagacaatgtcagaggctcctagctgtgctattttttttttcttagatacagtactgaaaatgcccatcaaactcgtcatcctaatccattctgttcacactgaaactcacattttctctaagtagtctattcagcagtagaaattgaaagtaaaggccgctctgcactggttcttctttcagaaaggagcttggggaaaatgcaaaatgctttacagagaggagttaaaaccacaacagtcagtctttggtcagagcaatgaggtgacactttgatgcaaaactttgcttggtcagcaatctttataactggtactttctggatatgggatgaatttttaaaagatctgggaaacaacagtaagggggaaaaaaggccagagtatgatttttttaatggcatcaaaaaaatagctatttaaatatttgttattacaactactacatagatccaagaagtgaaaataatacaacaacaaatcagttgacaatgctgatttaagcatgc

SEQ ID NO: 158520 - DNA, 1000 bp, Homo Sapiens
ttgcaaagtaactcttatgaaataatggacccttttggtaattatcttccaaactctcaaaataactgcattaaaaagtacttactttgcccatgaacacagcaaacaaatacaaaaacaaagatttggaactgctaaaaatatcaaggacaggatgcagacaattacgatgtcaagttatttatactgttagtagttaatgtaaagacatacactaaaactactccaagaatgggacaaatacgtggatttgtaaaattttttttttaagactgatgacatgggggatttcgctggttctcataacccagcatctatttgggggtatcagtggggcctggaggcagtgggagaaaacaaacttcacagggcagatgctgctgggaccaggaaaaaggcttcatgccctaaggtcctcactgtcgtacagcccagtgcaaagtatcattcattcatgacagatgcatgacgacatgaaagtcaatatacacagttaacccattttgacacattcattcctcagcattttttcaatacaattcatctgaaattatactaagacataaaacagacctgcttttgtacatccattactgatatgtctcccagggtcaggcagaaggaaccagaatgactgtcacacaactgctaattgtcgagacctgagacggactcacccatgagtgctcctgcatgccaggtactgcttgtcgactcgtgcacactggactcaaagacttttgaaaactgctcttgcccctgaaacctaaaactccacggcctgtccttcagaatcactgtaaatctttccaatgatggacggatgaatgccttcaatgattagttaatcccatacacttggatagtacgtgtccgtcattcccacctggctgagggggccccggaacagactggtcagaggcagggcagtcatgtgggtgcggctcccagaggagggcccaagtgcagaaatatcttcaacttttaatatcatcagaaa

SEQ ID NO: 158521 - DNA, 1000 bp, Homo Sapiens
tttttttttttttttttttttttttttttttggacacaacagttgcacaaacagttttatttgatgaaccacagtgactaacaggatcagaagacagtgcagatattctgaagaaggcactgggggaggtaagggggtatcacagcaggcagcctcctctgcttctgtcccagttcacagatgagttccaggcaggaagtctctgcaggtcacccacggcggcctcagagggacaatttcttcccttctagaagcctcttccagtgttcactggatgctttgaggacagctctgggcagaggaggtgactctgattttcagaaagcaagggcaaaggccggggagggccgagggcgccaggcttctctctgctcccagccctagtcaaccacaagggtctcctggctgtaggggatggatttctcgtgcatctgttctccacccttgcccatgttggggccgggcccctggctgtgccccgaagagtagctggctgacttctccccactgctgctgtgggaggtgcctgcgcacctgctctggccacagcagagcatggaggtgcaggcctggcggaagcgggggtcgaaaaaggcatagaggaaggggttgaggcagctgttgacgtagctgatgcaggtgcagtaggggaagatgttcatgaggaagaggtcaaagtcacagggccagtgcagcaggctgcccagcatgtacagcgtcttcaccaggtggtagggcatccagcacagggcaaaggtcaccaccagcaccacgatgatgctgagcagccggcgccgcttccgcaggccctcgatgcgttccttgcggaagtggccagcgatggtttgggcgatgaagaagtaacaggtcagcatgatggtgaagggcaccacaaagcccacggtggtggacgagaccccaaggcccacctcccaggcccactctgagctcacagtggccaccatggagtagtccatgtagcactgcaccttagtggtgt

SEQ ID NO: 158522 - DNA, 1000 bp, Homo Sapiens
cccccagtcacacaacctttatttctctaccaaacagcaggtcagcaggtgggtacagggcccgctcctgctaagacctccccacctccccccaggaaagaagcagagaatctctgcaggcaccagactccctgcctcccccactgcgtttctctcactggccgcccagaacctgtgagagggaggaggggtgaggcgtaggggagggggctacagaacatggagcccattggtctgcaaggcaggctgaggggctttggatgtgggggactaggaaagggatgtgagtcttgatttacatataaaatcatcagtctgcacacgctctaggagtggccaagacatagggacaatccttggtgcaggtttctgctacccctcgctagtttttgccaaagtagcaaaagctgagttaagagaaaaattctgtccatcagaggccatcttcctctcatctgatatgacgtgttcctccagcagggagggagggagagcgggtgcccttggggaatcagccatccttagtgacatcctttcggctcatgggtgtcgtggggagggggcaaggagtgaggccaagagtccaggaagcccaccaggctcagaggcccccagctgtgcagacagcgcggcggccgcacactgggctgggtagaagggcgccacggtcaggaacctgaggatgtcggtggtctcaggtaccagggacgcgggtggcaagttggacctctgcgtggcagaccgggcggcagtgtgactctgaacatctcccgagctcaggacggggaaccctgagtccaggaggcgcgcggggctgaggcagtccagccaggctttcccgacttgtctcccgggaaaggacatcctcgctccgccctcctgccggctccttgtgtccgtctctctgacccttcacccgcccgggccctgcacatataaacagaagcagcctcgagctctcgggagccgactttgtggaagcagagtggagtggaggggg

SEQ ID NO: 158523 - DNA, 1000 bp, Homo Sapiens
ttttttttttttttttccggggaagtcaaacatactttattcaacataggaatgtctgaacaggaggaccttgggcagggttccctgaactctgcttcaaaccccactggaaacagagcaaagatcatcacgaaaacccaggacaccagggcaggggggctgcacaaggtcgggtcaggtcacagtgggccagcacacagtggccccgcccagggccagcccagcctgggagaggggatgagggctccaggcagctcactcagaaaagccagggtaggaggagggcaccagcctggcccactcagggaattctttctaccactgaaagcggtggggattaacttagccagggctgccacgccagcacacgattacaaggttcggggtgacaaggaggaagccccttggcaggactgtgcagccctcacagccacatgcacggcagccctgccaatggcttccaaacagcaaaccatcagtgacactgaccttccctgcccaggacacccctcctgagacctggggccagtgtggtgaggagggggcactaggggcggagccaggcaggctgcaggcagaaccaagaggaccccagtcccacactgaagacatcatgattgggggtggggaagatctcagggtctccatcagggaagagcatcagtctgcaccctcggcctgagggtgtgcttgtgggcagggcccatgcaaggcctgggaagaagccaaccccgagagagggaagccctgtgcactgcggagcagccaaggcctctgttccaagcatcccggctgtgctatgtagtgcagggcatgaacggggagagaggaaaggatgggagtgcagggtggggtcagaaaggcggtgtagatatcctatgacccctggggatgacagggagaagccactcatgatggcctagttgggtccagctgaatgccaggggggtgggcaaaagacgcaaatatcatcttcctggacccacccctgctaatccaa

SEQ ID NO: 158524 - DNA, 1000 bp, Homo Sapiens
atggtacaaaaatagtttattacaaaagaaatccaaccaaaatgcttaataatttacatcgtgatccgtgcccgttacggcccacctctcccctcctcagttatctggtagagagtggaggggagtggctgttccctgggtccaccagctctgggaggggacatggaaatggaagatgtgggtggcattccggacagggactggtgcctgagaatgctggggtcagagtcctgggagggagcgagatgggggaacatctgtgctcagaagagggggtgtatgggtaggtgcatgtgcttctgtgcaaatcctggtcccgaagatgggggggggggggggcgaagtcagatcttcacagtttccagaagggttgacccctctgggcaggggggcccctcctcatgagtccaagatctgcccccccatccccctcagctgcctcctggagctggggaggggggcaccggccggccagggcctcggaggaccccagcaaagggcaggaaggcgggtggagatggggaaggaaggaagaaattgggaggagccatggggaatccaggggggtccctggggggagactgggagggtgaggaggatggtgatgcggagagaagaccattggagctgaggcggctgctgctctcgggggaggtgttggcgctccggtcaggggaggggtctggctgggaggtggaagcaggccgggtggccttccccctcaggatgtcgatgaccctgcggctgcgcgccaccatgagcggcgtgtcgttgtggcagttcttgaggctgctgtcagcgccgctgcggaccagcgtgcgcaccagcgggaggagcccgcggccggacgctgagtgcagggcggagctgccggagtacatttgcgcgttcacgttggcgccgtgctgcagcagcagctgcaccatgctaaggctgttgttttccacggcgtggatgagcggggagcggccgctcttaatgtccactgcgtcgatgtcgg

SEQ ID NO: 158525 - DNA, 1000 bp, Homo Sapiens
ttttttttttttttttttttttttttttttttttttttttttttttttttttctaaatgaatatcctttttattggattttttccaattacaaatgaaatttcattttacatctataattagaaacaacacttacaatgggactgtacaaatttaggtcaaaataaaaatatatgtatcttgtgacttcataaaacatcctttactatatttttaaagaaagcagaagtaacagcaatatatgtaaaagtaatgatttaatgactataagcaagacaaagcaatagaattgtgcttcttttgcagactggggacaatgaaatgtttagctacaattttcccatacaaacatgaaacaatattcatatagaataaacaccctcacaaataactgatgggtgatgaacacacaccaagttcgaccaaagcaaaaaataaactgaaaattgttgggtggggttattcatattttaaattcaacatgcttgctctatttaaaaatacctgtagaagctcataataaatagcttctattttcagacatagcagagaaggcatattccattgttaactgtaaaagcaactcttaaatttaaaattactgctataccacctattaaaataactttagataaaatgccttcttttagcaacctgctggtttatttaaaaaattgttttagaattatagtgatcaatatgcatttttaaaatacaatattaattccatcatagccaatggaaaattaagacggtttccatatttctcagttaaaggtttttcttcactgcaacaatttttaaagtaaacatgtattactggagaaaagtatataaagtatagaaagatgtgccaattgcttctaatggaacagactttagaattagatatccacattaaaaatattctttgctggtaagcaaggctcaacataggttatgggtatctgcaaaggtcgaaccagttgggagaattttaacaatcatttctgaatgcatga

SEQ ID NO: 158526 - DNA, 1000 bp, Homo Sapiens
caacgttttccatttatgtctttattggttctggtgatcagtacaactgctttgacttcaagtgtcatcattcactcttttgtgttctagtgatcattcattccagcctccagtgagaaacacaacagaggcagtttttattttaataatcatgcaaagaaaaatgtagtgaaattaaaaataaatggccctccttcaggtaaagaaaaatactaggataaattccaactacatttatgaagaagaaattcaaatactgaatcaaaaatttgaaaactcctgattgtattgtgttttcttttcactggtaatcaaaaccaagtaatcttagtagctaaaacttcaataaatgactgacttcttgctggtgttaagagttaaaacatattattagctcaattcttgctgtctatagtcattttaatttctggcttatgtttaattgttatatgatcttcatacacctctactacatgtagaattactcatatttctttaagatggacaactcataatataaaaataaaaacatgaagttgtgtgaaattttagataacagaaaaactggtgcccaatagctagccattttaaaaatatctttactcttccatctctgtttcttcttctttgaaactttaccaaaaatgctacttttataggaaagatgattattacagagatcaaatgtgaaatctatgctttcatattagatcttgtcgaaagtaactttctttcaacaagtaacttagatcttggtgaccacatctctcacattcattgctcagtgtggaaaaatgaaatagacttggagtaagagcaccagaaggaggcaaggaaccaagctctccaatggtaggtttcctttcctgaagagggcaagatccagcagcctcatttgaaggaagctctcaccaccctgttattgataggctgtggaggtcgccagttgctcacaagaggcactgggggctcgttctcagcactggagaggaggctccgc

SEQ ID NO: 158527 - DNA, 1000 bp, Homo Sapiens
aaggacgaatatctcatttatttccctgcagctctcatcccctgctcatccaagcctccctccttccagatgaataggaacaggttacagctgacccagtttcactcccagcttcagaagatgaatcacggtgggttggcggacaaggaatggggcaagctggggcagcgcggaaggcagtgctgttttcaggaggcctgacctctgtggccagagtccccgtcagcaccgcttactgcaggccaagatgcctcccaccctccagaatccgaccgcggagggagcttccagtccaggagcctgcgggaatcctggcgggggctgagggctgcagcccccctggcctgggcattgggtgcctcttagggatcttgcctgggtgccctaaggggtcacccggtgtccgtcctggagggccgcagagtcagcgcaacctgccctggtgctcggtcctaaggtcagctctgcttctcccgagtggggagggcgtcacggtttgcctgcagtgggagcgttccgtgtcattcagatgagcaggtgggaaggtcggcaggagtgcagagaagagacgcgggaagcgggatgcagagaggtgggctgaatcaaccaggcgcaggaggaagccacagtgcccaggggaggcagggggatgggggaggaggcgggaggccccgggttcttgccctgtgggccgcgtgggcgcccaggagcatggtgggcgccggcctcacttggacaccagcacacggacaaactcctcgtagttcacctgtccgtctccgtccgtgtccgcggcccggatcatctcgtccacctcctcgtcactcagcttctcccccagccgggtcatgacgtgtcgcagctcggcggcgctgacgaagccgttgccgtccttgtcgaacacgcggaaggcctcgcggatctcctcctcgttgtccgtgtccttcatcttcctggccatcatgcccaggaactcggggaagtccacggtgccgttgcc

SEQ ID NO: 158528 - DNA, 1000 bp, Homo Sapiens
cacagacagatgtggggccttttattatttggggttcctctatatggaacacgggacctccccaccccaagcctagtgcctctggcacccccataaccagtacacaagtccctgaagagtcccctttaaaatcactaatataaaaaaggagcgaaggagggaaggccgaccgcccacaggctgggcagctcctggtcggcagcagggccagggaaggacagagggggcgttggcttcggcgcaggaaggcacaggcgttcccagccccggggcctccccgagccgggaggcggctccacacgcctggactgcagactgtgtcgagctagtggttatagtttatagtctgcaggcaaggccaggccggtggtgctgagtgggtggcctctgaagtggggagaggggacacatcaggatgctggggaaacccggggctgtcccgaggcaggaacaagcgaaagctgccttcctggcttggcaatgggtggggcccagggagtccatcccgagcccatggctggcacaggcaggggccacacagttctgcccggagcagatgaacgatggtggctgggaggagaggggacaggaggacgaggctgcctctctgctccaaggaaggcacttgcagctggggtggcctggtgtggtgtggtaggaggcgaggcttggcagacgaggagggaggggagcacggcaagggggaccgagtccctgcctcatgcaaacatggtcagctgcaaccacttaaacaagtcaaaggtcacaactccatccagatctgtgtccagagttttgaaaaatcggaacatggtctctagccgcaccaggcagcaaacgaaattgtcaaagtcgaccgccaggtcgggctccgagtagcgggtgatgatgagctcgtacagcttcttgttgagcttgaagcctgccgactcaatggccatccgcatctcgtaggcactcatgctgcccgacttgtccaggtcaaacttccggaagatgg

SEQ ID NO: 158529 - DNA, 1000 bp, Homo Sapiens
ttttttttttttttagcagcaaataaaaatagaaaaagtctacttttatttattggtaaacataagacaaccaagtctgagcatctggtgcagttcccagtgacggcacttgccctgcacacgctcttgaagcaccaggaaaaacacacaacacagtaagaaggcaaagtggctgggagtaaggtatctgcagattcaaactttgggattgaagtagctggtaaacagaaaggcaccgaatcagggtctggagagacccggctgctggggaggaatctggcctgcccaggcagacagggacagacatcctcatttctccaacagctcctggaagccgagtcaccccaagggcttggagagctgttagtctggctttggagcagtgaaggtagcacagtgctcagcaggaaggagtcaagactttgctgtcgagcacagggaggctggtgcctgaggctcagcgtgccaggatccacgcctcctcccaggctgcgcagtgagctggaatctctccctctcctgtgggagcagctcttccccttactgtctgcttccagctctggcctagctatctgggactcttagcccttcaattcgccgaggtgggcaccattcctgctgcagccaatatggccactgtgggctggcccccagctggcatatggatggccctcaacgaagccatggacatgggtccctccccaaaggcacactgttaaaaagatccatttggctacaccaaggccacctcttcctatttggcacggtgaggtactggggggtcttgcagtctggtacgcctgccccccgcaaaccagagcccattctcaaagtccgggctgctccatggaatcaggagtgcctccctatagtcaggcactggaatgtagccccatgcctgctggcggactccatccaatcagaggaacagaaagcacccaccccaccctcttttatttttggcatcacaaagacctagtgaccagattgcctgccgctg

SEQ ID NO: 158530 - DNA, 1000 bp, Homo Sapiens
ggctttgtaaccattctcaaaaaaaagtttattaaaagtgttcttaatgcttgaaacggaaaagattcccaaaatatacagacgcctcttttctcatagaaatagattattttttataatacaaaaaaagaccaaaaaacaaaacaaaacaaaacatcaacagcaacaagcccgtaggaacatctttaagcgattactcagggcccggctgacagttacacgtgggttgcgtcagtcccgtgtacacacgcgttcagccatgtttaaaccgattgcatcaacttcgaaaccggcccgcccgccggcgcctggagaggggcagagggagaagcagagagtttatcattcatctgtacacatagacgtttcttctttaaataacaccacgggcgggagccccatctgcatgtgcggttggtttggacaaaaatatagatatatatatataataaaatattaaaattaccgacgggctccccgcgctgccaagtgccccagtgccaaagttttgccggcgccgccgggggcgggggcgagggcgcgggcgcgggcgctccccggagtctcagccccggccggcagggggacgcgcgcgggggccgcgctagcagtggccggaggaggcgagcaggggctcgggcagctgcttgaacaagttccgcagggtgctgagctcgcgcgacagctgctccaccttcttctgcagccgctcgttctcggccgtgagctccaggaccttgtgctgcgtctccaggttgcgcatcttggccttgtcgcggctcttgcgcacggcgatgttgttgcgctcgcgccggatcttgtactcgtcgctgtgcttgtccacggtcttcttggccttgctcttgacctgcgagggcgccggcgcggcccccgcgtagcaggcggtcgggggcgccttggcgtcagcggggctcggcgtgccgggcgggctggacgaggaggacgtggagaggctcccgctgctgccgctcggcaccgc

SEQ ID NO: 158531 - DNA, 1000 bp, Homo Sapiens
cgatttcaaatgctgctttattcttacaaatactgtaaaaattaatataaaaaagtgagcatgctcagtcttttcctcttatctacaatacaaagggtttgtctgaaaagtctggttttttttctttttacaaatgtaccttagctgcatcaacaggagtaagatgtagaaaaagctaccattacaaaaataatttaagggaaaataaacacgtttagcttctctcgcagtttagtggtggtaagtccaggctgtagcttctttgcgctcctatgtcccaagaaactgcagcgggcacccggcggctctggctgcgccagggcagggcgcgctccgctccgggccgtcgggtctgaggtatgggtcgttgctgagtctctcccgccccggccgcgcgttaccggcagtctgctgtcccggcggccggcaggaagggcgggctgggcagctgcttgaagaactgccggaggccggccaggtcccgcgtgagctgctccacgcgctggtgcagcttctcgttctcagccgacagctccaccaacttctgctgcatctcctggttgcgccgcttggccttgtcgcggctcttgcgcacggcgatgttgttgcgctcgcgccgctgccggtactcggggctgccgcggtccgggcccctcttgccggcgctcttctcccgggcggggccgggcgcgggggtctgcctggggctgctgcgcggcggctccggcgacgtgggcggggtgggctgccctgcggccgccaagctcaccacggtctgtgcgcacgcggccacctgcgcgggcaacagcgagccgggcgcgtcgccgtcgccccagtcgggctcgcgcttgagcaggcggggagcggcagggcccgggcccaaggggcgcgcggggccgccgggaagaagctccaggggccccgcgccgcccgccttgtgattgctgttgaagaggtcggcgaagagctcgtcgtggcacagctccagggtgggcacggc

SEQ ID NO: 158532 - DNA, 1000 bp, Homo Sapiens
tttttttttttttcttcaattgatgcaactcagtaatttttattgcaactggaagacaatacatcacagaaactttatggtaggtctggggaaaagtgttatttacaataaatgatgaaatagtttgtctttggcaatatgattacatacgaagaatgcaaaatgcaggtatggatgccttccaagcaacaccaagtccctagagttcggctgatcgcgcctgcctccacactgtttctttaggtttacatgaacataacagaacatcacgttctttctcctttatggttctccctttctattcatgatattggcagtttcatacagaaaatacagaaaaaaaattggcttttgaaaaattattactctcgtaaattaatttggccgtgtaggtctattggccagccaaggtcagacgaccctaagcatcaatagtaaacctcttggtcttctgattgctttatcactttttttttttttctgtaaaacaaaacaaaactcagaaatgttacagaatcagagtattaaaaaatgtacaagtgtatatgcttcccagacacacatggatacatttttcctccacattttcaccatggcagtattaagtagtgagtgtgaatgacacagcatgaaactggttactgaatcagctatgagctcagatggcctcaacatacatactcaagaaatgttgcatgtttaaataactgagagtgtgctaaatctcatctaaaaaaaaggaggagaggggctggggaactcaggccacagtcatgaaaggatgaatacaatttctaggtttaataggttcaccatatcgaagtctttgagaatccaatatggaatatcaattattttgcaaaaggtagagaaagcagttctcaacttttgcaaatgaaatacagtggaaaaacactgttgtatatattccaaataaatagtctcgatttcaatgctaacaaaacaacaggaagggtactcgtgagcatctcacggttaa

SEQ ID NO: 158533 - DNA, 425 bp, Homo Sapiens
ttttttttttttttttaagcttcacacctttattgtgtccgggggcgtccggggcctcaggggtgttcgtagcccgtgggcagagggttcacgtggctattgtggaacagagtgtggttgccgtccccccaggggtagggcttggtgcggatgcggaggtgttggtagggacggaactcggggcgcgggcggtggcccgagtggagataggagttgaaggtgcagagggccacgctgggcagcgccagcacgaaggtcagcagacgccaggtacgagctcctgctcctccgtggcctcctttggcagcgctggccaagccccgggtcaggggcctcagaggcaaagccatgatggtgcggggagccgggaaccagcgctgtcctcgctccctttcctggggcctggggtcacctcccctctctgg

SEQ ID NO: 158534 - DNA, 700 bp, Homo Sapiens
tttttttttttttttggcaggaagattcaggaacctttattgagtgtcctcagggaaggtgtctggggccgtggagcctagtgctggactctccggatggactgcagctgcccagtgtgggcctgtgtgccgagctcaccgtaagtacagaactctccgctgtgccggtcccgctccaacacatactggtagcctcggtagcctgggtactggtaggccacccacgctccggagctgactttgagggaacccacatccttgctggcccagcccatggagggcagggatgggtagtcatcaacgaggtcaaacttgcagccttggaagttgtccccctcaaacagtgtcacacggctgtcattgtggttcgcgcagagcactggccggaaggacagcagctggttgctgttgtggctgctgctgccactccaggcgctccagcgaggatagtctcccttctccagaatgaactgctgtccctggaagtcggggtactcaaaggccacccaaacgccgttttccaccttgaccgagcgcaccctgggcaggcctccgcgctcgcagacgttcgcacagtcgcttagcagccgacagcgacggccctggaagtcctcctcgtcccagagcgtgaggctggcgggcgccgggcccggcgcgggggcgctgctcatgccgcgggtgggtgagcgcggcacgcgag

SEQ ID NO: 158535 - DNA, 1000 bp, Homo Sapiens
agcagctaaactttgacattgcagtgaaaatgcatctttgcttttgtttagggaactcataatcatcatttgacaattcctgatgcctgtgaaagaaggaatgcttattccttctgaactgcttcaggatcttccttaactgagtggtcctgatgggtgacctgtacactggttagagttcttggacacaggtgtgctgtttatgggtaattggtatgctgcaaagttcccggaaaattcacctcatccattcagaaatacatgttaaaaggctgagcctgtgatggcattaagctgcttcatgagtccttccaaacttgccatttgttcactcagatcatcctgttcatacacattggctgaatcctctgttggtttgtggctctcctcagacacttcaggggctgttggcacagacacaggaagcaaaggggatcttgcttttccagccaacccaagggaggctgttttcacatgggtcttaggaagagtgggccctggctgagacaaaagtggtgtgtaagggactttcggttctattgcactcattggtggaggtagcaaaggattagcaaagctgcggagtgggtgagttggtcgaacacaagctgtggggatggttctgcttggtgcctcctcgctgctagaatgctcaggctgagatgggggcagcataggtggttgttgggtagttggtccttcactcactgactgacttcttcctgctccgaaacctcggtccactgagagtgttgggaatggcacaggccggagagtgaactgcgggtggggatatccacaggtgggagacgggaggattcctgggtactgggcactttctagcgttggcaccgggatggcgctcacgacagcaggattgttggactgggcatccatgggaatcatgagcttggcccggggggctcggcgtgcagccagcgacctctccagagtggacatagagctccctgcttcctcagtgtcttgacctgaatgagag

SEQ ID NO: 158536 - DNA, 1000 bp, Homo Sapiens
actgtttcaatgctttattaacagttggaaacaaaaccaacaaactggaggtgatgacatcccagaagcctatgaggcaagggaaataggtttgcattttgtccctcacacctctctctctctctctttttttttattaaatgcatcttagcaaaagtagattaaaaaagaaagggtcaaagccccagatgtcagcgagcagggaggaggtgacccaggggagcaacagacgccctgcatcagagtcctcccaggaatagtccaaaggagctgctcttgcccctttatacacaagcgccagcaaccaaaaccctccctcctggcaataaggcctcactatagttgccctcatgcttcctaagctctctcttgctctaataactctaattctgggccaagcccaagagtgccattctttcttcctagctggggatggaaagctgagaggggcacaaggagggcaaaagtatcaccctaagccagagaattgcagcttcctgtggttggggccaccaaacagttcagtgtgcccacccacttctcttttagaagagagctggggtacagtgtatgaaggcactcctggtgcccagttccccagaatgtccagttagcatctgcacatttggcttgatacatttatacatttataaaaaactctgtggtcttagagttcctgctactcttaggcctggcccagctcaaccagagaaggggttcctcctgtgtcggattccctgggagagaggatctgccttggactcaagggtccagaaggtccaggggcacattcaggattgggcctgtgagaagaaatcccagaactctgtaacctgccaccaaagcttcttacattatggaggggaaagggggaaggaacagttttctttaaaaaaattttttttttcatacaaaaatagatccatttgcaaaacaatttctcagccaggaggctccacctcccatttccttgtagacagagggtgaggtgttgggatgg

SEQ ID NO: 158537 - DNA, 1000 bp, Homo Sapiens
tttttttttttgacagccccacctccttgagctttatttacctaaatttaaaggtatttcttaacccgagtgtgtgttgggctttttttctgggtcctgtggcaggatgggtcctctcttcctgcagttcaactggtgtggggaggggctgctcacttcagcatcacctccactggatagtggtcactgatggcttgggccagttggtcactcaggccataggcagcctggaagttaaagggaagagccgagtcgggaacaacggcgcctcggagcagcatccctgcaaccacgatcctgtcataggcacagtgcgtgggtgtagctgtggtgtcagcgctgtcggggatcagccactggaaggtggggcttgtccacaggcggatggatgaccactgggagggtctcacatagctgcagcccgcattgaagtcgcccatcaacatgacgtcctccaagccccatttctcttggacatccaggtagacgtcatagagagcgtcgatctcggctactgcgtcccccggggccgcatgcaggggaacaatggcaaactccctgacctctgtgaaccgggagaagaacctgacaatggctggctctcggttgaaggtgtcgttcccgcagggctcgcagccatcatcgtagtagtagctgtccaccgcagacacctggtcaggcctgtacacgaacaggtagcgctccttatagctgttccgtcccagtggctcactgaccacgtagtgataggtgtctggtgcatcctgattgaggttgtccagcagcttccccacggcagtcaggtggctgtctctgacctcctggaccagggcgatgtcatagcggctcaggatctgcacaatgtagctgacgagggtggcattggacatcttggtctccccaaatgtctggatgttgaaggctgcgatcttcagggacacggccccctgcagtagggccgccagtgccagcagcgcccccagcagcttcatgcccctca

SEQ ID NO: 158538 - DNA, 1000 bp, Homo Sapiens
aacgtcatcaaaatatttattaaaaccaaagcaggagggaacagagctgttaggaagcaaatcaaagtgcagattggagggtggggcagagcagtggggaggcaggcgcttcagacactgcaggagggaccacagggtctgggctgggggaggccttcaccacccctcctgcccacatcagtgaaggtcccccactcacctctcccatctcatatccatcctggggggcagctgggccctgaactggccccctggagagggcccaccccaccatctgaccacccatggctgtcagtcagtctgtctccctccctcactttcccaataaataaatcacccaggcctcagttccttcagtatggggcagaagaacagctcagggacccctgcccttgctcaagggtagagggagttggggtatcaaccccacacccctcctccccttttgctgattccccaggctcaccaaagaggcctcgataaataaataacgctccattaaagcttcaatcagaaaaaacctttaagacagaagtgctctcaccgtcctacacgcccagccagccaaagcctccccacctggcctggtcagagcaccagattctgggagcaggcactgccctgggccttgtgggaccccacgagcaaaagggccgaaagtgcagttagagcccccccacgcgcagagatggactcatgcacacacatgtggacacactggggcgtgtctgcagtgcacacacagaggtgtatgttcaccttcattccccggtacatgcacacacacatgctcacacacattcacccccggtacacacgtgtgggtgtaggctgcatgcacatacacaccacacagactccttcccttcctggcttgctcagcctcctagcggtagccagaccccagagctagaagcttctggagacagaggagaggggtataaattaaatgtttccaaacaggctgggaggacggccagggacagggggctccagggct

SEQ ID NO: 158539 - DNA, 1000 bp, Homo Sapiens
tcactttgaaaaatatatatttacaggaacaattccccattctctgggactctttagaaaaaaaaaaggtccattttggggaagtaaaacaaacagtggagacgagtgtagcactgtcccccaaatcaccaacccccaggtcccaaggcctgggctgggccagcgctaacaggtgagcccaggagtcttttgaacccactctctcttgcctagaatagagacaggacaggctttatgtcccccattcctccctcccaactccagggacattgaaagggtcctttgtacccgcccgcaggaaattggggggctgggagggagggaactgaaaattcatgtttggtatcaaaaataaacacttggagtggggaggaggcagaagattcccccccaaatcccttccttcccacccaccccaccaaatataggaagagatgactccctctcccctattgaaaagccccatttaaaaatagattatactatcaaaatggcagcgggggagagacagggagacctggagtactggctggaggggccccccagacggggaccaccccccaaaaaaaccctccattgggaggaaacaggcaggaccccagggaggttggcagacaaaggaatggcttctcagggggaagaacaaaagggacattcctccctggccaaaaagttggttgaaaaaggataagctgtctgagagaaaggttgggggaggtggaaatttctattccaagggtgtgattcttccttggccaagactcccaacccattaaatggtacaaattcttcctggacccctgagtatggccaggaataataaaacaaaacaaactaactcttctactcacatccaaaaacgcagacagggctccctcatctccccaagggcaggctgagaaataaagaaagaaaggtcgttctcaagccagacctcgattgtcttgtcttggggaaaaaagtggggaggtgggggagatgtcctaaccaccctaaaagg

SEQ ID NO: 158540 - DNA, 1000 bp, Homo Sapiens
tgcaggtaggaaatgtctttattattggccttgagtcatcatgtagtgtctgacataggttacgtgtccagaggatctgcctggcacacgctagctacccctgcccactggagcagcccctctggccgacgccaggcctttgtccatcatgccagggaagccaaccccaccatcccacaagttcatgctaggggtgctgaggaacaaggctgtcctaggattggaccctccatcctggacaggggtcctggggaggatgaggctgaggcctggatgatcagtctctttttggtttcatgatcatttaaaaaacagaaaagacaaacatttcacagtctttaaaaaatagaagtctgaggagagaagccagagtcctgggccccgggaggcccctcgaggcctcagcattccctgtcccttgaggtctgtctgcaggcctggccacagcacacgtggccccgtcatggtcactggcccgagccgtagggccagttgaaggtactccccgacagcagcatgtctctgatcagtgtctcaatgggcgtcttccccaccaggcgcatgaagaacagctgggagatgagggaggcagggaccgcgcgcagggcggggagccgcagcagcaggcgcccgaagcgctggggctgggacgggtactgcgcccgcacatactcggtgagggccacctgcgccttctcctgcaggctctcaacgtgggccgggtctgagaggccacaggcgtcgggcgtgaagagcgcgatggccttgaggcagccatactcggccgagtcgacctgcaggcggcccagcttgtccacctgctcctggaaggcgcgcacctggtccatgaaagccacggcgcgctcggcggccataggcgcggcgtggaggccggcggcggccagtagcggcgccgtgtgcaggggcagcgccgcctgcgccgcgttcagcacgaagagctcgctccagctcaggcgcagcagcgccacctggtcggcca

SEQ ID NO: 158541 - DNA, 1000 bp, Homo Sapiens
ttttttttttttttttttttttttttttttttttttttttttatgaatgaaattctttgtttttaatttcacacagtttaaaatacaatatgaaatcaggctacagtatataaaaaactctccagcaaaatgatgtgccagcatcagctactaaaataaacaaacaaaaaactccgccataagaatttttttgcatttttttttaaaaaaacatcgacacttacatcgctacatctctaagctacctcagttctgatttttaaaaagcacctgcttttcctttttttcatcttgcttctaaattttcagcttttaaaaaatataaattatatgaaaatacaagttggaaaatagtcaaacacaatataacatctttttcatccctatacttctcagcttaaaaaaaaagtattcttaaaaaaaaaagttcaataactgaggcagtattcctgataattttattttaatatatatattttatatatgtatatgtatacatatatttatggttccttgaaacttctttggaatgtaggtaagagttcaacaaatttatatagaccccaacagagtaagcggcatgcacagcatgactagaagagagatggtgtatttctcaccatgaaggttaggcaggttaatgctgtaaaacccagagtgttcatctccaaagtgaggaaaagcacatctgatctttgaatgctacctccaatccccacagccacaaaaatcagggctctatgtaggggaagtccctctccagaatggagaagggaacaaaagtgactctgaaccctaaagccaaaaccaacaaaggttaaggcatctctgggaaaataagggtttcacccagctagaccagatttgcccatccttcctctgaagttaacgtgtgtttttaaaaagcataaacgcaacatttccagtgtataaaccacccaccactcttcctgggatggtctctggcctttggacaaaggagaaaaaacatctggccaga

SEQ ID NO: 158542 - DNA, 1000 bp, Homo Sapiens
tttatataaacaaaatactttattattgagagagtaaaggcccaattacaaaatttttatacttaagatctgtttattaccatgccaatggtttataaggactgtagtttccataactgttaggctgaaccccatgaaactccttctttgtagataaaagccagcctaatattggcaatttcacgtggttcaacctcacatacaatgagccactgcctaggattcttttggcagcaagatgttcccagtcacatgtctgtttatattataaacagatgtccaagtgataaatacatccctcttgagaaaaacatcctgtgcttatgtatactgggaatggtcttttgtgggtattgaggcagcgcagctctggctttgctcttcccagcttgcccggccacccgattcctcagtttcatcacaggaggattctttacagatgtcagccacccgtccaaggccacgcagctagtaaacagacaagcctgtcggactttgaaaccaacttgaccgggtcatttataaaggccgggaatacacatgactcaggtgctcttttgaaacgactacaaaagtctccattttgatcaaaacgttttctccgaatgaatggctccgatgctttctctttcccatcttaagtccccgctctgtgcctcagaatagtctgtgtccaagaaaataagaatcacgtcatcttgctgtggacactgagcaaaaaggagcagcatgctattaagatggttgagacacacgagtgaacaaagatgggacaaactgtgcttcgttcaagaggtttcatcaagacccctaccgccccccgtccttcagctctgtacagtaactttaactttacatagagctgagataaaaataaagctttcttacaaattacattttttttccagtgaattacttttgcagtaaaaatagctgctacataaatccctcctgatctctgaaaaggagttgcatatttccaaaaataatattcttattt

SEQ ID NO: 158543 - DNA, 1000 bp, Homo Sapiens
tggaggattcatattgtcattttacttatttacagaatcaataaatcaacacatacacactattcagagaggtgggaagtgctctgcaaacttctccctcaaacctgggcccagaccccagtcctggaccactgcatccacccagcaggaaaggggtccagccaagacttttcctgactttgtaacttacagacacaagagaatagagggtagaagggaaattcttggcacctggactagagtgagataaaaggagagtaggaaagcagtgataggagagaagtgagggaggtacatacagtttataaataactagacaaggtctgagcacttttgggtggggatggagtgagaaagggctacaggcatgtaggggcctaagtggaaaaggaagaaatagtgcttggggccagagcggatgagagatcagctctgggcctccttttgccccatctgtaaaacaagtaggttgccctaggtggtgtcagagcagccacgtcctcggtgatgctaggactctatggggttctaagccagcctgggggctttggaagaacagctctggggattggcaaggactggtggccaccgccagagagggttgatgcccggacaggctatgtctgatccccgggctggtactgtggttcagcggaggtgaagtagtcctccaggaaggactgcaggtactcgaaggtaggcctctcctccgggtccagacgccaggtctgttccatggcctcgtacagggatgctgggcagcctggagggcacggcatgtggtagccctgctccacctgttccaacacttcccgtttattcatgcctgggtaggggattcggcccttggtgatgagctcagtgagcaggatcccaaaggaccacacgtctgacttgatggtgaatctgccaaagagggcagcttctggggctgtccacttgatggggaacttggaaccttggcaggggttgtactcatcgtccttgatgagacgcgcca

SEQ ID NO: 158544 - DNA, 1000 bp, Homo Sapiens
ttttttttttttttttgaatttagcctattttttatttctgtgtgttcatagtaaacatttttgtaagtgacaaacacgggcatatgaccacagtatcacaatcaagaaattttaagacaacattaacaatcactcaaatttatgcggcatttgcgcaacacaggttacatatttgcaaggtttacctataagtacaataggtattaacatttcactacatttagaaaaaataaaagtgacctgttagtgaccacatacatcaaaatatacacaacacaaactgaaggcaatcgttaattttgtccccttctgattcaattgaatgggcagtgttgccaactgaaacaactttcctttttgtttgttttaatacttagtataccaagtgcattttctagaacccaatctttggtctaaaagtaaacaaaagaaaaaaaaacagttctttaaagaaaaggacaaaacaataaatggccaaaataatttcttgggcacctttactacgaatgctttttaaatacaaattacagtttaacattttaaaattctccccataatttaggttgttctcaaggtctgcgtccaccatatagttccatgataacttataatactgcacacatggaaatctggcggctcttagagatagacttgtcaggtttgaatgaaatggcaaagcagtcactatttagatacacattctactataatttgacttccaaaccttatattctacaatgtattctccccacattgcacctcgctgacactccacaccttgttagaataataaacaaccctagagactgaacaaacgtacagaaatgggaggggggggcttaataaaaaatacctggacttatttttttaattatcatttacaatgcaaatgtgtgtaaaacgttcacttacagtctggtcccagggatgttaatgtattaaagggttggaagaagacccctgattttgatgtgtgaaataatcagacagtcccccaga

SEQ ID NO: 158545 - DNA, 1000 bp, Homo Sapiens
tttattgacaatgtcttggaacaataagcaaacaatgcttaaatttttcattcaaattcactttccacatgtcaaaagacctcaaggtagaaaaaaataaaataaaaatataaatatctgagaatccatcttaataaataaattaaaaacacaataaaacgttttcatggaaaactgttaatgtcagaacattcagaccacctcaacaatgcatgatcagtaacattacaatgaacattgatgttgaagaaaaactacagtacatggatatagctatttatttctatctaccagaaaataaagtcgtatcttttcttagtataatattggtcatttctaatcagaacacactattgccaggaacacagtagttattgttaaaatcagctgcactagatacaatttgaaaatatccagcaccaggttaattccaataatgaacccaatagattagttaatgctatgagaagactaaggagaaagagaaaagagacacagacccaggcctggctcaacatgctactaactaccagctctctgaagtgtcactgggaacaatacacactccatgcgttttgctacatctccggaagaggtaaggacttgagtccacacatggatgctttcaagtccttgaggcccacagcctggtgtgtttcacgcacagataaggtcctccctaggtctacaggaaccctctagggaagatgtgtttctcctctctgtaatgcaccagctcgggcagtggcacttgtgggtgccggctgcctccccttccctgccccctcacagggccagcagcgtgggtgagctgagcgagtcagaggaaggctcattgctgctgctgcccttgcggtgggcagctgcacagctggggaaggagtcagcctcggggtaggtgaagacgaaggaagacgtgtaagcagtgcagctgggagtacaggtgaccaccggagtgcacaggggctccagctctgtggccatgggccccatccccagg

SEQ ID NO: 158546 - DNA, 1000 bp, Homo Sapiens
ttttttttttttttttttttttttttcatttaagaaatatctatatgcacaaaaaagaaaatagctcccacttggctacaaataccacttgagatgattacccctgtgagagctgagtgcaccccagttttctttgcccatctcctgctactcctggctcattctgctgcttggattcatctcaagccagaaacccaactgcccaatcttcttagaagggtccctcccagagcccctgggaaatcgggagaggggcatcacagccaagggatgcaggaaataacatttttaaagtattttaaacaaaatcctttttctttgaaaccctcctttctgcatcacttgtacaggtcacttccagtcccactggcccatgtactttaagcatacggctgttccactctgtgtgtctagtgcacgaaaacaggtcatgttcatgaaataacatgcgagggaacagctgtgtgaatgtgtcactgctttctccacgggggatcttaattatctttcaaacgaggatactgtgacctctagagctgaatccccagcagcagagtctttgcagagcacaagccccgcagaggctggttctggccaggagctactccctggattcctgtcaaggccctgctggacaagaaactcagcaggagccataccctggggagaaaaggctcagaggggtgggcagcagggaccctgctgagctgtgctcctgctggaggccagggggacccttccccaaccccgtgaaagggggcagctctcctgcagtgggaagcaaaacatcctatctccaattccagcagccagaaagattcaacagacaaccaggaatggcgcatgagccacaagccacagcgacagctcaggccagctgttcacagcttgcttgctgcctgggccagaagagtgcactggggtggggacaggggagtgtaaaagagaaagcacttgatccagcaggtggcagatgaccacagagggcaggaaaggcccg

SEQ ID NO: 158547 - DNA, 1000 bp, Homo Sapiens
ttttttttttttttttttttttttttttttttttttttttctaaggcaaagtgaagttttattcaggagtgaaactttaaggaagacagggaaaaagggaaggcggtggggggggcaggggggcaggggagggacagcagatacaggcggtatgttcctaagctgaacacagccttcccagagggcccagctgcttcctgaggcactcacaggcctcgggaaaggccagagagaagcgcgctgtgtctgggcgaggaagggacacctcctctcctggctgccccccatctcccctctcttatttgtgccacctggcccctctgggcagcctctacagaagccagcagccgcacggggccaatctggtggggacatagcagctccctccatggaggcctgaggcggccatgccaaggtgggcctgcgcccagggaaaggctgagactcctggaggatagaggtccctggagttttatgaccacaggacacactgttgctgggctgctctggctggggaggcccaaaggctgggtcccagtcaccccccaccttgctgcactcagccttctccatctctgacccacacggcggctcccagcagtctcctcggactccatcctcaccccatgagttctctggctctccctttaacgtaccccgcatctgtccccgccgtggggtgggtcttcctcttggtggtcactcggtgactgccccggcttcctccccacccctcctgttccacccttacctgcctcatcccagctcagcagccagaggacccttcaaagccacatcactccatgccatcccctggctccaaacccgccaagaacttcctgtcaggggaactaggggtagaagccatggctttgctggggccttggagacctcgtgccgtctggcctcccagtactcctacatcagctactctggcccccctgccccaaccaatcaacgtccttgctgttcctggctcactctcaccctgtggtctctc

SEQ ID NO: 158548 - DNA, 1000 bp, Homo Sapiens
ctggtgatacttacatactttattcattcatatatacttggatgccttattcattcatatacactctcctgaatcatccaggtataatctgtgcttttcctctatgacaaggtatgttagagacctcaagagttaggcttcatagaggaattccttttccttccaagtagtagaataaaaagctcatctttccggagcagagtatccagtatagcattcagattcaaacccaaatgctccctaccatctttctgcatatcctttgaaaggttttggccaaagtaatccctcgttagccgaatgtcagccgtgaagaagccggaacagcgcggtcctgtaagcaccaaaggctggaaagcactgtgtaaatgagttttgcattccttcctgtcctatggagacttttttcattgttctgaggaataatccaaaagaccagagaggatgcccataaaccttctcttacaacatctgtcatctgaagcggccattgcgcaacaacccctcaagcctatttaacacttttttggaaaaagacaagacagctggaatccccaggctctgggcagcgatgacccctccgggtgcactcagcaccaggcgctcgggcctctaggtcatcatgttcaggaacttgctctcctcggcgaggctggtgagcatggagctcatgtccccgacagccatgttgctgatgcctcattccactgcacaggcatgttatttttgttcaggctggagggcgccccaaagcctaactggcatcctcccagcataggggcggaggggcccacgttggagtccgcagccaccatcctgcgctggccgtgcagccccgggctgggtagtctggggttgtcagagaagccagtgctttccgtgggatacacctgcccggtgccctcgtccagagcgccactggcgtgcgccttgatgtactgcaccacgtcgtctggaagcaccaggtcgtcctccggcagccccaggtcggcctcgggcc

SEQ ID NO: 158549 - DNA, 698 bp, Homo Sapiens
cagagaggtagatgttaaggactgacgaaagtagaagtttgtatattatggcacatgtgttacagggataagcttttgtacaggcttcaaatgtagctctcttgaatatcactggatcataaggagtggtttgggaaacctttgaaagattcattttactacaaaaaggaacagactttctggggtctgaagggatttgtacttgaagatactccagtcagcagagggtcatgttgagcattctgcagacagaactgtttcaagtctgcagctgcctgggaaacttttacgcggttgagtccggcctccagccggagctgttgaaccactttcttcatagcggcgacgctggaggagccagacatggtgcacgcgacggccgggccgattcgtgggtcggtgggtcgtgggccgtgggtcggcggggccagacaactcagcggcgcgcggcgggggcggggctccgaactttgtctctaagtttccggttctgtgctcagcggctccaccctcggtccgatgcgcgccttgccagccctctgttccagctccacacccggccccgagcgcgagccgttagccgcgaagaactaagagggggtctgaagaggaccagggagggaaggcagagcttgtgggagtttctaaaaggcccggcggcgggtaccaggaggtctcagttttcctcccagtttgtg

SEQ ID NO: 158550 - DNA, 1000 bp, Homo Sapiens
ttttttttttttttttttttttttttttttttttttttttttttttttttttttttttttttttttttttttttttttttttttttttttttttttttttttaaagaataaagtgtaatttatttggtgctactttgtgaatgcttccaagtacaaatcatctcacaataccatatacaacatactttcaatcacaactcaaatataaaataacctacaaaatcacattgctataatcaatatacaataattgtatttttaaaagaagaaaaaacgttagcaattttaagttaagttgcagtaacttttttcaaataaaatattagcaccataccagataaaataatctaaaactattggccttctcattcttcttaaataactaaatagaaactttttttcaaagcacaaatattaatttgtaaaatcagttctacagtagttaatatttctttctttattgtttcttttttgcatttttccctataaggaaaaatatgaattaaaaactttcacgggatatgaaaatcaaacaaataaatctgacccaaccaagtactgtccttcagcaatgagttccgacagaagcaaaagtggacatttcacggcgtatggtactgaaaggcgagagttcgagttccgtggtgtactcgttgtcattgtcatcactggtcaccgttgaagacttctgaatgcattcctcacagcaacagcagcagcactccatgaaggcccgactgaagggtttgcagagacagaaaaggaggactggggtgacacaggacttaaagaacaaaaggaactggctgatgatattaaggaggtccattgtctgctgtgaaacccctgtagccatgtaggcagtaacaatgttgcagatattttcaggaataatgcaaaatccatataaaatggtcagtgccactactgtacagttcatctgactctctagttgaatctgccgtttattccctcgggtacaggctttctctgctttgcg

SEQ ID NO: 158551 - DNA, 1000 bp, Homo Sapiens
ttttttttttttttttttttttttgtatcaaaaaataatctttattgtcactagtataaaacagagcagatcaactggcctctcggtctgtacaaagtgtggggcgtgaaaccgcctgggctgcccccacttctcccataattccctgccctagagcagcacctccagagctaggagaaggagagggggccacccaaggccttcccttgaggagaggggtcaggagtggactggagtgggggctgttttctatctgagggaggcaaagaagcagaggagaaaactggagtggcggaaccctcccgctcctcatcccgtcccctgtggccgcgccccagagtccactggatgggtggaggggcggcgggcagcctgaaggcgggctgaggcatgagccagtccacggcctggtcagagggccacccgcgtgcagcaatggcgcagcaagcacggcaggatgccgcggttcagctggtggaactccacgagctgcagcaggtcagtgaagcgggtctggccatcatccatgctgaagtacaggcggccctcctcctcgctcggcaggatgagataatgcttcactttctgcaggtggcacaaagagaggacaaagccctgggggttccgctgactctcccggaccaggaacaggccgtctaccaagccctgctgtccaataagccgctggctctcctcacgggaaatgcgcccgtggaaccagagttgggtgcggtggatggctgcactgaggctcgtgccggaggctggcatgggcaggctgaggcggtggtttgtcttcttcctccaggcctgggcctcctccagggccacactcagagcctcccgggggttctcaatgacacgcccagcatggccagagaagtccatggccaccagggtattatctgaggcacttctcaagggtggggagcccaaacaagatggatgcagatggcgagactgtgcctgctggtaattcttgtacagctgcaccccgtac

SEQ ID NO: 158552 - DNA, 1000 bp, Homo Sapiens
tttttttgtcctttgtacaagtttatatgtttcccttaaatcttccaaggcagatggttcttaaccctggctttacatctgagccacttttggggctctctaaacaattagatccccgggccccagcccagatgttatgagttacaagattatggtttagacatcttttactttttccaagctttgtgtgtgaccaagatacatactttactataaggctctaccaaattcatcttaaaattgacagctaaatactgtaattatatagtaggaagaaaattcttttctgaacataggagttcctaggatcacctaaagtagggctcctacctggaattctccagtgactgaaaactataactgggcaggatttgaatttacctacaaaaggagataaatggtttagttggacaaaagatcactcttcagtcttatcctttctgttcctcattgttacaaaagaaagtggatgcttcactcataactaggaatggtactgcctttcccagttctactgaaggggaagttaaagggccacaccctaggctttaggggatagaactgcacccagcagtgtcagcaattcctgaaacaacttggatgaaactgcgtgatgccacacccttgacagggcatttctgagcagagaacagtccttgggagatataaacatgcagtaagctcagctgcgtggcaaggataaacaggaacccatccttagggcatggacagcctaacaagaaaggcccttcagctgttctaatcaccagggtaggcctgggaaataaacatgtaaggagagaaagagataataaattttgaaagaattttgaggtgatgaactatggacccagtcagtctacagctgccgtgaccagtatggtagcaactgtatggctatttaaattaatcaaaacaaaaatgtagtttctagccatatttcagatgctccgtagctacctgtactgaacagtgtagattacagagcatttccatcact

SEQ ID NO: 158553 - DNA, 1000 bp, Homo Sapiens
tttttttttttttttttttttaagtataaaaagttttactttttttgtgtaatttttaatacaagacatctaaagtcttaaacattaagttgatcccatcaggaacaaaatatggcacgaagttcagaaacaagaacatctttttttttttttttttgcacttaggcttttcagtcactatgcaatgattatcgattcgccaaggacagtaacagtcaaatactagagaaaaggagataggagaaacatcttttatttcttctaaagaggtgaaaataagatttttttaatatttctcactcataagatttttaaactcttaaaaatgcaatatcttcttttcaaagcacatgccatcttaaaaaaatcttagcaatgtacatttgcactcaaagaaaaacatgcagcgccattgtcttctgacaaaattctgcattaaaaaaccctatgcgactttctgcaaatatattccctctttattattcagggactccaaaccacaaacattcagtgcaatatttatcgtttcttatttccgtaggaaacacagaaccaatgatgtcttctgacaactgtttcctgatggttgagcaacagtctccctttgctttattttaaagtactttttttaacttgctgatgtaaggtataattggaattcattaaaacttgaggatccaatggagggtgaagaatgaaggatggaggaggaatacttaaggtctaccctgtgccataaacttaggaaaaaaatgtacacagaaaaaaacgacaaccaaaaaacctcagattttatcaatgcaccctttaaaaagtgtttttttaatttctgaaagcagcttaatgtgaatcaaaagcagttcctgagcaactgcagtaaacagtcttttaaaatatatatgtacatacacatgtacatatatgtgtgtgtgtgtatatatatatatttgcaacttagctcatttggttctgtcttaatttacctccccagcatttagtc

SEQ ID NO: 158554 - DNA, 1000 bp, Homo Sapiens
tcagtttctcccttttccaatttattttaaagttttaaaattacaaagacagcaaaattttcccggcacaagtaacacttgtttaaaaaagggggtgggggggggacgcgcaagtgcgcgatttttctattttattaaaaataagagaaagacaactgtacaggttttttctcccagctcccgggtgtgaaactaagtactagccctagatatgtatatatacacaaacacacacatgcacacagatctagctctgtaaaactacttagcaaatcccaaatcgactgcagtaagtcttactatccactgcccgcccactccccctccccctcccgcagctacaactacttataataaaggactcaaaaagagatcgggaggttttaagtggccgcagccccaccaaaccaagcaaagacacctcttgtacaggaggaacaaaaatccagaggaaaagaaaagtcttcctaggacacaatccatcgattgcgtggaaaaacctaagtttcaacagggcacactgaggcacttggctgactccccacccttcccctgaagttttcactccggtttaacaagagaatttgctgaagccacaaagatcccccaatggctacatcctagctgactgggagaaactatggcttctcccatccagctgtcacttggaccccactccccttccctaagaaaatagggaggccgaaagggcaaactaacaaaaatgagaaggaaactgggtttgggcccccactgctcaccactgggaggtggaagtcagcccggtggcggtttttttccacctccttcctttgccggctggctgctccctaccacctctctcctgctggccaaaggttctgaaactctcacaacgggtgcccaactcaaggaaaactcactcaccctaaagatattcctgctaacctcacaattcctgggttccctctcatctagccagaacaaactgccttgtgtcttctccccacccacatctacc

SEQ ID NO: 158555 - DNA, 1000 bp, Homo Sapiens
ttttttttttttttttttttttttttttttttttttttttttttttttttaacttcaaaaattttattttagtctcatccatcaagggcataggatacctgcatcagctgcaacttctgcttttctcctttgcctctgctcctttacccttaccgagggatatcccatacaggaagccgcctacaaccaaaagctatcttcgccttctgggttgagtgctcaagccaagtgtggaaatgcaagtcactgcttcggcagattgcaagctgcccaatataatctaagagccttctatgccagcctgcagactggagaaggttcactagtgtcacccacttgggttgtcacaggtagtaagcagaagctaactcatcaccgtagccaggtttgtgtactttgtttccagacacgctacagcatagcacgttccaacatctgatcttaatctcattctgaagcacagtgaggaatcaagtgtgcttgttccagagctgattatgaactttctagaaaagcgggtcattatattgcatcctttcataggagctcattatcacgacctgaaagatacctactttaccttccctccaaaatatcacatttgaaactaacccaaacttttgagaaagcaattttaatagggcataactttaagcagttgctaacttcaaacgtggaacgctttgatgactgctggctctcatgctgtctcactgacatccacgtactatgctttagtggccatcatcgcacaaggaaactggtttcatactgaagtttaagactgagttctacacctgtgggcttctacactacggaacgggagtgggggggctgaaaagcttattaatatactttgtcttagcccacactgcaaatacagcactattatggcatcttaatcaagcagagagctgttcacatgctttctacagtatctttataaataaaaggttcctttatccaccaaacaacacctgaaatgatctaagttcaaaac

SEQ ID NO: 158556 - DNA, 1000 bp, Homo Sapiens
tttttttttttttttttttttttttttttttttttgcctaaattaccaacttttacttttataatcatttgagtgtattacaattttatattatacatttttttcaattcaaattttcagactgaaacattgttattttagtagagtcaatttataggcaatttgcaacagtgatttctcatggaaaaaagacacagacagacagtaatcattcagatctgtggaactgaatgaccatgaaaaccgacctcctgcaaaccatgcaaacagagatatgctgacccattcagcagcagcatcttcacgacgagctgaataaagacacatcttatgtcatgcccaaaatgtagggcaagactcaaagctgcaggtagtaaaatgttcttataaaggcaagatccaggtgctgctcgctgcagtgcttcacagactataccacttgcttgccagtggcttgtgactctcccacgcagcaacagtgagcatggtgcactcgcactctcagaggaagtactttcccgttgatgagagaaggaatctaggcaattcttcacaaaaatgacaaggttcaaaaaacatgtttgctccaaggcaccaagggtgtaaagctgtttagaaaatacacagaaatgaacagactaaaaaagggaattatttcttaatggagaatctattactgctgtaactggtgtaataatcacttcgatagattacaatcaaaatgcacatttattaaactgtactgtgtgagggaatgtctgaccaaagagcattcccacaggcactcggggcactggctggaaagcgctctcaggtgttcttctcagagccggagaagctgcacatcacttgtatttgtaaaatccttctccagtcttcttgccgaacttgttctctgctaccagcttatttaaggatgggctgggctgatgtaatgggttctctgcatccatttcatgccacccatccacgatgaacttcgtagtatccagtccgacat

SEQ ID NO: 158557 - DNA, 1000 bp, Homo Sapiens
tttttttttttttttttttttaaaacctgtgaactaatcagctttattttaaaatatacaagtattttgaaatgtagagtttaaggctgttctatttcttaaactccacacaaaactgacaaatccataccaaattaatcacccacagactgccaatttcatccactaatttaacactacagcattcaggataaattaaaggatttaatagtatagacagttaaaaaaaaaaagcagtcatttgtaacatgctgctataaatagaacaaccagtttatggattactggtacaaaaagtttcaatggcaaacttagagcttccttaaaacaaacaaaaaaaatctagactgagttgaagcgttctccatctgggaaaaaaatgctcatcttgtgaattttaacactcagccaaatataaaatcatgttttagagggggaccatcactgatactgggacttaagccaggctttcaaggtttggattaggccgactgatgtggggaagggtggaggctgccagcaaaggaagaaatgagattcgaagttgggataacttgtcaaatgccaaggacaatgaggagacctgtttgttgggagcagagttacatattagaataacaggatttaaagggaacattttttaaaaggtatgttccaaaggaaggtatagttgaaagtactctatccagtccaagaaattcatataaatcagaatttggagagaattttgctgagtacctttccagtgtatacctttgcattttgttaaaggtcacaatcataccataggggctttagaaataatggtaactttttttaaaaaaggtataatcacctcttatttataatgaacagctttagttaaaatatttggccagatgaaagctcttgagcatcaccatggactctcaggctttacatctctggagtattcctgagaaaatagtaagaaaaaaaagcaactttcatcactttttaaaagctctttttcagaggttgt

SEQ ID NO: 158558 - DNA, 1000 bp, Homo Sapiens
ttactttttgggaagagtgattaagaaactttattacagaaaatgaatgcatccaacgtccccaaatacatttgtgacaagaacagacacacacaggagacacagacaatagtcactacatcacagccttgttctttccgaaggataaaatgtcattcaagaatggggtgaggtggttagagggagtaggtactatccttttaaatgggggaaaaaaaaaaaaaaagcaacaggttggcatcttaagaacacagacagtgggcccagaaatcaagctaagcctaagccttaggtaacatcatgccacttacatcatctcagagaaactagggcattattccactagaagagcaatcttgccacagtgtgaaaacgttgagtagtgatcttgctgccccagctaatggaccaagtggcctcaacttgacagcctctttaaaactcaatgtttgcctaatcaaagatcatctggctaaactgctcccccacttctgcttagctactttggaagcacaaaagttacccctttccatccttggcccttccctggttggtacatctagttatgagatagacgcgcaccacttaacaaatcactcccttttgaccgcaggttgtttctcttccatatttgacgaggctggcaacagctcccgaatcttggcctagcacatcacgaattgggaagctaaagctttagcttagaatgccaagtgacaaggacatggctgaagcaggaggggaaattctggaacaagtgcctctgggcaaacctcacaaccgagttttttaaattagtggtcattttctagaactagaggaacacattcaggacaaacagttctgatgggagagcgaatggctatgaacacataagagatcaggctgtgaccgtgaccataactcgtactcatccaggacccgacagggcggagaggacaccgcctccagacatgcaagtttctcaacagtgaattttaagaaaaagctgctttctctt

SEQ ID NO: 158559 - DNA, 1000 bp, Homo Sapiens
tggcgtaacgagactttactgaaaacagaaaaccgggcgaaccaaggattacaaacaggaatgtggactcgtagcaaaacaaaacaaaacagaacaaaaaaaggggagggggggacggtcgaaagaccgaagggggagcgagatcgaggaaaggggcggagaatttttttttcttcttcccatttctttaaaaaaccaacacaagaaaacacacacacacacaaccaacgtttgttccccgagtagaaacataaatagggcagaatcgaacactctgttcttctctcttccaaagaaaaaaaaaaagtaaaagtaaaggaaaggcagggtttgacgtgcgccccctcggagcccccttgcggcgcggtgtacaaaggggcagccgagacgcgcgggtttgtgcaacacggggcggccgcgcgggggaaagaggcagcgcgagggcgggggggtcatgcgctcgcccccgggagcagggggtccagcttgtcgagtccggggcgccccttccgagtcctgggcacctcgggggggaatccccggggccgcgcctctctgagttcctgggcacactcggggaggggggggtggagggccgcaccctctccaagtccggggcgcccacgacacccccccgcgagcccgccccttggaggtggccgccatgcccgactcagtacgccgggacctggtgctggggcagcagctggcagccgctgttgacgtggctgaggactttctgcttgagctgcgccacctgctcgcgcagcaggctcgccgtggacgccagctccgtgttctgactcttgagggtcttcactttctcttccaggcgcgagatgcgctccagcttgcgcttgcggcacttggaggcggcgatgcggttgcgcagccgcttgcgctccgccttgatgcgctcctgcgtgtccatgtcgatgggcgacaacggcgggctctcgccgaagctcggcacgtcgggcaccgtctgtggctcgtcctt

SEQ ID NO: 158560 - DNA, 1000 bp, Homo Sapiens
tttttttttagtggtttcttcattcatttattcaaccactgcatattgagggctgcctctgcatacacatcaggcagagaacaaggcaaaagaactgtatcttcataaacatgcagtgagatgaacaagcccacgtgctgcttataggagtcgaagccagcagtgcctttctggaaaccactttggcaatatatactatgagtgtcttaaaatgcataatctctgagcaactatttcatgtctatgaaaataatataaagaaagagatgatcatagagtatcacagaatttacatatttatatataacatgcacatattaaaatgtttgatcttagaaacaagtgaaaaatacacagtaatggaattatcaactaaatattaccaaggccaaacaatggagcactatgcaaccatgaaaaaagataaaaataattttaagaacatggaaaaattcacaatctatacttataaataattatatgcagaatgaattcaaacacagagttcttgtctttggaatttgggattcagaattatattctttatgctttggggcatttgacaagttatcctcaaggaacacattattactttaataataatcagaataagtactaaataaaatttttatctcccacattagcatttcttacatattttgaacctattccaatacagttctcagttcctagaatcctccattccacttacattattataaaagattccagtaagtttaaatttttgctcaaagcatgctaaagttttgtatccttgcattcccgctccagattttttaaacaagagactacattttttgctttatagatattctaagctcactgttgtcttctccttttatcatggggttagtaaaagattttattcaaatgatccaacaattcatcactctcaccatacaaatatattgtatccaaaaacataactttatcaaaaataaacttccttattaaaatgtttcagtaaacacatccagac

SEQ ID NO: 158561 - DNA, 1000 bp, Homo Sapiens
tttttttttttttttttttatgttgagattcagttttatttatgctaccagctaggtaaaaagcatacatattgtgtctgtggtacagtcaatacatctgcaacttttctacttaaattctctatacaaagtcactgccaattgatatgatcattgatggcaaagggcttagaataaccaaaagatataaaaaagtttgcagtcttgccccaagatacaaaaactgaattttaaacaatatcataacatacatgatttaaacattataccaaaaaaagtcacatcaaatcaagtacaaaaatatccaaactacctattatgaactgtaatgtttccattattctgcacagtatttaacatagaatttagcagtttccaaaatattcagtttattcattatttagtttaagcattgccacctttgcagaacagtgagacattaggtagagtgacgctgcttttagtgttttaaaaaatacaaaacctttccctatgaatgaaggaaaagaaattcctcttataggcttcttagcaaccaaccttgtgcctagaaatacagaagaatacaactactgtttaacaggggaaaagtatacttcatcaacagtcatccactaggaataacaaacgtaattttaaatttttttgtctggtaattttaagggattctcaatatacacacagattaagagttttttgccttggcaaaaataaaactgaagttgcaagacaatctgaattgaaaccatcttcactaatataacttgcaaaaaatattttggatgaaagattacaatacattattaacttactttttaaacacagagtaaagttactcttggtaaaattaactcacccacatggcacattatttttgaagtatgttcaacaataacaacttgtacacaaaataacataggtgaattaactttgagaacttctctgcctttaaaatcagcaatactggattattctgtagaatgatatacatatcgatgtt

SEQ ID NO: 158562 - DNA, 1000 bp, Homo Sapiens
agggaacacagattccccaggtcaagtcttacgcagggagaggacaggaggatggtagaaggcatatgatacatactccaccctttcctgagaaatggcagaataggcatgtgtacacatatacatgttatcccaggatccacaaagcaaacagaagtggtaattgagcctagcaagcagtttagatggactacattcctcattccagctgaggagagatctcacaaggagaaaggagtgctaaggaagagcaagaccccacagccttccaaagatcccctatggtccaaagtcctttgaccatctcagtcagctgctttgttttctgttggcagtggagggacaaggtgagaggagccaggggtagtcatgaacaccagtgggttctgccctgggcagctccccaccttctttaagagagtactgtgtctcagctccagcagtctcaactgggaagacccaggactcctgctcttttctctagtccctgggagacgaggtccagctaaggtagagtaagcagtcagtgaccaggcaggctggtttgggaggtcactgcctggaggacgggatcttgtattcttcggaagatggctgggaaattcttccctccattacgtagaactttcttcccctcctcagttgaggtgcctagatgtcccacaacggggtcttcactcaggtcctccagaggcacacgctcaaacagtgggtgctcttcgaaatgagtgcacatccagtcgtgtagctccagcacatcggttatggtatacaccagccccccaactcttagcacgtaggcatattctgctagcagggtgggactgatgattcgccacttgtgctttgtccgcttgaaatgtgggtcggggaagaggaagaacatctttgtcagctggcccttgtagaagaagttaggaaggtgcttcatggcattgctacggagacaggcgatgttctggaagccacctgcaggagctgcgcgtagggcccgaatccg

SEQ ID NO: 158563 - DNA, 1000 bp, Homo Sapiens
gtagagatacatctttattggttttttgatctcaagattctctttccagccattaaacaaacataaactcttggtgtagaaagcaagctggttaaaaatgaccttaacacagtggaccaggaaaaaaaagacttttaatttttgttatcctattttttctctcaagtgtaggaaaacttccataccccattccccagttccctatcaaatggtcgtgtaaaagttattcctaaaagctacagtgagctttcttggtcctaatttatttgtcactagccacagtctacactctacaaaaataccctctccaggatttctcacgggtgtggaggtctaagatgccagaataagaacaatgtagtttagtggcacaggatgccccagtctgccctcagcgaggttgcacttgcatcaaggatgggagaggagggcctggagttctactgccttgaccccagcatgtagcccacagattgccacaaagtaggggccagtgaatatttgttgaatgccagggagcagctgacgctggagatctattgagggggagcaagaaggacacttttccatctcaggacaaacagcaaggcaaggtgtagtgcttctaagataagctaccacaaagaccccaaacatcaaggaagaggtgcctggttgggatggagcattggggaagaggggctggctagatggcagaaagctggagctgacttgtagtgattgtctatctctaagcctcagtttttccatctgttaatggggagtgttcattcttccctccctgtctcagggatgcacgagtggtaagtggtggtggggaggcacgagaagagggcatttattattggcattttaaagtaaagccaactggagacctaggtttttaaaaggacgaaggttttggctttgcacaaaaggctctcggcttcttctccccctaggggagtgtgagtttcctagggaaagaggcagcagcaaaaaaacttcaggtttggagtgt

SEQ ID NO: 158564 - DNA, 1000 bp, Homo Sapiens
tttttttttttttttttttttttttttttttttttttttttttttttttttttttttttttttttttttttttttttatatcaaacacatttattcttaaagtgagaagctcatcaaggatagctagaggagagtgaaatatttacagtagaaaagtatggatgctagccaaacttcaaattctgtcactgcagagttattccgatagtacttttccaccatggcacatcacacatgttaaaattaactgcattcttgtaacacctctcaatggttgtgcacaataatagaagcaacattctgggactctttttcttaagatcctacagaatgaatttatgcacacacaaaaacaagtataatacaaaacattcaaaacaagtcacatccatttttttaaaaaaaagaaaacagcaagatgaaaataggcaagggatgggttgctacttctatgtgcaaggtactggattcttgcattgagaatcctagtgtcgggcctcacgtcaagcatcacatcaaaaaagtgtgcagaaaaatgagtcaccttcaatatgaaggatgtgagttgtgtacactgacaacggtctcaaagatacaacattattgcaggaggaatgcctgtgtacagagtggaccatcttatgaggccaaaaacccatgagttaccagatgaccattcagatatttgggttaaacgatgacagttttctggtttaatcaaggcacttgcaaagagctatctttgacatgacatgaagtccctacgtgttgttagccattaatgatggcatggtttttctataccaagcattctataacaagaacccaagcctgacagtttgatcacaaagtcacttataacatcaggactacaaagccagatttgcttaaactttccccaaattatgattatttatagatcacatctgaacagaaaggcttcacttaagatcttgattctccggagctataattcatcttctttctccaataccaccca

SEQ ID NO: 158565 - DNA, 984 bp, Homo Sapiens
tggaattaaaagcaatttaatgagggaagagcaggaaacatgcatttcttttcattcgaatcttcagatgaaccctgagcagccgaagaccagaaaagccatgaagactttctgcttaattcaggggcttacaggattcttcagagtgtgtgtgaacaaaagctttatagtacgtatttttaggatacaaataagagagagactatggcttggggtgacaatgtgctgattacaaggtctacagacaattaagacacagaaacagatgggaagagggtgtccagcatctggtggttggcttctcaagggcttgtctgtgcaccaaattacttctgcttggtcttctgctgagctgggcctggagtgaccgttgaaggacatggctctggtagctttgtgtagcctggcacaggaactttggtgtatccttgctcaggaactttgatggcacctggctcaggaaacttgatgaagccttggtcagggaccttgatgctgcctggttcagggaccttggtgtagcctggctcagggaccttggtacaacctggctcagggaccttggtacagcctggctcagggaccttggtacaacctggctcagggaccttggtacagcctggctcagggaccttggtacagcctggctcagggaccttggtacagcctggctctggaatctttgtgtttccaggttgtggaacctttgagtggcatggctccttggttgtgggaacaaatatttcctgaggtggaggctggctgggttgtttcacctgctgctgttgaagctgaggtggtggggtaaaggtctgcttctgctggtaagaactcatgcttcaaaggatcgtggacacactctttgaagaatcctctaagctcctgaattaagcagaaagtcttagtggcttttctggtcttcagctgctcagggatcatctgctgtgcagagaaggtcgaggtgttcagcctctgggatctggt

SEQ ID NO: 158566 - DNA, 1000 bp, Homo Sapiens
ttttttttttttttttttttttttttttccagatcagcacaaagtttattagccatttctgctcagaagagcccctttctgaacaggactgttcctctgacataacagacaagaaacagccacctgtgcagggcctttcctttatatctcaagctacatcaggagaacatcttggagcaatgtcagttgccccctggggttccctgggaatagctaaggtgtgagattgtccagagtcctatgacagaccttcaaggttttaagttccacagacttggactttgtccaggtccacaaccaacgaatagaaaccttcctttcaggtaaacaacatattgtacaaaaaagggaggatgataacataatagagaaagagctaagacccattgcttctcctctgtaaaaacaccaaactttatccaatactataaaaaagaaattcctgctgggaacagtggctcacgcctgtaatcccagcactctgggaggccgaggtggacagatcacttgaggtcaggagttcgagaccagcctgaccaacatggagaaaccccgtctctactaaaaatacaaaattagctgggcatggtggtgcagatctgtaatcccagctactggggaggctgaggcaggagagtcacttgaacccggaaggcggaggttgcagtgagccgagatcacaccattgcactccagcctggacaacaagagagaaactccatctcaaaaaaaaaaaaaaaaaaatcctggccaagcacagtggctcatgcctataatcccagcactttgggaggccaaggcgtgaggatcacttgagcccagttcaagaccagcctgggcaatatagcaagaccctgtctttaaaaaaaaaaaatagggcatggtggcgcatgccatggtgctagctacccaggaggctgaggtaggaggattgcttgaacccaggaggttgaggctgcagtgagctgtgattgcaccattgcactctagcctgggcaac

SEQ ID NO: 158567 - DNA, 1000 bp, Homo Sapiens
ataatacaattttcattttattttaaacatattttgcatgatataaaaatattgatcacagtgagttttaccaattgttgttgctataaaaatgaatgcagaaacaatatttttagtggaaataaattatatagtcattcttttaaagaaatcacaagaggaaaatcttggctgtttggtcattggcagaaaaccagtctttacaagaggccttttgcagatgagctccagtccatttctgtaaagttatccacatggttcaggaaagacagacttttgtctttgttagcatggacccacaagggtctctctgttcacagacagttctactgtggcaacacagttttccataatagaaaatcgatgaactggaaaacagtacaatcttagctcatttgtggtcttttccaatatgaagggacacaacgacacacttcttcactatatgaaaatcctggctcacaagccttctggcggttcgtacatggccgtctgtaacagctgcatgtttggtggtggaacttctttccttttaacaagcatttctgtggactttctgtacattcacaggcacattttccaggatttaggggttgatttctggggcaggttcttttacatacacactggcatgtgttttcatcaaattctcggttggccccacattggctggggaagagtttgtttttacagacacactggcatgagtttctgtctagttctttgtggggtccacagctggcaggccgaagccccgctctgcagacacactgacaggtctcttcatccagctccttgtttggtccacagatgtcatggaatccatctgttgagtcatctccagcatccgaggaaaacataaaatcttcctgagccaggcatctgcagatgtgattattccacatgtaattggtggggcaggtcttgttcgctgcctgacactgtggtagtgttgctggcagggaacgtctaataatggaatgaacttgtctgtaaacat

SEQ ID NO: 158568 - DNA, 1000 bp, Homo Sapiens
tttttttttttttttttaagaagccaaaaaattaattttattgagtaaagaagttcattcagagcttacacagatcataagaatactttagattataacagctggaaagaccaatagctgactggaaagaagaaaggaagcagtttctattttcaatgtagaaaaaaaatctaatcgctacaaaggtcttgtaaaatcctcaaaacaaggtctagccaagtttattgtttggtaatttttttctttttttaaggggaaaaaaagcaagatttaatgtgaatactactggttacaactaatataacagcttgaaaaaatcatgacacagaagcataaatataatataaaaagacaattttaaaattgtattgtaggaatataactataataagtggaaaagatacattaaaaccatcagtgtgttacacttgttcaaaacagaactcataaggcagaccaaaactgatgcaagttaaggaaaatggtctgtttttaggaagcatgtccagacagacaccacaaagaaatgccaacagagactatgtggtcccctcttgttactagtaatgtgtcaaaggtggagtgactgggttaacagcctaagctttctccaaggatttgtagtattctgtcagcacggtccaagccttgggagccatgaaaccttcaggtggtttctggccttctcgagcaagtttgcgcattcgtgttcctgaaataaattcaaagtcttcatggtgttcagagtcatagtagtccatacgcttctttttcttgttgtaagctgcaactcgaaagggaactatttccaaagtgattaaaccaggggccatcgtcagcactttggcaccatgacttggctcataaagatccttccctgtttctggatgaggcatgccagcagggtctcgtccaacaatgtaaaagttggctcctgcaaccatccgtgctctgcaatgccactggacctcagttggtccagcatacatcatgggagatg

SEQ ID NO: 158569 - DNA, 900 bp, Homo Sapiens
tcactgagggggcagggggataccccggggatcggtgacctggccctcttgcaggttcttcaccagttgtgcaagccagcgtttcgtggtggtgtcatcttttagcacctgggcgaaggttgtgtctttcagctggtcagggaggcactgtctgagtgcttcacgtgccctggggttatctgaaagtcgaaggtaacatctcactacatgcttcagcagacgggcagaaggctctttggatagctgcaggaccatcttacccaagatcatggcaacatgggagaaacgctcatacgtctgacatatataagccaaaccagtgtcatctaacaagatcttctggaggatgaatgtggcaactgttttagaaagttcacttccagattccataattcgcaaacataaagggataatttctgttgttaataaaaagttgattacttcttgttcatctgttttcaccagggccccaataactccaaggctggtgagccggagatactcaaagggacgtgttttgctgacagtgtgcaaaaaggggtacaaaaaaagtgggatgtgtgctgcgagaaacgctgacctggtttctggatgtgatgctacacattgcagtaatgccagagcattgcaaactctgttagactggtgtgctgtcaaggtgggtgggttgatagatggataaatatttacaatttcctgtaaaagtgctgcaatagtaccaaatgaatgccacagcatgggtgcaaggtcaggaacagattctcgcttcttacttagctccagcaaagcattttccctagtctcaggactggacagctcattgatccactgatagatcttttctctatccacttgtgccagtgtagtaggcacaggcgcagccgtcgccaggctgtgcat

SEQ ID NO: 158570 - DNA, 1000 bp, Homo Sapiens
tttttttttttttttttttttccaaaaaatcgctttcctctttaataccaacccaccccaggagacagctgtccacccccagttggggaaggggccacactgcccccacctccttgttccagggaacactcatttccctacaggtgatcttggggagagactgttcccaggcaaccctggagtctggctcagcgcacaaatctgtccagggcagatggccgggcccccgtgggcttggccttcgcctccttatgatgctgctgctgaaggctctgccggaccttgtccctgtgttcctcatccatgaccttcctcttcctcttcaccaggcttgccgtggagctgcggcccttctgctttggctttggctggaagggagccttagcctgcgggtcatagcccagcctctctatctgctccttctttccctgctccagggagatgacatccacctcggccagggctcgtgggtccagacaaataagctctgcaggtaccttctctagcagggccttcacctcccactcctggcgctgcttccggcttctgtatggattactctccaggccatcgaagttgggctcaccggccccagggaccagcatgctggtgatgcccccagtgtgccccacccccagcacatcttcaaaggggcagaactgaaggccatgcacagggcctgagagccggtgggtgaggtagggctgttcaagggagggtgggctggccttgccctgccctgcccagatgttgacaacgtcacccattcccgccaccagcagtcccctctgggagaaggccaggtgccctgctccatggggcagggtccgagtgctcagaggctggtacgtccctcgcaagtcaaagatcttcagctggtggtctaggccagaggtggccatgtacgtgcctgtagaatctactgccacagcccggaccccaccacgatgacagagaatctttgccagtggctccttcatagctggactccataaagaca

SEQ ID NO: 158571 - DNA, 1000 bp, Homo Sapiens
tttttttttttttttaaatgaccaataaatattttaatcactgttaaaaaaaataaaaaccttgtactcctacgacttactccctccttgtctccacccactcctccatgagaaccgagttgggaatttccacgggaagtcgggggtggcggggagagacagggtagaaataaagagcgcatccttgagagggggtaggttctaggacaagggtggggctcaaaggccttgtctccacgacaacacaaacacagacttcaggcacagactacaaccacctgacccctgaccctgtgactgcaggatgttcaacacgccccctctccctccctccatgtgcaatctactctgtggagcaggggcttcagtgtacccatcagagggaaaggaagggtttagttctggaaataccttgggggggaggggttgagtagtagaatgggcgggtgatggtgaaactgtggttccccttccagaatatatacaagtccacagagataaaggaagacagtaagtgtggtgggagatcacccgggggccacagcgcccttgcatcgtgctccttattccctttcccgaaagctaccccaccccagtagcctgccccttcagtttgctcctccacctccaccgaagcccatctccaccttgtggactctgggtggggaccagacacgtctgctggacgggggcgtggccgcactcgcttcgtcgccgctgcccccgcccactccgggagactctctcttggacggcaaggatggccccgtgggagtcccaggcccaggtacggccccgaccccgcccaggcggtgccggcgctcacagtgtcctcggtggcgcatgaagctgtctcgccacatgaacttcttggcgcagactccgcactcgtagggcttgagacctgtgtgcgtcttcatgtgctcagtcagatggtgcttcatcttgaactttttgttgcacacggggcagtcaaacggccgcagattgaggtgcatgt

SEQ ID NO: 158572 - DNA, 1000 bp, Homo Sapiens
tttttttttttttttttttttggctgttaacattgttttatttcctttatacaaaaagtagaaatgacagaaaaaacactcttgacagaaacaataccactgacctgatctcatgaaggagctgagccaaatctgcccacattatggggaaagggaggttcaatcaacattagcaaatactcatgcaattgatgaaatataaaatggtatcagtggcttggtgaatgtcctgtgggtagggtgaatcaatctactcttaaaaaacgtacattttcccaatcatgcttttaaacggcatcttttaaaaaaacaagttatatatacagatatcaccccaaaatgaatcttttacagtctactactataaatttaaggcatcctgatattctgttcttctgctggtgaggcattgttttcatggttctctttccaaagaggatagtccagaaatttccaataatttccaaagggcatcagtgagagaaaatttaaaaagtgatttacaagaagagttcttttgactctggctcagcaatgtgctttatgctgtaggatttcttcatttttctattgatgtcattatgctgccttattctttcctttgctagcggagctggcagggtttcccttggcatctgtcttcctcccaagtgaggtcaagggcaatgtagaggttttcagctggttggctgcctggtagttattattattgttttggttgccacttagtgtctccatgatagatcgaaaggctccaaaaggccttttcagttgatcccccgattcgttacttgtggaggtccgctggagagtcctgcccttatctttgtctttttctccattcagttcaaggctaggctgctccatctgcaccacaggctcctcaaaggtaactctcagttttaagttctgagatgtcctacgcttggaagatggagacttgagggcactcttgggacttgtggcaactttctgggcagcagtactgtcagggctgggc

SEQ ID NO: 158573 - DNA, 1000 bp, Homo Sapiens
cgtttaaaaaggctttattcatttttttgatcaggggaaaaggacaatctcaatgtcaactcgtcacctaatcataaatttgaacttacaggattcactaccctagacaccgcacctactgaccacacaacttaaaaatgaacttacttccattccctaaagttgcatgttgaatgaacagaatcccttctaacagccaacattggtacttggcctaagtttaagaatagcaaaacagcagcaaaaaagaggccaagagcattataatgtgatagcccaggaagtagaatcattgttaagaaagttgcaggcaccaaattaaaaaaaaaaagggagggctcatgagcataagaaacttaccagttttgtgagatcacccgttgtgtgagatcaactactctgcctgtgaacacgtatgccaatcccagtaaataacactgaggccaaggtcccaaaatccaactacactgaatgcaaaatccaaagcttattattattccaggtcctctgaaacctggatataaaacggattcttttcaatgcacccagagggtccactgtaatgactcagtcacatttgtaatgacttagtcacatttgtaatgactttgtcataaccaagataccttttccactattcctttctgaatatgtaaatatttaactacttagttcatgcactgtgtcaaaaactagatttactatcaagacttttctctaaactcacagagcattaacagctaatacaacttcctcaggatgcccaaacagaaaacattttgttcaatcttgtggcggctctgagaaaacacaactaaatcttattttgccactattttaatttttcgaccaaactcatacctttctaccaaaatccttgagttgtaactacttccaatgctcttaaaccatagctcctaccagttttacagtgctccttttgtatctgaacttttatacaagaattactcattgtgttatgattacaaagcttctacta

SEQ ID NO: 158574 - DNA, 1000 bp, Homo Sapiens
ttttttttataatcacgtttattgaggcttaattttctttcaataaattttatatatattttaagtttacaatttgccactcagatcaagatacggaaaattctcatctattggagaaagtttcctcatacttctttgcagccatcctccccaacctgccacttggcccaggcaatcactaatctaatttttaacactacagattagtttgccacttcatctaaatagaaacatattttatgtagttgtttgtctggcttttttccttcaacaatgtctgccaataatattgcatttattgaaagttacttcatttttattgctgagtagtaagtagtctattgtgtaatggataccacagtttatacattcgtctgtggatggacatttggggtttttacgcttttaagttgcaatgaacatgcatacaagtattgctgtgatcattgtttttccttctcttgaataaataactagaagtggaattctggagtcctaaagtaaaagtgtatgtttaactttataggaaactgccaaactgttttcaaaagtgattttaccattttacattcccacactcacaatgtctgagaattcatgttccttgctataatttagggaattttcttttactttctgccacacaggagttttttacttcattagattaacactttgctaatataattattaacttttaaagagcaaaaaaaaaaaaggctttgcagatgaaaagaccaaagcctataatcaaaacatgacatgaaaagagtttagaacaccctggcttcataagttatcagaaaggtgaattttatcctcagacttttagcaacacctttaatggctagccacttgagaccttctataatacttctttcagagttcctgctgctgcttgaattgtaaaagctgcaatagaaatatgtttctttacttctttccaggccaaacgagagttggctttattttcaatatcaaagatagcatcatagattcc

SEQ ID NO: 158575 - DNA, 1000 bp, Homo Sapiens
ttttttttttttttttttcaacaaggaaatgtatttattttttctttagaatttggctcagaacagtaacaaaaatatttacattaaaataaattaacatgcaattacttaaccatatgtaataatttacgttggaatatattagccttcccatgagtttaataaaaactaatatttggttttagattcaataccatcctttcaaatatttggtatgaaacttggtagcaatgcaattgtctgatgtacagagcagatttcaccatgagagattacaccaaagaacagatgtcccttcccagaacattatctcaccccagactcagaaactgagcagccaagcttccttcccaggaatcaccatggaatgtctgaacaataaccaggccctggagattactgcagggctggcagagttttaggaatcagccaaactctttttcacactaacccactaggaaggatatagttcaaatgtaatgttgagtccttcagtttatttgaacactgaaacaatatgttgtagaaaccttcattttcccaaaatagaaatctgaaagatatatgcacatgatttcttagatcatctaaaagtacccataaaaacctgtcactagggccaggtgtgatggcttacacctgtaatcccagcactttgggaggcagaggcgggcggatcacctgaggtcaggagttcaagaccagcctggccaacatggtgaaaccctgtctactaaaaatacaaaaaaaaatcagccgggcgtggtgcatgtgcctgtaatcccagctactcaagaggctgaggcaggagaatcacttgaacttggggggcagaggttgcattgagccactgcactccagcctggggttcatgccattctcctgcctcagcctcccgagtagctgggacccgccaccacacccagctaattttttgtatttttagtagagacggggtttcaccatgtttcaccatgttagccagggcggtctcgatctc

SEQ ID NO: 158576 - DNA, 1000 bp, Homo Sapiens
tttgagatttcaagtgttttcatgtttatggagatcagagaaatgtgttctgtacatctttttcactgatggcaagtataaaataaaaccaaacaaaaaacccaacacatttattcaaagcaggcatttcagttaagttaaaatcctataatcaggatagccacaattccagacactccggtgcgaagtgtagatatgtcagtagccacatctggatgatgaacaagccattgactataaaaacgagaacaacagcacagtctcagcgcctttagagtgagtgaacagtatgttccaagcacttcaccatggttcacaatggcaaagcctgcagcttctccatttggagggtcacattttctactcggtttcctgcacttacaaaggccagctggcatggctgggggaggggcagagggaggaaatcaactcgtctatccagggaattgcagctgttattgcaaatggccccggagagcccattataagctgctgtgctaggctgtgtgtccctggagtgtccatcacatggcgtctccctagcccccaacccaggcccccaggatcccagagccacccgcttgagtaggactgcagagccgagtaggagaggaggaacccagggcccggtctcgggagtttccgtgaaagcccggagcgcggccaggggcggtggtcgcctaccgaagcacagccgcccagcacgtccgcgctttcccacacccgcggtggcggcgacgcgcgtgtcctcaggagactccagcacttgcaaaacactgcgctcttctccgagcaccggcagaacctggctactctgtcccgcaacccagtgcgtgcccaggaaacagtgaccttgaaccgaggagaggcgggccggctctgaaaatacactttagacagggcgtggggttcactccgcgcctctctacccttccaccaccattcaatactccccgcccccacctcctttccccacccgtgtcgtacagccttcccccac

SEQ ID NO: 158577 - DNA, 1000 bp, Homo Sapiens
tactttagaaactttattgaggacaaaagtgggcggctcccagtcccatgggcagaccgacaataaataagggctaaaaggaagaagtacggcagggcaggagtggttgtctcatcatggagagccctggggggcagcagaaccaactggaatgaaacacagggcatcctgccattcgagtaatgtagccacagggttggtgcagacccgggtggggcctgagggaggggctcggctggtgtaaaaggcacactcatcgtccagacgagcctcgtggaagcagtggatggcggttaaacacgatttgaggcgctccctcagggctagggttcgaggggccagattgctgaggcctgcctggcctgctgggggtctcaaagactggagtgagcagataggggggctggcacaaagcgggtgttgggaagagaagatcaggctggtggttgctggagcccactgactgcagcagggtggtagactggactctagacttctatgttccagggtgcagggctctgatgcccccagctctaccctagggcagggccctgggggtccagactgcccctgggtgctgggctgaaggggcccgggttctgctggagggcagggctcaggtacctcaagctgttcctggcgagaggactccggtatctcaggctcaatcctacagtaggactctaggggcctgggttctgctggagggcagggctcaggtacctcaagctgttcctggcgagaggactccggtatctcaggctcactcctacagcaggactctaggggcctgggttctgctggagggtagggctctggtacttcaagctgttcctggagggagggctctggtatctcaggctcactcctacagaaggcctctgggggcccaggctctgccggagggcagggctgtggttccccgcactcctctggaagacagggctttggcagccctgagtgttttaacagtccaggaaggtgggaagtcccagagtta

SEQ ID NO: 158578 - DNA, 1000 bp, Homo Sapiens
ttcagggctagagaataagtttatacactgcctcgttaggtccaggggcccgcgcacgtggccaggcgggtggtcctgacgcttcaattcatttacaagtattggattccacgcctgctcctgtgcccgcaggcttccccaataggccagcaatctcaataatgctttattaaagggcagattcatatgcggctcttgggggaatttttacaaatatcaaaggaactaatccagcatcctatatagaactctgcacactttggggaggtccgtgaagcaggacaaagtgctctttacacaggaattgagtcggttcaagtatctgctctgtggggaggacaccctaagcattctacatacgtcacccctgctctcaggatgcacccagtgggctcgcggtcagggtggccttgccggtgtccacccccacaccacccccagctccggaagcggctccacacggggcttggacctccgcagcatccgggacatccacgatcatacagtcgccctcctcctcttcctcctcctccgtgtctgcctggaagccgtccatgtcttcagcaccaatctggccgtcgtgcctgcgcttcttcatgaattgggtgatgcacatgctgcccgctgacttcctcttcagcgagatgggagtgccctggctgggccccgtggaggggacgctgccactgtcctctttgggggccgagggcaccgatgtcacatagctccactggcacggcacgggcaggtgctcctgctggaagctctgtagcacctgcgggtgcacgtaccagcacatcctgaagtcaggccgcttctcatacactgagttctcggaaatgagccgcttgagccgggacttagaggggatggcggcatcctcgctgggggtgggggtgtgcaggtaggtggtggaggggctccgcgggctgccggtgtggttgctgagcagtccccggcggcagtgctcctggaactcccggatgatgaccttgctccc

SEQ ID NO: 158579 - DNA, 1000 bp, Homo Sapiens
tttttttttttttttttttttttttttagacctgtacagtttttattacataaaatatcacaaaattcacaagtacaacactgcttattttcttgcttgaagatcagatctctggtttatttaagatcaacattcaccacagctgaaggaaattaaactgaacctttaaaaggtaccgcatacggacctggttggggttatatacaatatattcattgtagttgagggtataaccatctggattcagaattcctgtgtcacttgctggtcctaatggcactgtactcccattcagggtgacgaagtgggcagaactgggagccatcttgcccagccccttggtgctatgtttaccttgaagcaatccttcggccttaggattggcctctagtagttcattacactgacctagagctacctctgataagagcagcagtcctgtattctttaggcgagaggcaaagcagtaattggcactcttggaagacatgtcagcaaagtagattcctttcccaaacatgtaacctgtgatgggagcttcagggtgggcaattcgaagcccatggctcaagattcccacccagttactcatcctggaaccatgccatagaagcatcctgttatgaaggtcctctctgaaggcttctttctcaccatccttctccacttcaaacaaatccagcaaggtcatggtatagtcgctgtgtgtgggagcatgggtagattgtaggtactgggaaatcactttgaactcgtaactttcatggtcaagggggcgcaaggcacaatgtaggtttctatagtgttggtccaatgggtgttctgggctttgtagctctgttttcaccagcttaatagcaatttcaatgtctcccaaagcctctagtaattgtattttttctgacagttccttctgtgtccggattagtggaggagtacggagtccaaagtcatgcggaatcctggtgtagaattcattgcatgcttccatgagagctcg

SEQ ID NO: 158580 - DNA, 1000 bp, Homo Sapiens
aatagtgatttatttgtcatcaaatgtacaacttattctaaatattttcattttctgtgttctaaatagaaatattaagttgcagtaaaaagagaaaaaaaggctatttagcattacaaagaatcatatttaaaggctgcccaatgtagagtctagtgacctgttcaggacacctgaaatataattaaatgacaattatcaaggttttaacaatttataattctaaaccagaggattataaagaagtgcaaattgacttttacattcaactttagttaaatgaaggcactcagtattcttcctgaataatacattcagtttctcacattttatgctttcatctattcagaattatttcatagtaaaataatctactcttatcacagctgtgtgacgatttctaaatgtaggaaggcctgtgaaacatgacactgcagttaaattggttggcctaaggactaagtaatttttcttctgctgaagttttaagtgagtatttgttccaaacaagttctgttgaaatctcacgctgttgtcaggaatcagtgttatcctggaactgttattctatttaatcttcattatagcagaaatgtgccaccatggctttgacatgttggtaggtattgtcttccaggcttcaaagctgcacagagtctacgttttagagagttggcacctttgatgtggtagtgagctgatcatccactttcttctcagtcaccatcattttgagctcctttgtgctggtgagcatcaatttcttcataaatagcttctgtagtgacagcaggagctaagggatcaaactccattacctcgtagtaattaggtggctggagatcactttttgtcatcgctggatgattgctgggcaaaggtggcagactctggtttgatggtgctgctgcaatggtttgtagactaactggctgtagaaacactgaatttgaatgttccagaaaattatcatatgcgtggcttgaggtgaggttttggc

SEQ ID NO: 158581 - DNA, 1000 bp, Homo Sapiens
agcagggtggttttctacctttaattggggatacaaaaggcacctctcccagtacaagaggatcaaccaagaggtgagccccagtgctgtggtgcccggccagaaggaacagaggaaggatggagggcaaggcagcggaggggcagtggggcccagcatcccctgaagcctcacctgcagcctggggctgatgagatctcgcccactgcgcgcagagttgcagcttcgtacctgggccgccgcagctcctcagggggcctccacacctccacaccctaccctcagtggccagccaaagccatggggccccatgcagcagagcagggaagggacaagaggctcggcagaatttccactgtggccagcctccagccaggcctcgactggcagtgtgggctctgaagggctccttggggcatgggcccggagcagggtatcactcagtgaaggagagtcacactgggtcaagcagccagccagccagccagcctgtcctggggcctccacttctcagcaaagtctcatggtcagctggggtgggaaaggaggcagagcagccagatcccactgcagcgcagacctgtcccccagttcatcccactgcctccacacccccagccacagctggggcagctccgtcttcaaagaggaggaaaagggggtaacaagccacccccaaagcagccttaacaccagaggagggagggaggtcccagcctaagggtgtgagagcagtggggacctgggctgcagggtgccagaccccacactcataaggcaaacagcatgtcatcatctttctcctgggtcttcttccggggcgctgggccagatgggggacccgggggcccctcagctgaggggctggagaggttgggcaatcggtccgcggctttggcccgttcttccaggaatttgtcaaattcttcgctggtgacccccttaggctcttccgcatcattacccacgtcagtggacagccactgctcgatgtcctcca

SEQ ID NO: 158582 - DNA, 1000 bp, Homo Sapiens
ttttttttttttttttacattttttaaaagttttttatttttcagtttttgtagagatgaggtctcaccatgttgccctggctggtcttgaactcctggcctcaagccttccttccgcctcggcctcccaaagtgctgagattacaggcctgagctgctgtatggctatgattttgttaaaggccgacacagaggtgaagtcaactgctagaaatcacggcttttaagaggtggagtcacatttgaactctggcctctgatgccagatctgcaggtcacatgttcaccatggtccaggtgaccctgactgcggtccccacctcttctgtgaggcacagggcaggattccacctgaggcgcgaggagcctgggacgactcctttggtctcttctggggttcgcaaaaacctgggggtcccgggtgtgaagaagggtgtctgcgctctcagcggtcaggctccaggcgctgcgacaggacgccgaggacgcgctggaacttctcaaagcgttcagcgcgcggagctcccgcgccccggctaccccagagcagcctccgcacgaagccggtggtcagggcctccctcagctccgggttaggccggaatcctcgcaggcgctgggctgccaccttgcggaatttgggtgcgtcccggaccatgtgacgcgccccgtgcagggtgcgcaacagccgctcacagctctcgtccagcggccccgcgacttcctcgccctccagtaggcgaaccatgggtgccacgtgcggcagcgccacctcgccggggtcgcagggtccagcgccctcatccagagcccgcatcagcggcttcagctcctgctcaaaggccagcgcagcctccgtgtggctccttcggagctggcgccacgtgtgctccaaccgggacacctggggcatgagcagggcgcccatgactgcagccagcccgggcaggtcccccgccgcccctggccgcagcgccagcgccagctctaccagtcccct

SEQ ID NO: 158583 - DNA, 1000 bp, Homo Sapiens
tagattcatctttttaatgacatcctaaaattcagaggaggggccagcgggacctctgggctcagcggctgtgaaggagggacccgcaacacccgctaaggcaggtaattgcaagaaggcactcgcgagggggacttcaagcccctcttctatttcttcatataaaatcagggggatggggaaagctccaagggcgagggaagcagagagtttctctcccagcctatggaataaggaagaggtgaggaaggggcgggtgctgggagcaagaaactgccaagtccaggacctgccctcacacagacacacacagcccgcacctgccctccctctaaaatctgcatccggggctgtaaggaagccccgtgttcaagcccccatctcttctcccttctagctggtacgaagttggtaatcgccactctgggtgatgtagcgaacccagggcagggcctggtaaccacttttctcaatgatcttcatgtatcggacctggatcccagagacggtgaagtaggggatctcaaacttgaccccgatggggggccggccctccacctcttccttttccacactggggaggccaaagtgggctcgcatcaagtactccttgccccccgggaaagacttaatactccaaatcacgacgtttctctccggcacatacttggcgctgcccacactggtcttgaatctgggggagtcggcatcgctgggtacaggcacagatatctccacaccgttggccactgactgtttcttaaactgccccttggccttgaccatgatctccacgcggctgtgggagaacttctcaatgacagactcaatccagatcagtggcttgacctgggtgctgaggcggtatgacatgagctcaaagtcaccatcaggcgggatgaaggagatggtgcggtcgttgtcaaagcgagagagccgcacgcactggtggaattttacatcctccagctctactgatttgttcttgctgcggccagtg

SEQ ID NO: 158584 - DNA, 1000 bp, Homo Sapiens
ttttttttttttttttttgtaacaagaatgcagatgccatttatttggtccataagtatagtcgttatttgagttttacaaaacatcgaatataaataacctgaaactgtaacaatacacaaaaattggcttcttacacagacataccaggcggtacaaactgaaaacttgagtaaattaacattgttttacattaatatacatagtgccatctaacatttaaaaacaagtttcaatgcatagcactcgatacttctttgaatctgtttcaatcagttaagagtatgaaaatggttagatctaggctaaaaataattcttcttctagccaaaaataaaggcataatatttataaccaggtatcaactttactaaaccacaatattttgaaactattaatgatacctacgggtatttacattaaaaaggcaacatgcattgtgttgttttatctcatgactggttatgcacacactttgttcaaagggtttttaaaactatattcctactttcaatacagcatactgcaatgtgtctaacagttctagcaaaatgaatgctttcaaagggagcagaatcattttcaagtcactgctgtcaattttttccctttggaacaaaggacataacaatctggttctgcccagataaactaaatagtaagagggttctgtttagaggcatttctgttcaatctaatgctatgacatcatcaagctcttccttctgttctatacgtgacctctttgcactgagattctctttctcatctaatttcctcttgcggcttctctcttcttcactgacgtcggcattatttgaagaatcttcttcatctgaatcaactatgagaacgtcatcttgctcttgagctgtggaggtggagggctgagctccatcatcactgccattggttatgcttttggcagcatcttcagcttgtttgggccccactttttccggggcatcaccaacaacttcaaattcaacgtcctttccta

SEQ ID NO: 158585 - DNA, 1000 bp, Homo Sapiens
tagagcctcaggtctgaaaaggcaactggtaggatcatcccattccctctcagaagcttctgaagtggaagaaaaacaagcaaatcctaaagcaagtaactttattatcattcctttaaaaagaaccaaggaaaattcacaacatatgtgaaacacaaacagctgtggtttaggaggtaaacaaaggaccaacatagccctgaaatgcaacagcctctgagtgacttgagccgcatgtaactgggggttctgttaaaaggggcaggctcctccctcctagcccttgaagccccagggaacctggccttgaaagacaagctctctaatactcaactttgcaggggtctcggcccttaacatccaaagacttggtagcatctcctttctcccaaaacccagctggaactcaactaatcctaaacgaaaactcaagaacagcacaccaggatgccacctgttgtttgtcagggtctcaaactccagaggaaatgcatttgcctgtcatggttttcctctctaagggcacctgtctgaacttggagctgtgcttccactggtgcctcatgggcctgggcctactctccacctgaattcacacttttctctataaggtatcaggtggggaataagtccaagaaggttacaagaggctcccgagcaacagagcttgctcattcctggcaggcatctcccacaattccccagagggctgcgaggccgggacagcataaggacagagaaagggcagaggggtgcttggaagtgctcatcactcaggggagctggcaggcccgggatgacaggcagcctgaacagtgctggaacaaagacagccaccctgcgccccttgtcgagcagctgctggtgatgggaagcagcacgtcggcaccacctccttcgttgcaggaaatgttttgtatcgggccaatgacttcagttttccttgcctggagatgccttcatgaaggaaggggacagggaatacaggtgggcatgctgc

SEQ ID NO: 158586 - DNA, 1000 bp, Homo Sapiens
acaaactgggagctgtttattggtcgcggtgagaagcctatatacaaagaaggcacaaggagggggagggaattcccctgctacagtaccatggaaggggctggggctggggagtgggctgccaacaggcaggggtcaggagaggtttttggaactagcctcagcttctcaaatgggccttaggacacagcccatgggggaggggcagagccaggctggcacagaaagccaaggatagctaagaactccacctctaggcccctgacgcatggttcagctggggtctggctggatggggtggcagggccccctgcctattactacattcaagtgtcggctccctccgtggtcttgcagggtctctctggggccttctggaggctggctggtagtggtgagtgagaagtggcatctcctctgtatcctcccaacatctgtctgtccagaattggtcccctcctctctgtggaggatcccgccatgccccagcacagtgagcccaggctacgttgccgtttgcctgtctttgttccttcctgctgcactccctgcgagttcagtctgtggccaaggagagaggcttcacagagatgcaggaaagcaagccttctgggtccttctttctagttcctttgctgttgggtctgagcacgccaggtcctccaagtgcccccgtagacaaccttaggcaggatccccacctctctggcatgggtgtcaattgggggcccaccagccagcggcccgggggctgctccctgtcagtagttttgacagcaaagtcaatccagtgactgtggctctcaagatggatccaggtgtgaaaggggaggtgtcaccacattgcaggggccttttcctcccggctctggtgggaggctctttggcttgttttggcgctggcgctggcagaggctgagacacggcgagcccatgcaccatccgtgatgcaccagcacagtccacgagcagtgggccccacgtgcatctagggcacagg

SEQ ID NO: 158587 - DNA, 1000 bp, Homo Sapiens
tttctgtagaccaacagaactgtcacagctttattttgtgactcattatattacaacatagaaatatgcattttaatacttcatataaagttattgacatacaaaattttttttcttttttccttttaatgaaaatgatttaacttagaaatctgttgtgaaacttttgtctagttttgcaattctcagatattccagtgcaaaaatagatcccattacagacagcgtaaagtgcttggaatgagggccaatgatgaacaaagagcacaaaaacagcttcatcttagggtataagaagggataatagcatacctaaatccttatggaaatagaaacattctaagggggatgcaacaattttgaaaagaattagagcaatatttctacagtattacattattactagtagataataacaagggtacaaattaatgtctcaatatcaaagtggttcagtattacatgacacatggctctttggaaaatattttacctgatatatacaaccacaagaagaaaacacagacaaatggctttagtcaatgattactatacagtgaatgaatgatgtgcaacatttaatagtcacaaagcatttgctttcagtacagataatgaaatacagtagtgtgaggtttggttgttttttaacaatgaattgtgctgggcatttatgtatagagggcttattattttcttctgtatttctcatattcacagttgttaataagttttctgaggtgtcccaaagatgcaaaagcagaaatttttgaacacgtattttgagaatttctgaaactcacataggtacattccacagggaatatacagaaattttgcttgattgagtatagagttggtaaaaatttctaccacaattaggtttacacaggaaaatgtaaaaaattactattttaaaaggtaacacagtattaatgaagatgtataactatagattgtttctagcttcagaagaggtcctttcaatctgtattaaaat

SEQ ID NO: 158588 - DNA, 1000 bp, Homo Sapiens
ttttttttttccaaaattagtttttaatacattcaggtaggttatacaaagagttggtcccgaggcctgggctgaggcctgggccctgggaagtgacagcagccctgtgtagtgttttcaaagatcaggcgtggggacccacaccttggcctccaggcctaaggaggagtgttacgtgcagtagcacccgtgggtgtgatcccaaccaggactgggtctgcctgggtgctccacacaccaccagggcctagccctggctctgcccattgactctcccttaacttcctctgggccttggtgttctcctctgtaaaatggggtggagagagtggcattttcactttctcgcacattactgagcccacatcatgagccagactgtgggccaagcacaggtaagatgatgaagacagcaaaacaaggtcttgagttggtcccagcacgtccattcttcccagacagctcatgactccatggtatgagggatgggggtcatctgggtgaggctttttacctgtttttgtaagagggaaaaaagatccttgcatgatgaggcacagaaaggaagtttggagccagcattatcttgtgatgtgatagctgagagaggacatcactctggtccaacccccaatctcaccccacaaataagggctcttttttcccccagaggttctgtataagctctccacaagtttcattctcttcctaagcctcagtttccccatctgtgcaatggggaggttggattccatagtctcaaactccaggctctgctccatagaggaaaagggaatgagagaatgcaagagcacagagagaacaggagaacccacaccagggtggaaaggaagggaggagggaaacaggcagagaaggaggagagcgcctgcagctgcctgcctgggagagaggagagagcaggtgtgcacagcacaggatgcttccagaccctgctcgggctatgtggggccacttcctgtccacttaacggcctgca

SEQ ID NO: 158589 - DNA, 1000 bp, Homo Sapiens
tttttttttttttttttctggaaggttctcaggtctttatttgctctttcaaattccaggaattgacttatttaattaatccatcaacctctcatagcaaatatttgagaaaacaaatttatattcagattcttattttcagtagggaagtaagaagttgcagctcagtgcacgtaaagttgagacagagatggagacatccagccccacctctctggaacaagaaagatgactggggaggaaacacaggtcagcatgggaacaggggtcacagtggacacaagggtgggctgtctctccacctcctcacattatgctaacagggacgcagacacattcaggtgcctttgcagaaagagatgccagaggctcttgaagtcacaaaggggaggcgtgaagaaatcctgcatctcagtccctcacaagacagctgtctcaggcttttcaagctgtgagagacacatcagagccctgggcactgtcgctgcacgcagcctgagagtagctccctccttttccacctgaactcttcctcctacacatcacagcagcgaccacagctccgatgaccacaactgctaggacagccaggccagcaacaatgcccacgatggggacggtggactgggaagacggctcccatctcagggtgaggggcttcggcagcccctcatgctgtacatggcatgtgtatctctgctcttctccagaaggcaccaccacagctgcccacttctggaaggttctatctcctgctggtctggtctccacaagctcagtgtcctgagtttggtcctcgccatcccgctgccaggtcagtgtgatctccgcagggtagaaacccagggcccagcacctcagggtggcctcatggtcagagatggggtggtgggtcacgtgtgtctttggggggtcagcgcgctccagcttgtccttcccgttctccaggtatctgcggagccactccacgcactcgccctccaggtaggctctccgctgc

SEQ ID NO: 158590 - DNA, 1000 bp, Homo Sapiens
tttttttttttttttttttttttccaagccaaactgtatccagctttattaaagatactttccataaacaatcatggtatttcaggcaggacatgggcagacaatcgttaacagtatacaacaactttcaaactcccttcttcaatggactaccaaaaatcagaaagccactataaaacccaatgaagtcttcatctgatgctctgaacagggaaagtttagagtgagggttgacatttcacatttagcatgttgtttaacaacttttcacaagccgaccctgactttcaggaagtgaaatgaaaatggcagaatttatctgaagatccacaatctagaaatggaaccactgctcttttgacaggtgccatctcagtggcatcactggaaagtccagattgcctgacacactggtaaccaatgactaggggtcaggtctcaacagatgtctgggcttaagggagttaagtctatgctgaaagatggaaagggagaagaggacataaaaacaaatttgtttttctataccacaaggcttttgtgccaaggtggccatgtgtgtcaaagtcagggaatccctcctcctgggagccaagaggaagtctctcaaaactagaagggaaaggtgttttctccacatcaatccagctttggagacattctattagtgacatatgccccttcccccaaaaacaacaatgaagtgttctgtgtgctaacaacatagcttttaaaaaaaaaaaaagtaaaacaaaattctgcatttttataaaacttgataaaaaatagtatttcaaactgtacagtcaccagaagtacacagttatcaaaaatgcacacacttcacttggcatctccagcaccttcagctttctgtgcctggtctgttttggcatctccattttctgcagggttattcccctccttgccagcatcagcttttccctttttccctttgggtaccttctctcccttctttgcaggggcctttttaggcttg

SEQ ID NO: 158591 - DNA, 1000 bp, Homo Sapiens
tttttttttttttttttttttttttttttttttttttcagttttggaattctttattactttgaacccaagagccactgataactggcacaatccaatgaaacagaggaagcagcagcttaaacaaaggaaaatacatttaagattataagtctgggggggcggttacaagcttaaaaagtgacccagacagggatatcattgctaaaaaaaaaaaaatccccttgtgacctgggtacattttgcaaagccacaggtttgcaatgttacacaagggccaaaggaggccatgagttgtctttggttgtggggacagagggtaactgttcatgaaaatagtgagtgtctgaagattaagaaaatcatgctgcagcagaggagaagggagaggaagacaggaagggaaaggagatgcctgagggtcaaaagctgagcccaagcctaagcccaagctcaagctcaagccccagcatggcataattttgtgaattaactcaggctgagttgcctccagtctttggaatgtcatcttatactggtactgctgaggcagagggcagtaattggtgctttgggataggagaaggggcagttgctgaaatacaaaattaatagcatcccaagttcctcaattgcagccaaaatacatgtgttcgggcctttcggcagtatcgcccccagaactacctgctgtagtgtggtccattcccagacagcaacatgcaagaataagtttacaatacactcagcccttctggcttcagatcaggggctcagaggctgtgacaactcatgatgctgaaaatgtatccagtgaaaatgaagtactagctctctgcttcattaaaagctcttggaaagaatattaaatctcaagacaacaaaataattgaacacacaatacatttgtgtctttgtatccaatatattacctttgtcttattaacaaaaattatatctctcattatatatttcttggatctgaagtttttattcacact

SEQ ID NO: 158592 - DNA, 1000 bp, Homo Sapiens
ttttttttttttttttttggcatgcaggctctttttactgttctgggcagtgttttgcaatgtgtgacccctccgcactgttggtgaacatacagacctcctatatgggcacccaagcccaggccagtgtgagaaccttggcgggggggtggggaggatgagaaggggaggcccctagcctgactcagaggtgaagactgctaggccctgctgtccttggggtacgactgtcagggcctctacctccccgcccccgcgggtgggcttctggaagtggatctccaggacgtcatgcagctccgggccatccaagatatcaggaatgttgagcaccagtaccgagcggggaactggctgcgacctgatctcagccttctggatctccccattcacatacggagagactctcagagggacttgctgcccacccagtggcactgtgaactggccgatttggcacagacgctgagccactccatccctagcaaaccccagcatgacactccctggcagtagctcccgaacgtccacatcgccacctccgttcctagtcttgccaaagaagatctctagcttgtccagcagctcctcctcactcagcctgaggctggcaggaaatccagtgaccaacaccctccggccactcaactggctggacaccatcacctggatggtggtgaccatgggcagctccaagggctggacctgcacccgcagccggcactcctccatgttgatcgtgtgctccttttgttgcagcacctgctcagccactttggggtcatcaaaggtgatcagagcagagcccgcaagcagagggcagtggatccgcaaattggaaactaaagacttaggcacttccgggtcctgctgggtgtgtcctcggaataccagggggatcttgggcactgaaaatgggaccttgtctttgggggagtccccgagctcctttctcagctgctgcaggtcccacagcctcatcttgagtctggcctgctcc

SEQ ID NO: 158593 - DNA, 1000 bp, Homo Sapiens
gactttaaaaaacatgcactatacaatcttttatttccagtttaaaaacaaaatcttaaattactaggagtatatttacaagattaattacattttaagccagcacaccatggatgtacatgaagggccactcggtgtccctcgctgggacaggttgtgtgacctgcccaaggggctccggctcatttgccaaagtcaagacgacgaccaggtcttctgactgctcagcccaaccaataatgaaaaaagtatcagagatgtgtcatatccattttgctaacaagcaattacatgcctttttagtgtttaagagaagccttaattttcctgggatatctccgtaaaatcattctggaatttgattttgaaaattctttaagaaaaaaaaaaaaagcttgtcacccccatgagacctgctgtctctcatgtctgcagggacaggccttttagaggcagcaaaagggaatactggtctctggaaagtccagacagaactctagcagctccgatggcttgatctcttccagggagccagtgggctaggcccatgctttggttcaaagcgtttggagaacatcttcttgctccttttccggaaacgagataatggacacagagtcccagacgtcatcctttggtgagctgtccttgtccaaggcctctaagatgggctgagttgggtcttttaaatactcttctatctgtaatgggatgcttggtggagtgtgaaaccagtatttaatcaggcctctatatttcaggaccaggaagaaacaggctcctgccagcaccgacagcaacgaaaatgttcccacggagatcaggatgacttgctgaagctcagtggaggcatctgccattgtttcgtagcaagatatgttgcttaaatgcccgactctaaagatgttacttttgttccaaagcagttgtgcctggacttgtaaacagtacactctggagggttttaagttatccaatgaaatggagttgcttctgaaag

SEQ ID NO: 158594 - DNA, 1000 bp, Homo Sapiens
tttttttttttttttttttttttttttaagttttattcatgatcgtcttattaaaataaatttaattgcaaaaacaacctgtcttagaatacagtatcagatgttttaagtacatgtgatcaacagtacaaataattatagcagtcaaaccttagtatcacacatacttaatatattagatatacacaataataaaatcactccctaccttgaaaactttatagaagcatttttaattttacaacacaaagctcaaacgaacctacaataagtctagtagtctgtttacgtgccaagggataaggctgaacaataaattaaccctttaaaaatgtctatgaacaagtacaattttctttttgagttctgcagagcaatgaccactaagaaatatttttaaaggctgaacagaatccagcggcaatgaagttaattaaataagaagactaagagaaaaataaacagttcaatattaacaatacagtatatttgccagcacaatcaaatcagtataaacacctttaaaacatgaatactgaacttagtaaaatgttatattgtatctaattatgtcagatatctgatgagagtgctttttattatagaaatagtttcttctctcttacacaagactttaaagcaaatccaaacagacaatttaactgttttggaaaatgtattcactgcagaaatgcccacaataagccatgctatctgatggtatggtaatgtgaaatggcatggtaacgtgaaataaaaaaaatttaactagataatttttacttcaaacctgaagcaaaagtacagaatgctgagttcattactttatgtatctattgtaactaggaattactacattaaaaatattcattcttacaatgtttgtttttagttgcctagatatgtaatgggccaggtgctatatgaacactgaagaataaaacaaaaaaggttctctgcaaagaaaaaaaagttggcctagggtactcagtatatcctt

SEQ ID NO: 158595 - DNA, 1000 bp, Homo Sapiens
tttttttttttttttcactgttaaaaatacatttatcattaaaatatattacacatggagacaggatgcatcatatacagtttggaagacttgctggcccagaaaatcccacttgtttcaccgaacactcattttttcagtgattttacattttatttttagagacggggtctccctctctcacccgggctggcgtacagtgatgtggtcataggtcactgcagcctcaaactcctgtgctcaagtgagccacccacgtcagcctcccaagtaactgggaccacaggcatgcatcaccacgcccagctaattttttaaaaatgtttttgtagagagggggtctccctgtgttgcccagcctggtcccaaactcctggtctcaagcgatgctcccacctcagtctcccaaagtgccgagattacaggcgtgagccactgtgcctggtcattttaattttttaaatgcctgtattgccctcagaggctgagcaaccagcctcagagttattgagccattatctgggcaggaacgggggtcgagtttgcatatgcatatacacatcctcagacagagcactgaaagcatctgaggtggctgtagcctattttatccagcagcttctgcctgcattcttgccatccaactcattggcctttcaggactttccatcaaatatctgatcatggggatctcagcccagactgactatgccctggaggtagggtgagtgagtacaagtacagttatttaaaaacattttaggccaggcgtggtggttcatgcctgtaatcccagcactttgggaggccaaggcaggtggatcacctgaggccaggcattcgagaccagcctggccaacatggtgaaaccgtgtctatactaaaaacacacaaaaaaattagccaggcatggtggcggacgcctataatcccagctactcgagaggctgaggcaggagaatcgcttgaaccaaggaggcagaggttgcagtgagccaag

SEQ ID NO: 158596 - DNA, 1000 bp, Homo Sapiens
tttttttttttttttttggcatcagaaatgctgtttatttctctgctgctcccaagctggctggcctttgcagaggagcagacaacagatgcatagttggggagaaagggaggacaggttccaggatagaggttgcaggctgagggaggaagggtaagaggaaggaaggccatcctggatccccacatttcagtctcagatgaggacaaagggactcccaagcccccaaatcatcagaaaacagcaaggagcaggaggagcttgagcaggccccagggagcctcagagccataccagccactgtctacttcccatcctcctctcccattccctgtctgcttcagaccacctcccagctaagccccagctccattcccccaatcctggcccttgccagcttgacagtcacagtgcctggaattccaccactgaggcttctcccagttggattaggacgtcgccccgttagcatgctgcccctgagaggagagcacaggcaatgctgttagcagcaatgagcaccgcagacagtgagttaggggatcaaattctatcctagtcactagtttggagcaggtctagaagttggggatagcaggtgctctagaagagattagaaggagaggtaggaaaatgtgaagtcacccatgcaggcctcaggagttgccaaccccagacccctgcagcacttaaaggggcattggtaggggcaaggggaggagttagggaagccctgggtggggctagaaggaggtgaggaagaagaagaggaggaggctttggcccagcaggagcaggcctgggggcagctgcccagggaccccttctgcgactgcagcctcagggttcccagcacggctgaggtagatgatgaccacattgtcctccggccctgatggctgcacctcgttgtcaaccgtatagcagccctttccctcaaccgctttgccatggaacctgcgccccagtgtgtcctcaccaccctcaccgggcgtggcca

SEQ ID NO: 158597 - DNA, 1000 bp, Homo Sapiens
taacaggattaaaaagaaatttttaattccttgtctctcttctgatggctgaacagaactgcggtgtcaaatggaaagcagcacacaagaattcccttgcagaccttgatctttcgcagaaatgcaaagacgcctgagttatacaacttgcaattattattttctagacagaagtgccaactgttgtgctttccagtgtatcagtggttgctacattctccttcttgtcttcgggtttcatggcaggaaacagaagtacttccttgatgttgttggagtccgtgagaaacatggcgactcgatcaatgcccatgccccagccagctgtggggggcagcccatattccagggcagtacagaagttttcatctatgaacatggcctcatcatcacctgcagccttggccttggcctgttcttcaaaaagctgccgctgccgcatgggatcattcagctcagtatacgcattgcatatctctttcttcatgacaaacagctcaaagcgctcagtcagaccctctttagagcggtgccatttagccaaagggctcattatctgtgggtgatcacagatgaatgtaggattgatgcaagtcacttccaggaactccccaacaagcttgtcaaggagcctggctgtggtccgaggtggagggcattcaacagcttttgccacacagatatcatcaagaattttgcgagtttcttcagtttcaaagaggttcgtttctggcagcttcatccccagggctttctcaagctcttctaccatgttgattcgccggaagggtggggtgaagtcaacatcgtaggcttggccctctgggccatctgggtggtaggtgaccttgtaactgcctgtaatatgcttcaccatccctgaaaccatcttctccgtgatttccatgagatcgtgatagtctgcataggccatgtagaactcacaggtggtgaactcaggattgtgcgtcaaatcaatcccctcattccggaactggcg

SEQ ID NO: 158598 - DNA, 1000 bp, Homo Sapiens
ttttttttttttttttttgtgtaaaaaggcttcttttattttaataagtaaaaatggctaagcttccaaaagttcttaaataggatttcagagggaagaaaattcgagagaccagcgagccaggcaggtgagcgagcagcagaatcccccacccgctggctgcctctgccagccataaacacagcacggccccgtggcgggaggccatgcgcctccgcacaccccccagctgcgggaaccctccttgaaggagaggggcggggagggctgccattggtgccaccaacccaccccagtccccatggttcttgggtctgcccagaggctcctcgcccaccccctaaggagggggctggccagctctgcaagctgaggagaggggccgagaaagcctgggtgagaggcccaccctcctccacactcccgccctcctcacggggcccagttcgctgatggcccaggcctgccaggaagagcagccacccccgcctttccgcccatgcaatttgcactcagagccacagccgagagacaccgtttccttctgaacatgtttctcatctttgaggggagacggggcagaagaagagcctccactctcgcctctacctccgggggtcctggcgctgcagcagggacaggccagtgagggcccagcttcaggcccagcggggtcacatccgtcacacaggcagtggccgcgacttccccgagggctgcagcttcctccggatggatccagggcggctactggtcccagagctgggggctgagtgggcccgtgccgagggctgtggcgtctgacaagccggctcccactctagatgctcctggcttgaccaggacccaagctctgccctgcgtagcccaggccccagctccacagagcgcaccctctcagcaaacttgagggaatagagcgtctcgctagtgttcttctccacgggggacacctgtaccaccatgagggtcttgctgtcaccactaagcgaatcctgca

SEQ ID NO: 158599 - DNA, 1000 bp, Homo Sapiens
ttttttttttttttttttttttttttttttttttttttcagtcggagtgagtttattagaagttagaaagacacaaatacacaaatcactgagcacttcaagattagtagagaaaagcagaatgcccaaatttcacacacagactacacagcaaatgctactggggcatatcctagggagacccggagtccgagcggggcccccagggctctaagtaccacggagcacgtgcggcacatgccttgctctaaggcttagttacgtcaacaggtcaccgtcatgccattgcaacaacaccttgtgtgacacttaactacctgttaccaaagtgaacagctaatcgctcttaatttttaaactcgtgtattacacagtaaatggattttattaatacagtttatattactaagtacatatctggcaaagctacatgtatacagaaatcaggaacccccccaaaaaggacagcagcaccgaaaggaatggccagttcacagagaggtgcagctctgacaagatcctagaggctgctagacacagcgggcagcactggagagagaagggaagctgcgggaggcgccacccgtcatgcaggagacagtgtgagagtcacgggcggctaggccatgggacgctgagcaagtcagttaaccagcccgagcttcattttcctcatcccgttccactctacgctcatactcacttcctcccctccgtcagggccactctcgtacttgaccacgtccacgttgaggctctcacggctcctgcgcttctccatgttctcagggtcattgagcacttctgccaccctctgtttgtgaacattgtcaagaccctgtttacgagacctcatagcagcttcttctaacgtttctgcagcttcaaatttgccttgacgtctgtaaagtgccccaaggttttttagagtggttgtaacagttggactatcaactttgcaggctttgtaccagccgccatactctccaaaagatgtccc

SEQ ID NO: 158600 - DNA, 1000 bp, Homo Sapiens
ttacacagaagttactttttaatttttaaggaggaaccagtgatgattggtgacaaatctctcacaattaaaaatgggtggaagggccaaatataaaaacattttgcagtattttattctttcgtttaagaagctataacttaaaccatcttcagaaacaagatctgtcacccgtagagcttagagtccaaatagacacctatgaggcgagcacaaggggcggtgtgaggcagctgcaggggcctgaccaggggccggggttggctgtgtcctaggcggctgggcagccactggcccccactgccccgtggacctccacagagcgagtcatggcgacgggggaccggttcaccgccagcctcctcatgcagccgcagtaggcggggggccagggctgcacggccatgggctcaggcaggcccccgaggtacagaggggctggggcaccagctgcagccgccagcaaggggcccacggtgtggttgctctgcgcgtccacctccagccggagcacattcccgcttttcatcaccgctagccggtgccactggccatcacacagcactgaggggcgggtcactgacgtggagaactcccctgctccgtcatccgcccgcagcaggacttgcttctcggtcacctgcaactgcaagtaggggggcgtccgggcctggcccaagtggaagatcagtccggtgactgccaggggccgcacctccagttccaggcccacatcaggcagtgtagctcctgggaggtctaaagtgataactcccccgctgcctgggaagaacaggcccgcctccagggggcccaagatgcagggtgtgacccctgccatccgtgtgggggcccccaggggcctcccgtgcagcctcagtctcttcacacagccgctgaacccgacggtcaccggaagtttggagctgtggctgctggccgggaggccgcccacaaagagggtgtggggctgggggtgctctgccccctggtgctgccg

SEQ ID NO: 158601 - DNA, 1000 bp, Homo Sapiens
gaattcggggtttttttgaaagaaagaggctttttattacattgttacaggcaatgcattacgtgagctggtcccgtgtacaatccccaagccacggcaaaacatcaggagaacgcaccgatctcacattgtacacagcgcagaacaggatcacccgaatgtcaacagaagaccaaaaatcactttacaaaaaaaaataaaaataacaccatttttatatttaaaaaagtgccagcccttgagctgcagacattagagacgccaaggacgtgccgccactggaacgaggccgccagccacgtgtcgcgcgtcctggcctttaaagctgaactgaagccgctccagacactcatctctggagttcctctgtcttaggattttccctctctactgttgtaatgtgtgagcatgtcagcctcacacgagtgaccttcatgcgtcctacgtgtgacggccagaggtttccctttgtaaggcttaaatctgagtgcagtaaagaatgaagaaaccaaacaccagaaccctaaactcaatgatatggagccaatttagagcggcacccccacccctcagagacagcggcattccacccctcggagagagcagcacccccaccccctcagagagagcggcacccccaccccctcagagaaagcggcacccccaccccctcagagagagcggcacccccacccctcagacagcggcacccccacccctcagagacagcggcacccccaccccctcagagagagcacccccaccctcaaaatcctactttggtaaatattaatgtttaaccagttagcaaaatatttaacccagttagcaaaattaacaccgtcatttcgatagttactctgttgtgcatagtaaatgctgcaagatgaacttcacattggatgaagcagatttgagaaacgtttgcagaaagtgtgcctccccttcgacaggaccctaagcccagagaaaggaacagaggcccctgcagctgctgtgc

SEQ ID NO: 158602 - DNA, 1000 bp, Homo Sapiens
ttttttttttttttttttgctacagcagtacataaagttttattaatattctgattctcgtgtcatagcttttatggcaggaaaggatgaggacatgccccacctgtaacgtagagcaagcaaaccaccaagtagaatcttgagattctctctcaactgttctctagaaacacgcttgtgcttttaatctgccttttaaaagggacacagaacaaaaaatggttgtttgcaaataaacatctgaaagaaagtaacagctgacctgggctgaggcatccaaacaaagcagtcattgtggaaggagacaatgcaaaccacactggggcaagaaacggggcagagaacgtgcggtcatttgtgcgttgggtatttctaccagccccaaaggccccatctggaacaagtatcaaccaggaggggctctatggcttgatttattaacctaactcaaaagaagtcactgccaccaacagcactgtgcagttttattaaccattcaagtccagtagcatctggtaagattgggacagaattgggattgaaaagtgaacagatattcagcatctaacagttcaaaagaagccactacatactcttttcacaaatatgttttcacagagccaatacagtactagccattaacccagtacaccaagtgtactgaagtagaaaagatgcaacaagaaaaatagctacattagaaagaccaacactttagaaaaagagtaaaacactttcagtttctcccctttagcccctaaaacaacatcttacagtctggatctggatctacctatacagtcctacattagcttctaaaatatttgtcaggagggaaaaaataaaatgacactggccagtacagtctttggatatttaggaaggggatggggagaaagtcagttctcagaacaaattagtcagcttcagtctcgtcagcagggtctttggattctttgttcttccgcacttcttcaatgtgcttatccttctctcgcaa

SEQ ID NO: 158603 - DNA, 845 bp, Homo Sapiens
tttctttttggcctgagggcacatgtttatttagcagacaaggtggggctccatcagcggggtggcctggggagcagctgcatgggtggcactgtggggagggtctcccagctccctcaatggtgttcgggctggtgcggcagctggcggcacctgtgcactcagccgtcgatacactggtcgattgggacagggaagacgatgtggttttcagggaggcccagagatttggagaagcggatgaagttctcctttagttccgaagtcagctccttggttctcccgtagagggtgatcttgaagtactccctgttttgagaaactttcttgaagaacaccatagcatgctggttgtagttggtgctcaccactcggacgaggtaactcgttaatccagggtaactcttaatgttgcccagcgtgaactcgccgggctggcaacctggaacaaaagtcctgatccagtagtcacacttctttttcctaaacaggacggaggtgacattgtagctcttgtcttctttcagctcatagatggtggcatacatcttttgcgggtctttgtcttctctgagaattgcattccctgccaggcctaccacataccacttcccctggaattggttgtcctggaagttctgctgcagagggaccttgctcagaggtggggctgggatcaggtctgaggtggagtcctgggcctgggcatgcagagcccccaacagggctaggcccagccacaggagacctaggggcatgatttcagggccgaggaagcaggcgctgtggtggctgctgggcctggcaggggtggaagaggaggtggcgagtgagaggctcacctg

SEQ ID NO: 158604 - DNA, 1000 bp, Homo Sapiens
taggaacctcaatgtaattttaatgacctcagaccagtgacaagggcagactgaccaggggctgtggggggatccagagcaacctcgagggcctcctggtgcttaccacctggaaactggtgaggtggtgggagaactcctggtggaccctagtggaagccttccagtaatttcttgaagctgagcctcaggtgagtagggcgacatctggtggccggttgttgaaggtcattgcagagaggaaggaagccgaggaggggagcctgcagtgagggcgtcctggggttctccggttctcaccacccttggccacgcgtctagtccacacctgaggagttggtcaggtagaaggggcggatgaccgtgcggaagccgttgaagtgccctgccgggcaggggaaggaggaggtgctcttcgagctgttggtgtccagggcactgggaatcgcagccttccagccctcgaaatcggtgacgtctgccacgaagagcccttcgcagagcatcagggctttgttttcgtaggcaatggtgcgatctgagccgccagacttggtgaggcccaggacagggagctcgtccgaggagcaggagaagccgtagttccagcagctctggatggtggggaggtagaccagggaccaggacaccctcttgtcctggaagaggaagctggggtgttgtggagtctggaaggactggtaggggtagtatctgtagtcagagggggcttggaagtaatcagaagaatatttgaccaaaggcccccgtctggactgatagaccagttgtgacttccgtgcactccaggaactgtctgtcacaaaggcactccaggtgggcgaggtgtaaatccggggcttgtaggtatcctcggtgaggttcaggcctttgtaccgggccagcaactggaagggcacagtgtggaattccagggcctgcagagtcttcttctggaacagggcctcgtggctccagtacagggacaggttgaactgca

SEQ ID NO: 158605 - DNA, 1000 bp, Homo Sapiens
atattaaaagagcttttttatttgttaatgtcacataagaaatttaagcaagttacactatcttaaaaaacacaacgaatgcattttaatagagaaacccttccctccctccacctccctcccccaccctcctcatgaattaagaatctaagagaagaagtaaccataaaaccaagttttgtggaatccatcatccagagtgcttacatggtgattaggttaatattgccttcttacaaaatttctattttaaaaaaaattataaccttgattgcttattacaaaaaaattcagtacaaaagttcaatatattgaaaaatgcttttcccctccctcacagcaccgttttatatatagcagagaataatgaagagattgctagtctagatggggcaatcttcaaattacaccaagacgcacagtggtttatttaccctcccctcctcataagaacttaaaaaaaaagaaaaaacacacatacaaaaaaagtcaaaaaatttgaggaaccccttccgaacagtacacagttattaagttcagtgtcaataattcacatcttgcaacaaagtgtatggacatgatttcttttacaaaactttcagtgtcaaaaaggaaattaaggccatcagatttgcagcttaaaaattcacataaaggaaatataaaaatattctgtgcttctgagaaggctctgcactgtatacaggtaaggattaccatacttctttattttgaggaagacagttgaaaattttacataattgcacagcttctattggatgctcttggggttccctgctggtggaaaagttcttcctcaacaaccactccagctgcttcttcctcctcctcctcttcttcaggtatggttgttttaaagactgtacttctttgagcaacctcctctccctgagaatttttcaatataaccttcacatcttcgccagtgccccacgagttctggttcttccagatgaggtcagttggggggctggctgtg

SEQ ID NO: 158606 - DNA, 1000 bp, Homo Sapiens
agagatggacaaatatctttatttacagcaacagatagaacagacctccctcccttcccttcctttccccttccagtcttttccatactgttccccctcccgccccaccccaggctctcgcctagccctgccctctggggtgactgcgtgggttaggcccccaaaaaagcctaggaaaggagactggagagggctggctgagggtgggtggggcgtctcttcacatttttctgtcctctaagcctggggtggaggagagaggcaggcaccaggagcagggagaggtagagagctacggccccaccggcccaccctccccaagtaactttcacagtgttccccagccctggctgccctctgcggcccccaccccagccctgcccctaggttgtcctgtcaggtcctcagcaatgtatgaacctggtaacccagtaaagagttcaggcttctctgccatgggcccaccacccacggctgaggaggtggcccctctgagtgccccccactattttcaaggctggggttctgagaggacatgggtgggtaggagaggaccagggagagggggcttctcaagccttgtgtgacagtcctgggcctggccccactcagagggaccctgctggaatctgcaggggcgccaggctggcttagcccccgacagaggctcaggaggagaagcagagcccacagcactccatgcagatctccaggcagtccgcggactcgcagcaggcatccaggatgccgcagtccaggtcgcagggcaggtcgcagtcggcacactcgccagagccacagcagcagcagcagaggcacgagtcctccgagctgcaggagccacaggtggcgcagtccaggacgatgttgcacagcgtcaggaactcgcagaacaggcaggacaggatgcagtggacacagcagtcttcctgtgcctggagggggatctgggaggtggtggatttgctgctgctcttactcttcttgctgccctggctgg

SEQ ID NO: 158607 - DNA, 1000 bp, Homo Sapiens
tttttactttttcaatttttttaaataatagatacggggtttcgccacgttcttcaactcctgggctcaagcaatctgcccactgtggcctcccaaaatgatggaattacaggcgtgagccaccgcgcctggctggaacattttctttacatacactggcttttctccccttcaaatcatcagaaaatgggataatttttagaaatcaggtttaagcactactttcagataagcatttcatagttacaacagttacctcaaaatagaagtatgaagagcaagtgagaaatctggtttcattgttacactaggcagttccctatagaaactttgcgggggttaatagtcctgaggaagattttagttacaatgtattccaatcccatcgatctgatctgagcaaagctgacaaatgaagctggtcaaaaataaagggagattactcaggatggagtcagtcttaaacaaacttgtttctaacggcccatggtaggcatgacaacagcaggtgaggaaagagtagcatcttcttctttccactgagaagtaatggtctttaactgagtgtagaattggatgccctgtttgccatagaaattggtgtctcccctgaaggaggatcgagagccggtgaatgagaacattggcaaaggcactggaatggggacattcactcccacctgtccaacatccaccaagtgggcatatttccgagcagtggctccattggtggtgaagatggcagttccatttccatatgggttgttatttacaatctggatggcttcatccaatgtttctgtctccagaaccacaagaactggaccaaaaatctcctctttgtaacaggtcatatttggcttgacattcgagatgatggttggtccaacaaagttgccattttcatagcctttcactttaatttttcgtccatcaagaaggatggaagctccctcctttgttccactatcaatcagattacagactcgctctttggcct

SEQ ID NO: 158608 - DNA, 1000 bp, Homo Sapiens
tttttttctaagaatggattttcctctttatgaaaacaaaatattccttttctttataaaactttataggcaaatttatcaagctggtaaattccataacaggctgaaccaaatgaaatacctaagtaaagcaaattacatgattagaaggctaattatggtattactgcataggtttagtattaatgcatatgttctaagtttattgcaactacactaacttcgtaattttagatttgcagttgcatcctcctaactgcgtctaatggcagaagcaccaccttgtggcaaaagtaggagcttttaaattacagaagttagggcttgttacccagaaaggagaaaacaatataatgggcatccaggacactgcgctatttcttgacctgtagagggattccatcagtgctcaatttataattatttattcaaccatatgacttttctgtatttattgtatttcctacttttaaaagtttgggaaaaaagtcttttacatacctgaattaaaggtcacattcctaaatgcttgaattttctaagcaccacttatattttcaagaatttcctagaacttcgaggaatctttaaccttgtaaatgcactgttgtatttttatgataggaaataaaacaccagaaagacacttattctttggtaagtaacagaagaattccctacagatgtcttcctctgaatgttttcattcctgctctcccaaagcctccaagagcaaatgcagctgctttcaaatcatctgaaagacttctacattcctataccaacaggtctgaaaattgttagaaacaaaaaacaaaactcccctaaaaccaacagattttgcaggatcaatataaaatattaaggatatatagcacatttaactatgtaacaatattcaatcaaaaaaaggtttccctgtcacgttttatttaccatattttcagggcttgatacatagtattcacaaaatgacctgaattagctggagagatttatc

SEQ ID NO: 158609 - DNA, 1000 bp, Homo Sapiens
tttttttttttttttgtatgaaattggggatgcaaccagaaggaatcacacagagatatgtgacacagacccctggggcctgctcttgggagtatcaggaagaggcaagggtcacagggcaggctggggagagaaaagaggcagatgggaccaggtaggattgtctaggggtggagggagttgaggaaggacatccaggagccctggagctgggggaggagcactatcctggaggactagagtgtcaggacaggtggatctggggaaaggatatggtgtggcaagcaaagggcatgctcacacacaccaggagttgaagaaggagcaagaaaaggaaaggcgtaagcagggaggaagcaagagagacccagctagagctgctgggagcccctcactctaccccaaagtgcacaactcggcaataaatagcaatatttataaataaataaataaataagtaaataaatagatgaataaataaataaataaataaatatacttgtagagctaggagtttggtgcgagggaggagggagcacagaaatgcagtgagttcatttcttctatgcaggttctaaggcccttcattccactgctgaccctgcgctatagtgcgcaggtggggatcagcagcatggagtaggggcgcagagttgggggtctcttcccttgccaaaggcagctcaaggaaagagaaaaaaatgtaataagtaagtcctagggccaggagaactgtgcatttttagagggcaacaattgggcatcctccttgcgttggggggaggaaccagtgagggtgctgcacattttcagagtgggctgagatgaggaagcagaagtgagatgtggcccactcgttgcctgagccttctgcaaatactccgggctgtttgggatgtcatcccctaatccggaatctaggtttttgtttttttttttctctagtgacacacagggagggagaaaattgggacagtaggagtcagagggacagggaagt

SEQ ID NO: 158610 - DNA, 1000 bp, Homo Sapiens
tttttttttttttttgcagacagtctgttattttattgcacagatttcacttcaagaataaaatgcaccatcagtatttggagagtttggggtctcagatactgatataccatcagtgtttacacccgtaaagccaaattcaacagtacaatttatgttaaacaacatcacttcaagatggctaacaatacaaatagagagaaaagtgggggaaagctttaaaaatgtgttagtttgaagcatatgaaaatgtacgattaaaaactacatcatacaaacctgaaatcaaaaatgttttgtggaacatcagttagagttatactcacttgcactgttatttattgcataaagtctatgtggttcatttccttcatattgatgaattgaggatttcaggaaaaccatggttataaaaatgatcaatcttgaaaaagtatgtacagataaatgtaaaatcacaaactaaaaaatatccctacccctggccctcaacttacaaaagggaaagtttcccatggaaagttcgttccactattgccctccctcccccatcccatgtccccaatgctatctttttctgtctcgtacaagtaaatgaccttgaagggaagaaacaaaagccatctttatgaggctcccattgtcatctgtatcagtttgaaaagcatcttggcctggtgtggtggctcactcctataatcccaacactttgggaggccgaggcgggaggatactttgagtccaggagttcgagaccaacctgggcaacatagggagccctcatctctataaaaaacttaaaaattagctgggtgtagtagtgaacgcctgtagtcccagctacttgggaggctgaggcaggaggatcacttgagccggggaggttgaggctacatgagccgagatcacaccaccgcactccagcctgagcaacagagtgaggccctatttaaaaaaaaaaaaaaaaaaaaaaaaaaaaaagtatcttgtatttctcttc

SEQ ID NO: 158611 - DNA, 1000 bp, Homo Sapiens
tttactggtaacacctttttaataggtcaaagtaactgtacagttcattatattcttcctgagaataatttatatcccccaacaaactaaagggagggtatattttttcaaaattaacagaatggatggtgtaactggacatcaaaagaaaaccaaattcctgttttgcttcattctctcctgggaagacagatacaaggaagggttagttaactccagtggctgtaaaatagtcaacatggctttaatctttctttataaattatataaaaatggaaaaaggggatggttctggaacttctcctcaatgcagtttggaggtgctctggtacaaagcatttctgcttccaagagaaataacattgctacaaaaaactggcacattattctgtgaaaaaagacatgagtttttagttgtgttctacagctagttcccgacccaatgcttcacatatccacacgaaagtaaaaggcaggtaagacaaaaagggctgtagttttttctgaaataactcaagtcttcaaaatatagcttttatattctttgtaaagtgggattagcatattgcaactgaagggtgttctaacaaacaaaaattccagtctggataataattctatggtagacaaaagaattctcagcctcttgggtttcctggaattctttgcttcatgctctcctcttccactatgcagctaaggtagtttaggaattaagatgtcaccccttggccatccccctttagaacgtatcttaatgtgaacataaattgttcttcatgatgcttaaaagcttacatataattttcattcttagaaaaacgccacattttggatcctggatttttctgaatatcatgattgaaaaaaacaaaacaaaaaatgaacccaaatcaaagtgtggttaaacttatatgagaaagatttttcaaccagatggtcattcaaaaaagttggagctgtaagtgctggcgactgaggacacagggttaattcctcg

SEQ ID NO: 158612 - DNA, 1000 bp, Homo Sapiens
tttttttttatgtagaaaagcaatttattccattttaagcacttacacagttagtcatggagagtaacaggcctgctggtgaaacaggtcacccaaaatggagatggcatcaaactagtggtcaaggactaactcctaaaaaaaaaaagcaactcttatcaaggattaatttaatttttaaaacaaatacaagttattgattcactcttctcaacttgacagtctacctgtggtataactgtcaggtaaaaacatacatctttacaacttggtggtcccaagttaaaaaaaaaaaaaaaaaaccaacaacaaaaaaaaaaacaccatttcacagacaggaaataaacaacatgaaaacagctcaagaaatacactaacgagcaaaaatatatgaatatatggggaaagaggaacgtgttgttttgacttaactgaagaaaccaagaggaaactggtctacgtatgaaaatgtgcatcctggaaagtcaggtgtcaagattttcgagtaggaatctatacgacttgaactccccctatttcctgaataaaagtgacatctttcagtatttatacttcatggctcagacacctacctcatttggctctattccttactcactctagcctttacttaaatgagtctgaaaaacttggggatatagcataagaagaaaaataatcacacataatattcccctttctgtagctactttagacctgggttactagaaaattcctgaagaaaatttcaacgttaagtctgtggctttgttgaatcaagcccccctattaatatttagaaaaacccacggtttgggctaatagcattatcggtggtacctattatatagagggatagctgaataaagtctgtctcaaaaccagtgttaaatcactctcagggttgagaagaaaaaaggggagtctaaaatcacaacaagtaaagacatatctaggacccttgtccttctggatccacgcttccttcagggtcttcatc

SEQ ID NO: 158613 - DNA, 1000 bp, Homo Sapiens
tttttttttttttttttttgaggtttgcagctattttatttacaagtatacatttaacacaatgaaataaacactgatatactgaagcctagttaatagtagtgtaacaatatgcatcattttgatgattacattattttaaacaacaaactacactgaaaaattaatgccgataaaattcttggtcataatattaagaaatacaatatataaattgaaaatatgattgcttaaaatttgaaaatggaagtgaactcatttggacagactcagagttaacataatctgaagggaggggagctctgacccaaatgatatctttcaggttaacagaagaaaaaagaagcatagtttatcttcaaggagaacgggcagtttgcttcttcaggtagaatatattcccagtgtcctcaggctttgcagcagaatcacatcaccgagcatgaagacttgccttgtgaagctgccccgtccattttttctgcctccaaaattatccttcgaaaaacatccacagcagtctgattttctttagcagaagattccaaaaaagctgcattccaagattctgccaaagctttcccttcttcataactgatcaccctttccatatgcaggtctttcttattcccaaccaacataataggtatttgtactttccccaccatatccaacaatttgccatggataactttaatcacttcaaaacttttgattgatgtaacagaatacacaagaatatagccattaatatctatggagtatgtctgaggaaagatagaatattcatcttgcccggctgtgtctacaagttgaagatgatattcttgtccatttactgtgatcaactttgtaaaagtgttttctatggttggatcgtaggagtccacaaattggccttcaacaaattgaatcgtcaatgaggatttccccacagaccggtagcccaggatcgcgatcttccgggacttggactgcggcatcttggcggcctcctcag

SEQ ID NO: 158614 - DNA, 595 bp, Homo Sapiens
tttcatgttttaaaaaagtgacattgctttattactattggcaggtggggcctgcatgaggtggttagtgtgctcaggggatgggtgggctgtggagatgatgacagaaaggctggaaggaaagggggtgggtttgaaggccagggccaaggggtcctcaggtccgcttctgggaagggacagccttgaggaaggagtcatggcaagccatagctaggccaccaatcagattaagaaattctgagaaatctagctgaccatcactgttggtgtccagtttcttcatcatgcggtcaaggacaccagggtccttctggttctttgtgaaggcagctagttctgtattcatgaagcttaggaactctgtcttggagagagtgtagttataaccatcctttccagcatacttctggaagacagcaatcagggactcgatgcaccgctcagtctctgtagggctggagatttttgccatgttggagctgagcgaggcgcgggaggctgtggctgggagcggcgctgagagctctgtgcgcgcggcgtgcgggtctggagcctctcctcaacccacgcccttcccggcccagccttgccc

SEQ ID NO: 158615 - DNA, 1000 bp, Homo Sapiens
ttttttttttttttttttttttttttggaggaatttgccaaatattttatttcaaaatttagcctctgatatcataaccacaagatattttaaatcaacagtttctaagcatactaccacagtttttatgacctctccatcatcttgtggtttctagagattgacagatactatgtttgttttatagatatggtaattaatgaaacaactttaaattgtcttccattctttcttcctcagttcatttctttttgtcttcccactgatagtctttggcagctcttgaataaattctacctttctgggatatttgtaaggtgctgtagtttttttaacatgctcctgaatctcctttattagttgttcttgatcatgtgacttgtaatcaggatttagaacgacaaaagcctttactacctctcctctgatggggtctgggctgctgacaacagctgactctgcaactgaagggtgttcattcagggcattttctacctcaaatggtccaattcgatagccagaggataatatgacatcatctgctcttgcaacaaaccagaaatacccatctttatccatatatcctctgtccccagtgatatagaaattgcctcgtagagttgaagctgtttttgaaggattatctacgtaatgagtaaaaaggccaaatggtcggttgggtagaacttgaatgccaatatctccttcttgtccaggaggtagaacattgccatttacatctacaatcttaacatcgaaagcaggagaaggttttcccattgagccaggtttaattttcattcccttaaaatttccacagattagcaccgtttcagtctgtccatatccttcgtagatatccaggcccgtcttgtttctccatttttcagtcacgtcaggggtaattggttccccagcactcacacagtgctttaagcttttaaacttatagctggttatatcattctgtacaagcattcggtatacagttggtgctgaa

SEQ ID NO: 158616 - DNA, 1000 bp, Homo Sapiens
tttttttttttttttttttaatataaaacaatataatcacaataccagaatatggaactctacagtttatttcctatgggttactgcaggtatcaattttcctcgactgtgctattcacaactttgttaagtccaaaaatatgaaaccaaagtggtaggaaacttaagacttagcactttcactaaatggcatacatcgaagggcatcaattcaagagcaaaaatggttgaactcaccatacctacctatgtggtcattccagccttagagccgtccaggttactgagctccctgtaggaaaggccaggcctgaaagccaaggcgttttggatattctactgtgggccatgagtaaaaggggattttcaaagagaaaatttttttcagtcgagcaggaaggcctggtgccaggaggctttactgagaggaagcacttagatttaacaattatagacacaccattaggggagttaaaaatgtacagcagtgacatgttctactccaatcacttgtgctacggctaccaaacatgtacaaaagacttctcgggtagttccagctgtggccatagccagttaggaccttgagtgggacctagatctagatcgggagggcgatctggaagcagacctggatctagacttggaccgagatcgggtttttgaagctgactttgatctggagcgtgattctgatggaaggtttggtttcgatttggaattggatctcgacctggaccgggtctcctgattggtgccagcattctcactctctcctcgaccttccctctggctggattcagacttggcatgttcccgctcctttgacacggagcgggatggagatctggactgggagcggtcagtgtcttccttcttcttcttcttgctgctgcccgccttgctgtctcgcttgctgcctcgctttctgctcctctcactcttgctgcggctgcgactgcgactgcggctctcctctctgcttctcttcctgcccttc

SEQ ID NO: 158617 - DNA, 1000 bp, Homo Sapiens
ttttttttttttttttaaagtgaaaaacagatgcttttatttattgtattggaaacaacttaataatttgcatctctacatatagaaagctgctttgaataactgggaaaacaattattgcataggaaaacatatgcaaactagcatcattgtctctagactaggttcttcttattgatctcacgtcatcacaaagcagcaacagcagcttctagaaaatggagaaacagtaaagtcctgcaatgaagctataattaaggttgaaccatacattccgctaatcctgcaactttcctacaatcatttttctgcctatacaatcctgcttcttataggatgaacacctagcaaaacaatataaatttgctgaaaaacaaaattacaaacaaatgaaagaacttaacagaacacacagcattaaaaggactaggaagagcaaggtcttaatacccagtacaataaagccaagaattttctaatgctgaccagtctgaagactgaaattaaatatcagttctttttacttctctaggagtgattctagctcctcttgcaaagagctgagttgctccttttctcggtcttccttttgtttgagctcatccagtacagcctgaaatctgttcttgagagccagattttccactttcatgatgagatcctcttgtcgttttgccctgtcctgggtctcttggagcttgcctttcatgttgtcaatctgcttctgaattcccataaccagctgattggttccttcattttcctggtgctgttcatctgattcatttagcttgtcctgtagctgtctctccagatcttcctccgtgtcaatgatgtttatatcttcttcatcttgatgctgggtctcatcttcatcctcactgctgctgctgaggtcattgaatatctcccgaagctcatcatgttctaatgagtcatggccctgcctgtgaccagacattcctggagaagagatatccaggccttgattttctgcctc

SEQ ID NO: 158618 - DNA, 1000 bp, Homo Sapiens
ttctctcttaaaaaatccattgttttatttccacaattgcttaaaatattttattaaaggaagaatacaatttaacaaaaagtgtttattaaaggggaaaatatatagtaatatgtttaaggcacatggcaaacttttggcattaaattgcaagaaaaaagaaatacaaattatcacaataaatttcagaatctgtttctttagtccaaatagttttttttaaaaaagtctgaacagcagcagcagttcactaaggaaggcacatcatggcttggtatctccgtgcgagagcagctgctgcctggtgtactcccagatcagcagggctccactcacatggacattcagggagcggataatgccctgttgaggaatttccacacaaacgtccaactgttggatcagatttgctggaattccctcacgttcatttcccaacaagagcagagatttctcaggaaagcaatattgggttaggtctaaacttttggcagtttgttccactccaatgatggtataaccttctgttttcttctgctgcagataatcaattagctgaggtggttttacctccactagaggaagccactgttctgcagagacactgaggtgctgaaactgtttgtcgctgatacactgaaggctgccaacaacgagcactgaagccccaaatacctcacaggtcctgcacagtcctcctaaattggtcggtttgtcgatgagcgaggccacaacgatgagtctactaattgactttccaagtctggcagcacgatcctgaaacaggagctccaggtctaagtcggaaacacgactgttccacgggataatcttcttctgaacgtcggtccactctgcttggttatctgcttcaaccaaattagtacctatgtcttgctgagaccagtcacctggttttagtttactaagttgagtttgagaaaggtaccactgaaatcccgcagctaaaggaacatcagtgaatctggtaaatttatca

SEQ ID NO: 158619 - DNA, 1000 bp, Homo Sapiens
ttttttttttttaatatcaaaatagagcaatttattcaagacactgaatatgatctgttgattctctcttgaaacaaatgagctacaacacacaaggtgattttttttttttttcttcaaagagcgtgagggtgagtacaggtggcggggggaatgaaaaggcggtcgctgtcatctgaacagaatcggaaaaatgccaatagagaacatgtctggctgtacgtctgacacagacaataaaaactgcacaagccagaatgcaaaacttcagtgagtggcggaaggaacatttctgcatttgacaagaaacataagctttttttttttctttttttaaatggcggaacaaaaggttaaaaaacagaaaagcaacaagaacaaagcagacccttacatttgacaaagtgcacttcacttggctccatgatctatttcttagaaagactaaacaaaagtcaagtcctacggtgtcgcgaggggtcagagggtttcaccctgtaacgtccggcccttttggtcccccttggggcagcatccctttcccaggtgtgtgctggacctgactctcggtcactgtgaacccgaccaaacactctaggaaggtctgtcatgctatgtctgctttcaaggtcacgtttggtcactaagacttaggcattcctcaccatgttttaagagctgtaaacaacgttgaacaataacattccacaggccatttcttgattacagggatgactctaccaacatgccagcagcagagagggtgagtagtggtgtgcaaatgctggaggctctgaaaacggctgtccatggtgttgtcccgctgagaacggggatggatatgaagggtgctagctgcatctcgcgcttggttttgcttgcggccgcaggctggggaagccagggatggagcctggggtccgaggcctcccagcccaggtttctacctaacaattccgacatggttcacattcatcaagactaaagccatccctcggga

SEQ ID NO: 158620 - DNA, 1000 bp, Homo Sapiens
tttttttttttttttttttttttatgaatatagatacccatttttatataagaaaaaaattacagggctccatatcacaaaatttaagatcttcctgttaaacatcacacaattcccatcatcattatgccctacatacactctaaattatgtagagtttctactgatatttaacaacaacaaggtccagaaatttaactaaaacagctgcagaactgcatattgggcagtaatctgtgtgtaccacaagagcttgggccaacacagagggccaggattctgcctccatggcctggactcctccacacacagtcagacgagtcaggttcttgcagaccttcaaatctccattcatatcccccttcaagagggccgttttcagaggtgaaggaaggagcagccactgggcacgaaacgccgcactcctacttcagtatgatatgatagctatcattggtttctgctttcattgtgtccagaataaaacatgcttcttcctgaaagttctgtatcatctcatcactgatgagcacatgaattcctgttggcccctgcttgtaaatctggctgatctggcaaggggaaatgctgaaaagctgagcaattttttctgtcaattcaacagctgttagttcttctagatagatagcatggtaaacgaagaaagtaccatttgagtctccatcctcatgcttctgctgctgttgctgctgctgttgttgctgctccctcaactgcagtgattcctgacaaacataaatggttaaccttggacgcaccatccggccttttaatgcattaaaaagtctgattccatctgcagggccacagatttggatcacatcatctctagttaatttcaataaatctgcccctgagaagtttgtgaaaagccttgtgaatgtagaaaaacgatttcgatgcaaccactgctgagcttcctgaggtgtggttgttggtaagaggttatctgtgactggagggggtggctctggctggt

SEQ ID NO: 158621 - DNA, 1000 bp, Homo Sapiens
cccagttactacaaccaaagagattcaacatttattttatcataaaagttcagcaaataaaactatatacaagatccatgcaaggaatccagttacacacaagacacatttaaaacctggttaaaacacaatctccacgatagcagggaataaaaccagtaagaccaagtatctttagtgagaaacataatcgtgtttatattttggatgctgcttgaatccaattctctccccaacaatgaggcactggatcacccactcttgtgacaccacaggcagctgcaatgcttcagcacacttcagcaccgaggctgggcatgaggggtccgtcaccaccacatcaaatacccctaaagcaatatctttgttatgggcacttgaatggtgctgcttcacagaggctgcaccaccagtcatgaggatctcagaccagagctccaggaagttctgctgttggtctgataccaagagtaccttcagattctggaaaggattttcacggggttgccagtccagaattctttgctcctcaaggctgtacccagctggcaacagataattacggtagttctggagctggttggcatggcaactatcatggacccagacatgagacacacaaggaatcccactggcaaggcacaggaagtacttccgggttcgacaatgctgatccgcaattagaagacactggtaagctgtgttacactgggcttcattgaaatcttcaaggatatagccagctcctgctcgaagctgggattctgtatactgcttgttgaaaggaggaatttccaaaaattcctcctcttcttcactgcttcctgtaggaccatctggcagtttggagcggctggccaacttgtcactggttgtggccatggtaaggagaaatgcgtagcccagaaacaaggtcttgttgagaggcaaaggccctctctgctcttccagggcagagggttcaccggtgttgtctccactctcacaggggctcacaaac

SEQ ID NO: 158622 - DNA, 1000 bp, Homo Sapiens
ttttttcatgttagacaatttagtcaccttcataggttttgacagaattagggatgcagaattgctcctgctgaggcagtgggagctcccctcaagctgaaagcgtgaagaggtgaggaggcagctatctacaggccctcagggacagctctttgtctttccccaaatcaagcatacaactacaaagtcctgctgctccacttccaagtcaaacttaataattcttaggtaactctaaataaatcttaagtaacagagtattctctgatgaggctcgtccctgtcagtgccagtaactaaaagccaagatgttgcaaatgattcttttattattttccaatcagccaacagtcctcacttagggctttcttccctttttacgcaatgactgtccttctccagagaaagcgacgaatctgcctccagcttcatcctcttcaacctttttgacaaggggacgtgaatttctgatgaaagttatcttaccaagtttaaattcataattgggaattcctcttttaatatctccaggcttgattggggaggggctgggctctacccctttcttctttccatccagtctattgccagatccagagaaagcgcggaagcccagctctccagcatagccactgtggtcggcttcaccttctgtcgactcctcatgctggacttgtctttcgggttctttgtagcccaggggagcatcaaagtccacgttcatgtcacactcaatgatggacactgccttgtcgggtttggtctccatcacacgcagttcgtagatcttttcattatagttgatggcaatcacatccccggtggtcagacaggcaaagttcctaagtgcgttttctaatacggctttggggttggtgatgtccaggaagtcagggctctgaggttggaatttggagtaggtggccacttgaaggttgacgctctccacctggaccaggccgccttcttccaagagtaagttctgcatcatccagtgtgg

SEQ ID NO: 158623 - DNA, 1000 bp, Homo Sapiens
ttttttttttttttttttttttttttttttatgttccaaatgtgatgggtttattttattttactatgatgcaaaaccaaagattccactatagcacagagaccagtatattacaaggtcatgaaaaaatggtgtgggacatgcaggacgtgatgtacaaactggtgggtcagatcgtctcctctaacatgacgctacactgtcgctgaggaacacatttaataacacttcagaactgaactgaaacgtggcacaaacatgacaacttccaggcatgccttcaagcatctccctcaggagggattcgcaacccctagacttcagtgtggggaggattacaattctttggaagaataaaaagttcacacttttgaaatttcacagaagaattttaaggccaaaacatagtgggttcatttctcttcacttccagggacaaatctgatgctttcctcaaaccacattaagcttccagttcaaatcccaagccaaccttgtgacctcctgcactgaagttcttcccatcgattaaagctgataaagtcaatttgactcctggtcgaagggtctgagtataacccagtccaatcaggctggcattatttactttagcagagagagaagttctacaatccagcatgtacttagcagcaatgccaaaacgggtgttgttactcccagctgtccaagcaaggtttatggatgtttcaatcttctcattcaccttctggtagatagaacctccaaattcagtgccatcgttcacatgtgtgtgcagctggaagtccgcagccttgtaacccagggcgaaattattctgtgacagtttggatttggctgtgtcaaaactcatctgatagccagcaagccacccttcgaaggccaacacagcccagccatagatggttggtccagaaaaatctatatcaacattactgccaacactaaaacaatcccgtttataggaggccttcaatttcccactcttctttcctgtgtt

SEQ ID NO: 158624 - DNA, 1000 bp, Homo Sapiens
tttttttttttttttctttagaaaagctcgactttaatggttcagatagttttacaatgaaaataggtacccaaagactgtcttaaatgtccacaactatacaaaagatgaatacaaaactcccaggcaggcacaggcaggggacaaggcccaccgtctcccacgctctggtgtggtcgggtgtccctgccgcacccccagtaccaccgtgccaccttggtcccctcaaccctgggggtaggagggcactgccccagcgagggaaaatagaaaagattttaaaaagtaagagtctaacaaacaggcagagctgtcactaaaattaggaagttgtaacttttttggttaatttacttactacattcaaaaatgtaacgttgagtccaaaaagtgtctttaaatcacacaaaaaagaacccatattaaaattttaaaaataagccccaaataccccagagaaatgcatccagaacttaaaacaggctgggtcagcagcagggcggcggccgggggacctcgggggccaggtgtccgccatccggttactttaagctggcaaagccatcgtcccgtggacccccacaagtgacggccagctgtgaggcaggtggttctaggacacattggtcatgggcttgtacttcttgaagcgcgtccactggcccgtggcatagttcatctcaaacactgtgtccaccagcatggttgtgctaccctggccgtccgccttgggcaggtcctccgtgtgctcgctcagcttgatctggatcacgtccccctgctcctggcacgggttctctcgggagccggccatgaagcccaggatgagggccttctcgggccgcgtgactttgttggccgtcttgaacatctcctgggcagcgaacatctgctctctcgtgagggacaggttcttcttaggctgctgctgagcaggggcctgggtctgcggggccaccatggcaaccgggggtgtctgagtggtaggggcgacagccgg

SEQ ID NO: 158625 - DNA, 1000 bp, Homo Sapiens
tttttttttttttttttttgttaaatgagaactcaattttatttacatctatttatttccattcagtgtatcacatcttcaggataggtaataacagtgtgaagggtgtgctcattttcttcagctgtgagtagaggagtcttcccgagagtagcagttgttgatccaaatgattgaagccttcaggtaagggaataactgctgcaggaattctttcttgaagaatttaagctgtttggtaggaattctgtaactacatacctttgaaacactattcacattcaaataaacgcttgttttctagccaggcacaggctcaattagtttttcaaactctagccaaggcagtatttcatttgggaaatcatgcaacagaactgctcaattcttaacttctcctgctgttaacatttacacttagactgccagcaacagttaacttaaattttggtctcaagggaacaaaaaaaaattgcattcagaatttaatatagtattttaaaactaattttagcctgtaagtcattatgagcaatagtaacttttatacctcctcatcttgtctgataatatattctatatgctgtcaatctgattatatagtctatatgctagaagttgctgattttcattctgccaccaagaaaactgtacttttatttatgggaaaaggatttaaatactcctagatacttaaaatttttttaatctaaaagttgattttctcccaagaacaattttgtttgctttctacaaagttttaagtttaataaaatgccggtaatcaccactgttttcctccccaaaataaatgctctgatccatattatattagagtgatactgtcacttagtattgatatctttaatattttttacatcatgagacattgttatgatcttacctgattgttatctcaaggtgagctaatcatctttatttgccttaaaaaatactgtactggctggatatttaatcttgttagtttagttatacactt

SEQ ID NO: 158626 - DNA, 1000 bp, Homo Sapiens
tttttttttttttttttttttcacagtccacatttttatttccccaaaagatgtttttcggaaaggtccctttcccttaccatagctagcaccataccccaagaccaggatgaaataagccagggaaaggagacacatcttattcccttctgggttagtctttgagagggaagtggccaaacttttgtcaccgttccatggtctgaggcttagtgtcttcagaggtttcttcctgtccctgctgcagctgccacatgtcagcatacaccccacctcgggacaacagagcctcgtgtcgtcccctctccacgatgcagccatccttgatgacgaggatctggtcagcattgaccacagttgagagcctgtgtgccactacgatggtggtgcggttggcacagactttggccagagaagcctggatggccctctcattagatgtatccagcgctgacgttgcctcatccagcagaatgatgcccggagccttgaggatggtgcgggcaatggcgacgcgctgcttctccccgccgctcagcttcagtccccgctcgcccacctgtgtcctgtacccttcagggaaagccataatggcatcatggatgcctgcagcctgagcagcagcctccacctcatcattcccagctgtgacacggccgtaacggatattgtcggcgatggtgtcattaaagaggacagtgtcttggggcacaactccaatgtgagaccggagagaggcctgggtcacctgtgaaatgtcctgcccatctattcggatgcagccagagctgatgtcgtagaagcgaaacagcaggcgcaaaattgtgctcttccctgccccagatgggcccaccagggcaagtgtctgtccaggcatcacagtgaaagacacgtcctgcagagtctcccgcccatcggcatagctgaagtgcacgttctcaaactcaatacggcccttctgaaagcgaaggggccctgctccaggaaggtccttcacttc

SEQ ID NO: 158627 - DNA, 1000 bp, Homo Sapiens
ttttttttttttttttttttttaccagagaaggaaagagagctttgtttttttttgtacatagagggggaaaaaattccctgtccctcccgttccagggagagctggtcgctgagggaggaggaagagccacggcaagaaccctgccaggtctgtgctgggcacaaccaccaccacataaggcacccacggaaagtgcagctcagaaggcaggcgagagaaaggctgagggggagagaagagaggaggactaattcccctggaaggctccttgggcagcagatgaagcagctctgtggaaggttctgctgctgaagatgccctgggaaaactcctcctgggcctgctggaagctggcccctgtccgtcggtagagggagtgcacccgctgcaggaggaagactgagagcacggcacagagggtgaagaagccagccaccaccatcatgatgactgatatggccagggaatgattatccagtgtagacagggctgcaatccaaccgctgtcccccaggccagggatgccaaccaactggatgatgtagatccctatttgacaaaaaaatacaaagaagaacacaaagaagctgaaagagttgtcggacctaaaggccttatagatgggtcggtaccaacaaaggaaggcacagggagtgaagatcagaaaccacaggatggagaggccaaagtccactcccttggagctgttgcccgagaaccaggccaggcaggcaagcaggttcagaaacagagtcactgaatgcaacatccacagatagtagagcatcttgcatatccgctggtagtcggcagggatctctgtggagaaatcctgatagaagcagggcttcacagggcaccacgagggcagagggggccagttgttctgtctcacatgcaagttggctacagtgttctgcagctcccgctccttgcgttccagctcggcagctttcctgtccagttcttcctgctgccggagcaggcctgcctgggct

SEQ ID NO: 158628 - DNA, 1000 bp, Homo Sapiens
tttttttttttttttttttttggttgtctctaatatttatttgtctggttataaaattaatatgtgaggagcattggatttggtgagaacgttttgaaccctagctgtcacgtgccacctgcgggatctagaccagtgacttctcagaactgccatttcctcatctggtagacaggatggtaagccctgtcttgctcactccacgtatggcagtgcagatgaaatgagatcacagaggggaagcaattggcaggctggaaagtgctgacaaatggaaggggttgtgtcaccaccctcagctgaggtagtaccaaggtccaagctcctgcccctccccctccccagcccctaaatacacacacgaatggagggccacttgcagccttggtctgatggaattgggggcaaggccacacatcttcctcaagcttggccagatggggcctcactggggcccttccagaatcgggcatcggctgtggccagctgtgtgaggatctcctccaactcgggtccatcctctgggaaacgctcagagaaggatcggatgaggccagcagctgacgcctcgtattccagaagctgcacgtctgagccttcaaggcgagtgttgggctgaacaatgagcttccgagattccttacgcagcagcaccgtgtccctgagggtgaggaagcactcggggggcgcatcagtgaccgttgcatacccctcgtacagggcccgccctccggccacatcccctgtggacttcagcacctgaagtctccgcaggaagcgctctagagcaggcttgcccacagaccggatcttgctgcggtcgaggcggacccgggcatctgggcgcccatcggagcctgtggtgggagtgatggtaacgagtccctcgccagcctccagcaagactctcaggatcacaaaccgggcctgcatatgggcctgtcgccagttgaaggcctcaggtgtgtagaactccagagcgagcagcccggcccgaacc

SEQ ID NO: 158629 - DNA, 1000 bp, Homo Sapiens
ttttttttttttttttttctttcttacaaatcacatatatttacattgtggatctgggatacacttatcacagtaggagctgctcaaatcaatctgaatgctacgcaatctgggaacctccccataactgtttgagccagcatttcagattatagataagctgtttccagctggactgggtttggaaagttcactctaaagaatgaagtcacctgttgtcactgtcctcctctccaggattccttttggggccaggtaccatcctgtggctccttaaggaggcttctctctttaattctccatgaggcatccagggtggtctgggctatgggaagaacccttcaacttgggagtagacaggtgctccaattcatagtgcccattctcagaggccttgtgtgtgagtttctccttcatgccttccttctggctcttcttgtgctccataatctgctggagctggtgcccagcatagtctggcttggtggtcagcgggccagccggcacagctacaccaaggacatctgacaccatgtaggggcgcagccagcccaccaagggagtgcttccggggctgtagtgggtctgtttgtggtagaagagaagtccatctacctcaaaagggaaatccatagatagcacatcacacaggctttcgggagtgcaagggaagttctttagccccacaaatttaaaaggattaagcttggttttctctcccagtccttcttcttctggtaactttgaatgcatccagtagaatcggaaatcagtctggcaatcataaaaagggtgtccccgccagcacatcacatccagaacgtagtaggtctggtttacctcattgtaaatgcaatctagaatggtgtagtcttttgctgttgagtttcgcctgttgcctcctggcagaagtgaagaaaacctgttgacacagtagccactcttggtgtaggcactggtagaacccctggaggccacgataagggctctttttccaaca

SEQ ID NO: 158630 - DNA, 1000 bp, Homo Sapiens
ttttttttttttttttttttcagaaagacccaaaacctttattgtccctaccagggagccagtgcttccagcccacaccccacaccccaggagcttcagcaaggtctctgcttgggaggatgctgcccagaactgcagccagggccaccggtgccacctgcaggcttcctcccattccagctaggcagtggccaggctgccccctgaccagccccactgggaaggcagcaggatggcagtggccagtggggtcaggctgggccatctccctctcagacctcagcacctgggtcctcggggctgctgctcttgttccggaagtggtctcgactccgcttcctgctgccatggaagccaacagtttccaccggcgggagacctggcacagacccactgtggacagaccctgacagtgcctccacctcctgcaggcctccatggtggctgccccactcctcagcctctgggctcccgggcccggccagatgggccagctccacagggccctcgcccctgtctgtggcaggattcccaaggccgcccctgcctggctctcccaccttccccaggaccctcttcctctcgtgtctggcttcgacccctcggactggtttggtgaagatgaccctcccctccccacagctggagggatcctggttgaaggaggacacgcagtcagtgggggcagccaggctctgggagcccaggaaggccagggcggtggcctgattgctctgctcgctgacctcggtcacatcttccaggctgtacttggtccagcgctcggggtgtgccacgtagtcggggaccggaggcacccttggtgaggcagggctccgatgggccctgcccaggccttccactggagaccggcctgagggcgctaggggccgcttgaagcctccgttgtcactcatgctggtgtgggccacagaggatggagcccgtctggccgccccctccaggcagtcaaagatgtcacggctgcgctgggagaagg

SEQ ID NO: 158631 - DNA, 1000 bp, Homo Sapiens
ttttttttttttttttaaaaaataaaaatgatttttatttagttttttggaaatataacaaaataattggcaaaaaccaaaccaaaacagaaccaaaaaaatgacatgttatatgagtgatcatctccaagcacaacagcatttattaatgaatataaaaaataaattttactttttttttttttgagacggagtcttgctctgtctcccaggctggagtgccgtggcgcgatctcggctcactgcaagctctgcctcctgggttttacaccattctcctgcctcagcctccccagtagctgggactacaggtgtgcaccacctacgcccagctaatatttttttgtatttttagtagagacagggtttcaccgtgttagccaggatggccttgatctcctgacctcgtgatcggcccgcctcggcctcccaaagtgttgggattacaggcgtgagccactgtgcccggccaaattttactatttttatttgctttttcccctagatttgactacatggatagttttagaagcttgagttcctaagataattccatagctacactggctcctacaatgtgactgagtgaggttagggaaatatccttggggattctgaacaactagacccttagaaacttaaaaataacaggtgctttcattaggatccttctaacatggaaaaaatacagccattgtccattaaaatacaatccaatttgggtactcttcaggttttctaagttctccatctgaataataagactaggccaccatcttttctggcaacccagcctacagccactgccatcttcctaactagcagcctcctaagctgcactaaaactgggattaacacaactgaagataacatttttgacctttcttcctagaagtcaaagggctcttcaggtaggaaaggtcaggaggttttgcatcaagcttgccttcacactcactattagtagaagggctgtgaaatctacccatcacacacctgt

SEQ ID NO: 158632 - DNA, 1000 bp, Homo Sapiens
gaattcctttttttttaacaagaaaacttctaccttcaatgttttgcacagattcacaggagagggaaaaaaaatgctacttccaagaataaccactttaaattaactgatgatctagctggagcctgggtgaattcttcaaatgtagcccacttgggacaagagccagggtggatggcgtatcccctgaagtaattgttatgccctagtgttattttcaaggcctcacacagacttgcagatattctcaaggcacttttgctttaaggtgtgcgagtgggacacccttttcaccctctgacagatatatgttgcattcttcagaaaccaggaatagtattcaagacagtatctcatgtcctctgtcctgggactcctctggctcatgcagaggcattgctggaagaattggcacagctccatcaggcatgggttgagcctctgaatagccagggtgagaggagcagctgccatagctcccaccttgaagagtggctgaggacaccttgaaacttgatggggtcttgggaccaggactggctcttcaccagcagtgaatggccactctgcagagagatcacctgtttgtggatatctgggggctgttgccttggttggactcggagtctgtgtgccatgggtgaatgctcccgaggtagggctggcctgggatgggctgccaggtgtggccattatctcagcagcaggcgccaaaaggcttgtagtgttcatggcttcctcggtccctgcagtagtcggtggggaagaacgagtttcccagagagaccctccaggttttttctcactgatggtctgagcccagggcacggacgatatggaagcccacgtctgtctgtcagctgtcaaccactgagttctggccaccctcctggtagccaaggctgggagagtgtgggaggcactgaaccatgtggctgtggccctggctggaagctcaggaggcctgcctgtgttcagggtctcctctgtttctgaagga

SEQ ID NO: 158633 - DNA, 1000 bp, Homo Sapiens
ttttttttttttttttttttattcaacactgacattttattttctgaagttttatcatttttacaaaacaaaacaaaatgaaacaaaaagcaggtatcaaaaacagcaaagagtttatagaatttctgcaccagtttgcacataagtcagtgattacaaaactggcatccaatgtaaatactaagcacaagctcacttccctcttggtcaggtggtttgttttagagctactcgatatttataactttttataagcaccggtcattttttgagaactgatttggtttgtccaacaaagtaaacaattttttgctgtgtggcagtttctttttttagaaaacactgagctaaaacacagaatgtgtatttgtttggatctgaaccaaatcttttgagatcccaactaccctgaagaacactgaagacatttacggggcatattaaatggtatcttaaatactagttgtatacctcataatgtctaaggcagctattatatttctaaagaaagtagcatttcattcagaggctgcccagagtttaaattacaccatagtttttctttctttctgcaaatcattctttctgatttgcagttttttccaaacagagccatattagtggaacaaaagtttgatgttcatgcccaacaagctctgatattttatggatacatttgtataaagcaagacttcttgctctgaaccctgggtgaccacaaataaattgaggggccatgattattggatgctgagagaaagtagcatacttaaacccacagtacagataatcaggaggcaagcaaaaacaaagctataacttagcagtggtattcacccaccacttattccaaaaacatattttgcttattaaataagggaaatatggtccagttttgcaatgttaatagctgccagtctctcatattttttataaatatcatttcctgactagcaatgagctaggaaactggcctcaaattctgaccaaatctctcagt

SEQ ID NO: 158634 - DNA, 1000 bp, Homo Sapiens
ttttttttttttttttttggaactgaaatatcccccaaataatgaaaaataatatgttgggggctgatacagagtttattgaattagatttttctatttacaactgagatcacatctacatactattttgctagtctacatgggtacattatttccaacaagcttaagacttaccatgaatgggctcattcatacaaaaacacactcacactaattcttttaaaacagtagtgcatacattatactcctcctataaagccaactttgattaaaaaccactagtttcaaagctcagtctctgattttgaagatgaaccaagatatacgccatatgatcctacaatctattttagtcattttgtacagctgctatcttattggactacagtaaatattttttaaaaggacaccaatgaggggcaccatctggtgttaaccttaaccagaaagctggtttcctcctcctccccgcaaaaacctttggccaagagttctccactgtgaagactgaaaggacctggtgacatttcggcatcagtcctgttaccacttggaggtaacagaagcaggctcgtgtcctcctttaattctaccacactacatgactcgcaattggttctgaaattagaacgttcaccatcgtacttaaaatcttaggggcatgaagagtcagctagaacaaggaaaaagaaagtcgcaggtagtaggtaagtaggtgggcacatgaaaagccaagctgctctgtccaacaccagtgtacatgtgctttaactaaatgaactccagaggccaacagcagcagacctgctcaattcaccttccaaatcagaacaagaccaaaaagctcaggcttgagttgtcaactatgcataggttccgccagtgatgaggagctcgtaagcaggatctctactccttctgcacaacacgatgcaagcacacagcatgcccagcagctgaatagctgcaaatgccagtgcggcccagatcacatgcatca

SEQ ID NO: 158635 - DNA, 1000 bp, Homo Sapiens
tttttttttttttttttttttttttttttgtgcaaacaaggaaaaaattatttttattatacaactatttaataattttacccatgcattctcggtctgaagaggtttgggaaatattcctttttgtaatgatgtccagagctaaaagtaaatattcctcctgggccaaaagtctctggaacctattcagtttctgctgcctcttcaccttctccacattcaaaccgcacaaagtctactaccgacaccccctgaggctgcacatactgccccaaggtaatggagggatccagcaaatacggctgggacagcatcttagtctctgcctctcccccaggctcatcgtccagggagccaacagagaggggggccatgcccaccacatgctgcccaaggcggcggccaacgtcttcaaggtttgttttctgttcagacgtctcacagatgaccagggccccatacttccccagcaccagcttgtgaagtgagggactctgcattgctccgtggacataagagccaacgtagaacccagatggcaccttcacccatgcagctcgtttaagaatcatgttttctcccagttttccaattgctaaagccaactgatccttgagtgagccttctctgtcaggcccagctggaagtccagaaagctcagaggaattcaagaaaccctcaagtgatccacctgcttcagcctcccaaagtgctaggtttacaggcgtgagccactgcactttactgtatgcagagggttgatcctttagggtctgacaatgcatcatggttccaagggctacttgctggaccaacagttgaaattttaaatttctagaaacaaaatctgtctcacagtttacctctactaatacagttgtgtttccttcctgcaacagcccaatcaggccttctttggtcttcctcccttggagcttggcagctttgctccagccctccttctgggcctccttgtggagccagatctctgcctgtttga

SEQ ID NO: 158636 - DNA, 1000 bp, Homo Sapiens
tttttttttttttttttttaacattgtaacaggtttatgcattttgaagtgccttctacacatccacccagaggctctgctgatttcacttatgcccaggctataaaatgcctttctctcatcccccagtagagcactgggatcaccactaggcctagggggcatatcaagggtttaatagactgggggaatgggcaacagaactggctaccttagaggctctggaatgccccccacccatccacccaccaatggaaggaaagtcaggcatcgcctaaaaggagtggtccctatctagccccaagtctggagcagaaagggcaggtccattctggcccaagtgacattgttagatcctgtcccctcccccaatcactgctgcttgccagggtgcctcttcacagttcccatgtggcagcagtagtggcagaggcagaagtggacttattgtagattgcagtacagatacatggacacaatcatggcagccagctcgaggcccccaattccagctgccacaccacccacggtgactgcattagttcggatgtcatacaaaagctgattgaagcaaccctctactttttggtcgtgagccttttgcttggtgcaggtttcattggctgtgttggtgacgttgtcattgcaacagaatgggggaaaggcactgttctctttgaagtagggtgagtcctcaaaatccgtatagttggtgaagccacagcacttgagccctttcatggtggtgttccacacttgagtgaagtcttcctgggaaccataatctttcttgatggcaggcactaccagcaacgtcaggaagtgctcagccattgtggtgtacaccaaggcgaccacagcagctgcaacctcagcaatgaagatgaggaggaggatgaagaagaacgtcacgagggcacacttgctctcagtcttagcaccatagcagcccaggaaaccaagagcaaagaccacaacgccggctgcgatgaggaagtag

SEQ ID NO: 158637 - DNA, 1000 bp, Homo Sapiens
ttttttttttttgacgtgtctatcggaacgactttatttcagtacactgggccccaccaggcaatgtggtttgtgcgaggctgtgcgagggacaggcttgggctaagagaagggaggtgagttggttaagcgcactgcagtccgcggggcgctacgttgctttcacacatacctgctgctgtggacccacacctggcaggggcctttggtcatagacggcgtgggggagaatactgtgtgaagtctggattggggtgggtcttggtgtcacaggtgagggtgccggtgaagacaggctggccccagctttgcaccatctaggctgaaggctttggaccactcctaggtgtcaggcctggctccattagctcctggcactctggtctggcccactccctccttaaccaagcaggtccaaggtcaagaatggcacaagatcagcccagaggggccttcccacctctacaacctagtcccctggtcagctacagtggcaaaaggcaacttggtaaattgcagctttctccagtcttaagggcactggctctccaacacccctcccttgcttaggggcctctgccaaagaaaaattttacctcctgtttcagaaaatctaaccagcaaccagcctgttgattccagggcagtgagaagaggaaaagggagaaagagcctggtgggagtgtctttgagtgtagcttccaatctcaaatggtcctggaacctgtggacactgtcagctcaccatcagctgggagaggtggggccctggaggctaagcttaggtgctgtaaacattagtgtagcaaggcaggaggcagcaagctccctctctccagcccctaactgaacaaacacttcaataaataaaacggtttgaagatggcattgcaacaagaacagatggaaagcgaggtcctggaaccagcaggtgccttaaactctcccaaggcccccgaaaggggactgggctgggaacattaactctgcagccattcag

SEQ ID NO: 158638 - DNA, 1000 bp, Homo Sapiens
ttttttttttttttttttcagtttttggtcattttaattgtaaaaaccaagacatttatataaataagaccgctgtgtaaaatacgattcacccttctactaaaacccttttcccacactcgaaaagaacatagaaaacccagcagagagcagtacaaatcagcatgcggtccctgatgcgaagtcgcgggcaggccagggttccctgcggaagcagcctcgtggtgagagcactcctgcccaggtgtcccaccagaggctcggtgacccctcgagaaactgccaggtagcagctcccacacaccagcccctggctctcaactgtacgggtcgaggaggggacgggaaaggctgcttggtccccaccaaggctgggggctgggggggctgctggcccagtgagatgcagtggtctgttcagcctggggtcaagttgggggaaggggtttctgaggggtcagcacctccccagaggacaaggagagaagctgcctgtgtcccttgaaagaatcatctccttcttggggccattttcatatgaccactaatgacaaggacggccgacacttcccggcagtactggggatggcagggcagtggggctcccaggatgcaaggggaaggcagccctggagaaagggggactggcgtgttcctgtgcggaagatctcatctcccacctcctctaccctgtcacaccgccccaccccacgtctcccacacagacccatgcccgctgccccgtccacaccctgagactccgagggagacggttgagagcctggggatggagatgtcaagttcacacactgggcgtggctcaggaaactggtacacaaagacaaaaagaaaagaccccaactctccttggaaaaaccaggacctgcctagggctgctccccaccccagatgagtggcaggaaaaggccctgcaggggacggggcaggggacagagtgtcaggagcacttccagacgcacacagccagggtgcccccgaa

SEQ ID NO: 158639 - DNA, 1000 bp, Homo Sapiens
ttttttttttttttttttttttatgtttcctgaagatatttattcccatccaaacattttcaacagggaaagacacaatccccaatttccccctaggattcacattttcaattttccagggaatctctctttcctggaatgctctcgttcctctggagtcaggaacaagactccagagctgtttatttttctcacacaggtggggggaatctcattctccacaaagggttatcagacacctacttcctctgccaattcctgggctgacctgcaaattccaccttattattgcccttgggcctctggttcctttttgtctgaggtcatatttacatgtgtaatctgccaatgggcactcctgttaggccatcgtagggcacgtggtggcttgatctggactgcccatggcttcccaactggggccttcgggacagctgcaactcacaaccagtcttttgttgaccttcagctgatttcccagggtacttggcccctcttctttggtctcaggggccccggaagcccaaatgctcctactgaatgtcccaaatgaggaagaagtatcaaaaacatcacatggattcccaaacttgttaaggtaaactggacagtcaggtgcccaaatcgcaccttggctttaaaaagaccaagagggtaggagcaccctggggcagggtggacttaacagagaattccaccctgaggtcacctcagagacttgccatcctttctcatgcagacagaactccttttcagttttatgccaatcctctgctgcctctgcacctccctcacaatgagcccccattacctgaagaatgcagaggtcatttggtcggctgggcagggaataccagctcttgccaacaggctcctctgaatatgccacctcacctggggcaaagagaaaccccactgttactaacctgtgtgagttctctgatgactcataagacgggaactccgagagaagctttctccacattcagaacatttatag

SEQ ID NO: 158640 - DNA, 1000 bp, Homo Sapiens
ttttttttttttttttttagtgacagttgtatttatttttttaagttacaataaaatgctctcaagtcctttgaatgttccaacaaattcaaaacttcattttctgaatgttttacataaatgcgaactacctgttcgcattggtaacctgctgctgtatttcatgtcttaacggctattttgaggttcattaacaacatagaaagccttgaactgtataaccagctagattccttaataattagtcactagagacagcccaaagacaaatattgggcaggaaatcagttctcactgagcccggtttccatgtaaaatctctgttgtggtgggcataggtggcaccatctaaagaaaagaggtcttgttttttgtttaaaaaagtttgtggggaggaaagacatctgtgtatcacttcaaaatattgatttactgctaaacatcactctgaatttatgatgtggatactaacttcatacatttatcggcattgtccaaaatattttattctttaatggaaaaagccattaatattcaaatgaagggatcacattaaaaaaaacccatacataagaaacagcctccaagaacattcaagcagcagtcagagagaaaaatgtttcgacagccaagttttcttcaaaatattatgtgacagaatacgactcaattcaccggctacaacaattcatagaatttttcaatgttttcttgagatgcaaaagttcactgttgcagtgttttcaaatgaccaatcaagtactacttcttggttaaaaggccactggtagagtcatctgagtgtagagaatgtcccttcactgctggaaaaatccactggctcccaagaaaagaaaatggtctgaagcctctgttgtggctctcacaactcatctttccctaagtcatcaagctccacatcactgaggtcaatgtcatcctccacgggaagctcgccatccctgccgtcccaaggctctctctcaacgatggtagggaa

SEQ ID NO: 158641 - DNA, 1000 bp, Homo Sapiens
tttttaattttaaagaattttaatacaaacttaatataaactatttcagtccctcttaacatgtaagacactgactcaaaatacttttataccgtttttttcaagtattgcacaatataggtacaaaattaatatttacgattacatttttcttccataatatatagcaaaaatctttaaacttttaacagaaaatacatttttttgaaaaagcaagtattcgtacattttaattccaccactaaaggaatatcctgtacacaatttttagaatagttgatgtctttaagatggatattttacaatttcagtaaaaaaaatacaacatgaagctgctgctgtcacagatcactgtagtaaaaagatataaatgcaataccatgtcgtagaaacaatatatatatatcctctgatattttacaaactttgtactaaattaaattatacaattagaaaagaccaataaacccacttattagtgccaatttttataaaaaaaaatcagccatgtccttgctatatcttaaatactgtaagaggccatatctgagagtatactttaaaatatacagtcagtataaaataactttgtgcttggttggcaaatgaaaaatgatgcatgttttattattatttttttaaccaagcttgaatgtatccttactataagcttaaaaaaaaaaattctcaaggaggtgaaaaaaaaaatcccccttgggcccgtgcattttaacttgtacgatacattttcttttttttagttagccataacaggctggaattgctggttagaatactgcatgttatttaagctaaaattcaagccatctacaaaagacttctcattgaggcctccataggctgcaaacacatcaaaggcattactgtactggagaggactgaggttaagggggctgtcacctgggaacattccattggtactactaccttgaccctgcatattaggaaaaataaattccttggcattaggagaaagagc

SEQ ID NO: 158642 - DNA, 1000 bp, Homo Sapiens
ttttttttttttttttttttttaaattttcttccagaaatattttaataaaaattggccatttccaagtaacacccactgcatgcccatcaataaaagagaaccataacaaaatagaaaatttaccatatggctatgattttaagaaaaaaaaaaatgcggacacgagcacatgagcaaagtccaatattaaagtaacattccttcttacgggctatgattaggaatctgattagataccagaataaaaatacaaatgctgaactatttaggtcaaagaacctctatagaagcatctgtcttcaaaggcattccagtttgagactcaattttagaataaggcataacaaatatgttaacaaaagacatacacaaagtgatgaaagagggattctataattccccacatactctgaacctaataaaacaaatctagattttttttttaaacaattgccaagactgaaatcaaagataaatagaaggcacaacagttttgctctggttgttatctgggttttgggaatttttttgctttttgtttttttacaaatacaaattaaacatgaaaaaactacttcaaaaaaactaacagttcaagaaaagcctatcagttgcattctagacatttaaaacctattatcacaatttaaatttcaatggtaaaaacagttaggttttagaattgttttgtgatcctttatcaaaaaaaaattctattccttttattcagtttttaaacataccagtgagaatcaaaattgtcaaattttccaatggcaatttctccacaccagaaggtagtcatgactctcaaagaagaaacaatttgggtttttcctgccttcaaaatattatcaaatcctgtatttcttacaggcttttcaaacacgtagaaaataagaaatattccaatgaatgaaacataccaaatgtcagtaatatgcaagacattcctttggggaaatggctgtaaaaaaaaaaaaaaaatccagtctgta

SEQ ID NO: 158643 - DNA, 1000 bp, Homo Sapiens
ttttttttttttttttttttacctttgacatacataaaaatggtcattttatttcaatccagacagctcagcattgtacaaatgatggcagaaagatccatttgttcagactcagcttgctttgtttttaatactggggaataacccaaaaaaaaagtgtaatttttatcatttgtatccttcattctactttactggagtggaatccccagggccttcagataatctgggaagacctgactattcctgtgagccaagcacagccctgctgagctttactcagaataatgcatgatagactcaacgtaattcccaggaaaaagcccagtcactccattcataactccctcataccaaccatcgtcattcttcttgatgacataaataatggctccttcctgaaaggacagctcatcttccttgtcttttgtatagtcataaattgccacaaccttttccaagtaagaacgtggagcccacggtgggtcctcttcagcataaggatcactatactcaaccacagcagcttcctcctcttcgtaatcttctggaggaggaggaggtgggggagactcatcaaagactggttcttccacaggtggcggtggaggtggtgtatctgaaatattttcttggactctggccacaaatcccattaaaggtaacgtaggagttacctgtaggatggagggaggaggaggagcaagagatactggattctggctataaaaaggtcctccattcatctgattctgaaggcttgtttgtgaagtaatggaaggagggcgtctatagggcaacgagccccctattgttgggggagtatggcgagaggcaggcctattcatgctgtagaactgtacaggatgacctggaaagacactgggaggagatggagtaggaacagcaataggaacccccacactaccacttccactgttctctcgactgctgctccgactacttgggtggctccctccactactcccactgctgctgt

SEQ ID NO: 158644 - DNA, 1000 bp, Homo Sapiens
ttttttttttttttttatttatagtttattacaaatccactgagaagtctggaatgtatggaatcagagagctagatcaaaaaacatggttgaacagcaaaaattagatgtaagtagaattttaatctataatttacattaataactcatttcctttgttttttagttttttgagtggttttaatcctcttctttttaaaatgtttctttttcttgatgatactttttgcatctctgttgtgtagccagtcatcacgttcagcctcccatctaagctgtttgagacttgcattatctttgttagccatggcattcatgccaatgttatcaaacttggatcccatattttcatccaatagatggccaaactcttcagcagatacaaataggctggaatcatttaagtttcttttcttttttcttggcccttgaaatgagccagcaaagtcaaaatcatctgtaccttttctcttgcttttcttagtactgactttggagtggacttcaagttctggaacgctctcactttcatcatctaacacatccatgaatgttcctccatcttcatcaacttcagcaaattcttcatcatccatacttcctaaagaaacttcatcgtcatccaggttaccaagttcatcatcactaccttctgaatcttcatctaatgtgttatccttagctccttttgttctctttttcacgtttccagcaaaatccatatcatcctttccagagctgaaacagttatcatcttcaaatgtgtcaatcagctcttcaaattcttcatcatccacgtcttctatactttcttcatctgcatcccgtttttgtttctctttaacagcaacttttttataatacctgtggaaaaacacttcatccactggtatttggctttcttcttttgcaaggaactccttactgttcacaggaagatgacgaatatccttaataaaatgttttcttttcggctgcatcacaacactatctgtgtttt

SEQ ID NO: 158645 - DNA, 1000 bp, Homo Sapiens
ttttttttttggaatcatcattaactttatttgtcactcttgatagacattggtccactccaacataaaaagtagaattcacccacttccacttaatattctatagaatgaagttgtaccacaaaccatagtaacttacacagggggaaaagttactgaaataaaaatgttttatattcatgcctcaaaatgtccctcagggatttttgtgtgtataatgaaaagcatctatatactccacaaggctagtttcttcttagatcaatgtagtatttttagtatccatattagcccatgtaggtcaacaaacttgcagaagagggttaaaaaacagctgtcctctgttactcagatacagttccaaaactaagcgattatataagcacatccatattttagggctactctaagttaaaaaccttttctcttgtttcagagttatttacatcaaattaagacatttacaaattgttcatagtatacaatagcccaaatatgattttcacctatgctgtgtaaagaagttaagcattcgtaagtttgtctaataaattcagtgcacttttttccataacacgagctattctaaatgttttacatttctttcagtgcatatttccaaattcattaaacagaatgaaatcaatgttattaaatggctatatcataatattcaagcatattatggaatctataccacagtgggattcacgtcaatactataattcactctagaaaaacatcacaggcacacacaaaataaagaacaaaatttgatttttttttataaatgtaaagtatactatctactttaaagcacactaaaagatatattttaacaaaacagccaatttccaacccccttttctaattctggcacaggtaacattcaatccattcgaatcttctggtttgtcatcctataaatgatgctatcatatccaggatccatgttccaaatattgtaagaggtgataatcacagccaaggccaaggcgat

SEQ ID NO: 158646 - DNA, 1000 bp, Homo Sapiens
tttttttttttttttcttatttgggaattttagtattaacagatggcagcttcacaggtcaaagtcttctatgtgatgggaaaatgcagaggggaagtgatattcaaatgcagcccaggcaccctgtgaacttaagagcttgctcttttgtgcagagattttgtttcatatttctgattaccgatagctgtgatggtcaagctcataagtaggcatccaaccttgttcccacttccttccttgaatccactgggaactccaagggctcagaatttgcatctctgtggaaaatgctggtgagctctttggtgaaagatccattccccattgggcaagatgtggacagggaggtttatggatcaattccactgatactgtgtcgtgcttaataggcctccaggccacaaagtctctgaagtctgcccagacaggaagatcaagaaaagaagaagagcaataccctgtttcactggtgggatgtgctgctcacataaggttccccagtctgttttctagacacaagcatggacacaaaagtccttctgcttgagcacgtgtggacacaactcacactcagtgtgatacccacagacatgtagttaaggctcagagatgtaggcaaggctcagaagcattcagagaaagtgactgaggctgacaccaggtggcagcaaagccttctcaaccctcttagtggatttgctcagggacagtccaggtagacagaagatccagcaacaggtttctctgttcttgttcagatctgacgtggcggtagcccagcaaattcatggcatcgccacaggctttctgaagtcgagaaaccttttcatagggcaaagaccagcgccaagcctgggagacattaagggcatccctggcatttgtgtggaaagcgtggtcacccatgcccttgcctcgggtgatgttatgcacccaggtctgaagatggggcaagaattccaatcccacgaattcatacattcgggaagtctgggcc

SEQ ID NO: 158647 - DNA, 1000 bp, Homo Sapiens
ttttttttttttttttttttttttccttgtgtccaggtttattttacattctcttccagaggggatgtggggctgggggagagccagcaggcaggcgggcagcacacagcagtctccctggggaatatttgagccaggctagtggtgcctggccccacagtgcggggtgatatgccagggccagggccaggacttggcagcccctgggaagaggaggccttggggccagagctcttgccaggcctagatcgctaagaaggtgctgcgtctgtcccccgccttgctccgcccccccacacccagctggaggccagaaggcaaagagggcagccagcaagctggggtgctgggaggaaccccagcaggcgggggcggcctttggtctctacgaggctaggaagctggttctggttagaggaaccccgtgggggcaaagcggagagctggtccctgttagaggaaacgctggagcaggatgggggtgggggacttggggtctggtctcaataaggcctggaaatggtctccgcttcaaagcagacctctgtatttggggagtggggtggggaggaaatgaaagggctgtgggaggaatgcctgtgagtcgtgggtgggaatcagtccagggggcttcgaggggggtccgagggaaatgctgcgggggtcgtctgcagatgctgggagctcaggtcctggggaaggaggatgtgggcgggggtcctctccctcccacgagtgccaccgctccccaccccatcctggctggctccaagttgccatggagaccactcacaccggggcaacgtaatttccagggaacgttccgaatttctgggtcctccgggagacacccacaaaccagccatcgtcacactgctgcatgacatccaccctgtccccctcgcgcagctccagctcgtcttcgttctggggcctgtactggtacatcgcccggtacggggtccagtgtatctgagaggtgttaggagaggaggtcccc

SEQ ID NO: 158648 - DNA, 1000 bp, Homo Sapiens
tttttttttttttttttttcacattgaaaaaaagtttatttaaaaaagttctagcagcaagaacagtaacaaaagaaaaggagagacaaacaaaacaagagggaggttgtatcccatggaacttgtctcctttcttaatcgagttctttatatcgagcaaacatgactcttcgaacagcatctcgataagtctcgttggactgtcttttgctggttcttcctgaggctccaacactggggcccctcatccggccttcagcctcctctgatgaagccaatccaggatggccatatcccaggcctgtccctttcctccagccagtagcctgttggacacagcctcctttgctgctagtgtcgatatcttctttatcaacaagtttacgatcactgtcagtttccctggagtacttaatccgtttcctttctggagagtcaaaagactggagcttttccctgcgatcatttcctcttcctttaaactttccctctcgttctctcctttccagataggctagctcctgctcagactgttttatcttccggtggatttccaggttttgcttgtgcaggtctgacagctgctggtgtttgatcagaacttctttattgggaaactgccttctgcaaagcagacaagccagtttattccagtcagtgagtttgtcttcttcattctccttcttggtttgctcctctcgcttctggggctgtgctgtgcggggctgtgggggaggggtctgttcctcctcttcttcctcctcatagtcactgtctcctccatattcacccaagaggccgatcagtgggtttaccactttaggtggagggggactctcttccttcttcacagtaggaggcaggggcttcttaaagacgtcttctgcaggggccttcccttcactggcattttcctgaaacctcgtcactcctctgtcttttttctccttgccatctcttttagacatttccttcttgctacttgactttccttgactgg

SEQ ID NO: 158649 - DNA, 1000 bp, Homo Sapiens
ttttttttttttttttttttttttttttttttttttttctcaaggtatttcttttgtaaaggagccagatttggcaactagactgaaaatcttccaaaattctgtacaaatgtgtaatatacaaatatacacaaggcttttgccaagaaaagacatcacaacaaatgacagaggtggctttggtgtcacataccacctacagcatctcaaacccctaggaatgtgaggggctgatggaccacaacataggctacacatgtaaacacgctacattacactatgtacactggagtataaacaatccactgtcctctccggtctgttcacaagccctctggcgggaaggaaggccattcaccaggcaacccacataaggggaacttctttaaggtgggagggagaaccctgcagaatgaagtggttcaccctaagatctattaacagcacaaggcatgcccttaaagagacaggcggtaacagcgaattcgggagatggaccacttcttgtgctccttgtcatctctctctctctctctctctcactccatctcagtgaaccgggcaaacatggctttccggacagcatctttgtaggaatcggcgcccgacaaaccatatgcgctgcctttggctcctaggccagctccctttagccgaacttgagcctcaatgggagccgtaatgccttgacactttcgtcccaagccagagccttcccgccagcccatggcctgcagcatcttgttgccaatgttactgtggtcaatgccatctttggtgggttgctcgtaattcacagtgccggcatcaaactgcttcttgcgcttgggctctggaggttctggaatgccgtacttctcccgtctttctgcagctcggtctcggtatttcatctctctctcccttagctccaaggcttccagctcctgctcgctcagcctggatcgtcggtagatgtccatgttttgcttgtgaaggtctgagagttgctggtgcctga

SEQ ID NO: 158650 - DNA, 1000 bp, Homo Sapiens
ttttttttttttttttttacacacatttctattttattatggaaaaggtggaaacgccaccttctccacaacagcaaccagtaaaatttatcccaaaaataactcggtacaaaacaggtctgtttcagaattaaaaaaaaaaaaaaagaaaaaaaaaaaacctttacatgagtttttaaatcctattttaaaacataaaagaaacaaatccatcattggccgcacagccccagccaccgccccccaaccagggagcaagaggagacgcctgggtcctgttccgcacgcggatttgctggtctgtttaactggtgtccattctcgcattataggcgtccagctgggcatccagctcctctgccgaaagctgctgctttgaattcctgccggcacctctgcctcttccacgggcgcctccgcgggtgcctctccgggtgcctccaccaccaccaaaacctccagcgccacggtttctagtcatgccacctctgtttacgctctgtgcaggcctccgctgtgcgtcaatctgtgacgtgacaagctgaatgttcatggggcggccatccagagggacgccgttgtactgcttcatggccttcagggcatctgccttccgctcaaagtgcacgtctgctgttcctaagctgcgaccagagcgatcatagtgcacagccgccttcttcagcgttccaaattcagcaaagagttcctgaatatcggcgtctgagactccaaaatccagattggacaccagcagtttcccacctgtctccacgccggcaccaccgccgaagccactgtcgaaaagatcgtgctgccacttgtcgggaagttgttttggcctgctgtagggcgccggtcggttcctgccgcctccgccggccgcgccgcgggcgatggccggccggttccggatgggcccgccgcctcgattcactcgcgcggcggcctgcgccccaccgccgcggccgccctgggagccggcccggccgcggccccg

SEQ ID NO: 158651 - DNA, 1000 bp, Homo Sapiens
ttttttttttttttagcattccagactctattttatttaaaaaatcagcccagatacagtatcagatattaacatacacacattgttgcattatatatttgctttaaaaattacataggttgtatgtatttgatttgagactataaaataaaataatggagtatttacaagctcatttttcacaatttctttttacaaaattccaagaaaataagaaatccttcattgattttctttatataaaatgattgctaatttgtttatacagtagaaatggaagggacaaaatttatatttacagctaggaattccctcccactgtttggtaagacaggaagaggttgacaaggtgttttgtagcatcaactaagatgttttcctaatgatatagaagtaggattgcatattatacatcctgttcatccagtttccacaatggatatgccacaagatataactgatgtgtcagcaaatgagtagatcataacaattgtactcagttgcttttcatagagaaaagaaagccagcagggataattcacttctggtattgtccatttgagagggtagttacaaaaaggactacggcactctgggcaaaaaaaaagtcaactgccccaatcaagatgggataaagagttttaaaactaaaagctaattttcccttcatgtttatagaccttagctaggtctcttggggcaataagggtagaatcatgcccaacatgtatgtttagttttacagccatttgtttgtgaattcatgcaatggtgtgctggaactggcttacaccagctcagaaaagttgattgtgcttttctccaattccacacttggtgatgtcaggttagtagcgtcacatcaggcatagtgggagtatttactgacaaacattacaaaccaggatttcttttttcccacatagagctggatgttacactcttatcaacacactactaatttcatgtgaaggctcttctttatgacattcaaaaagtc

SEQ ID NO: 158652 - DNA, 1000 bp, Homo Sapiens
tttttttttttttttttttataactgataattctttattactaaaggtttatttacatagtgtttaaagcataataaaaaataaattacaatacaaaagtgctctttaggaaggagacactaaacaacaggcccatattaccccttgactatttagccaagacataagctacaaattttgccggaaaaactgtccatacatttttaactacttcttcattattcttatggaccatcatccaggacatctgtttgaagaaatatccagttataatattttcaaaggttagaattgtgaagaaaaaatataaaatgtgattaaaggatatatagccttcagatgtaatttacagttttaaaattgcactttaaaactttgcttttttagacagtataaaaggcagaatgagacagatatgtaatgaatttcagaactgaggttcatatgtaaatcatacaattttttaaaaaatagtattggaaaaatatcaaggtctatacatttaaatacagataatctgtttgaaaattccagtttgttaaaagaaaaaacatctgcagtccagtcgattaaaaactgaaaatatcaatctgtaaagattgatcttgagcctaaacttttagatgctttctatcctttgaacaaatgcttctgtatcttaagcttgtaacttttctttcaatagcccacttataaagtttgctttatctaccagtatgggggaaaaaaagaataaagttggttttattccatttaaagtagttttggtatttctttgctccataccaaagtcttcctcccccaaaataaacaagtgaattagaattaaaaaagaaaaaaagttaataatttcttctagttctcagagttttatataaaactgtacaaaattatcatcatttagagttgatttttttcaccagccctgaattttcaaacttgtaatatgctgtttcacaatttttttattaaattacttaatgattccagtctgcaaatg

SEQ ID NO: 158653 - DNA, 1000 bp, Homo Sapiens
ttttttttttttttacacattcagtgattttaatgtgtaagaaagattacatgcttcatgggcagaaccaaaggttaaaccttgcattttgttcatggttattacacaagtaattacacaagtccagtgtataaaacactacctgaacacattgtaagttcttctaataataataaatattatatgaaaaaagttaacaagcattaattcaataattctcaaacagatattcatcgaaatgaggtaggtctaatgtgtcatttgctaaagcatttaatgctgaggaggaaaaaaactcatcgaaaatatcagtcttcatcggactctccaagtttaatgttctaacgcaggcattatttgtcagagagtctggctgaacttcacatggatttttcttggtggggctacaataattatggtcctgtctcagatgtgtgttctgggaaacatcattgaattcacttggtactggtggtgggatatgactatctcccattcccaaatacctaaagtcaccttccccattttctgacagctctgttgaaacaggtgtaggagacaataattccgctaaaatttcttcatgagtttgactactgtacagggaaacaccaggaacagtggtgcatgcagactcattggcaatatcaattggatatggtagctcatttaacaagtcctctattgattcacaatcatttggagacccatcctggggcacctgttctagattttcacttcgaactgttctgctttgcggggaagacataagagcagctaatttcttcttttctgcctttagctttttacgaagttttagacgaagtttatgaatctgaccttccaccaagtcttcatggtttgctgaagaaataccattcccataagaactgtggttgagttgagctccacatgaggtgcttccagacttttccaaaacttctgaagcagcatgagcatgtgggtgggcagctgtgccattagacgatggagggcctgc

SEQ ID NO: 158654 - DNA, 1000 bp, Homo Sapiens
ttttttttttttttttatgacaagggtttttcatgtttatttagcaagttaaatgctgtttttactgatgatagaaagcaaataagatactcctcaaaatcaaagaaaataattaaaactataaagtatttgttcacctgaagttcagtatttatgacataattatgcccttagctactttcaagattttaactttactaaaataaactttaaaaaaaaatactgcataggaaaatgtctgattcttgttttaaagtgttactgttttattttttttcttttgttgaatacacatttgttttactggcagtccagataaacaagtatataaaggaaatagtaaatttttattttggcagaagataaactgtgcagattaaaatgcctcaatttaacctgaagaaatggttttgaatcatataaatttttaagaagaaaaataaagactgtccaaagggattctcctagcttataacacatttccagaataactctcaaaaaaaaaaaattcaaaaatactcattgactaccttaaaaatatgtcaataccgtatggctttatgaaataacttctaaaatttatataatttttcttatttaaaaaggaccccaagttttaaataagctgctagcagtatcattttcttcacttaaaagtgcatatctttgagggtgggacatacattttgaacaaataatgatttttacaaattaacaccaaaaaaaaaatcatttaaaatattgtaaggaggaagagagttttcaccaaatgtcatctttaaatagactgcagtagacgacattcttcctttttcctttttataacatcataattctcaatgaaatgctttggcagttttaagacatatcacagtctctaccaagacatactgacattaatgatgtccgtggcgatggcaattgccttgatggctcagtttgaagagacacaatgttactgggctggttctccaaatcagaaacaaaggtgctctcttct

SEQ ID NO: 158655 - DNA, 1000 bp, Homo Sapiens
tttttttttttagtacttacttacagcaatttatttgggtagcaaagttgaaaacctccagcccatccctcagtcttggtcaggaaaatattctagacaacaggctcaaacagtctgatttaattaggaagttaaataagttgaggtggggtggagtgggatcatcagaaggctgacatgggaccgctggagttggcaatcatagcagtgtgaggttggcaaggggagcaacccccttcaagacaaggcacaaactatttggcaaggagagatgaggggtgggacctcactgtcaatggacatgctcagggaggccagtgggttacatgcaacaggaggatcattcaggcaacttcagctatgaggctgggcatctgtgagggctgaaggctcaggctgttctcaaaggcttgtgattcacctgggagatgctcacgcctgtgagtctttccacactctctggcaggcgagttagaatgtccagtacttccccagtcactttggctgcccccatggtcccactgccgctggacaccagtgtgatcttattggctgaagtcaagggaccactgatctcctctgccacctggggcagcttctctagcagcatgtccagctgagcagcctcttggtacagctggaaggcttctgccttcttggccatctgctcagcctcggctcgggctcgggcccctatggcaaaggcctcagcttccccacgcatccgcacagacgcggcttctgcctccgcctgcataattagttgggacttctctgcctcggctaggcgctccagcttgtagcgctccgcttccgctggcttccgcacccgggcctccagctccttctcccgccgggcgatctcctgctcctgcactgccacctgctgggcccgctccaccacctgcacctgcacccgctgctcctcaatctgctgcttagtcttggccacctgaagctgataggccaggtcagcctgtgctcggcgggtgttgacctc

SEQ ID NO: 158656 - DNA, 1000 bp, Homo Sapiens
ttttttttttttttttggcgtttttcgttgctttatttaaatacgacagtatccaacatagctgctaaacactggacaatatttgaggtcataagtacatccacatgttcctccaaatgacgtttggggtcctgcttgccaacattctttattgccagctgttcaggtgtcatcttatcttcttcttctacagccttattgtaattcttggctaattccaacatctcctttaccactgattcattgtgtttacaatgttcactgtagtcctgaagtgtcaaaccttccatccaactcttcttatgcaaatttagcaacatcttctgttccagttcatttttccgatagttaatagtaatggagtaataatgtctgtttagtccatgaattaatgcctggatagatggcttgtttaagtgacccagattcgaagttgtttgtcttggttcatgtcctaagaccatcatattagcattgatcaatctgaaggcatcaataacaacctttccttttacactctgaatgggatccacaaccactgccacagctctctccgacaaggcttcaaagctctgctgagtgttgatatccacaccagaaagccaacaaccaaagccagggtgactgtgataccaaccaacaaccatctccggccttcctgtctgcttcaacatatccaacattttagcttggaacactggatcaactgcctccacactgacacctgttcctgactgtggcatagcaaacacatcaatcactctgacggtataatcatcaacaaattctccaagcatcaaacccataacttccattggaactccagcacggccatgttttaacatttttaacagtgccagggaagagatatagacttgttctgctgtgtccactgcaggagcatctgtaggtggcccctggcccagtccaggcatacctcctccaagtctaagaagtctgtccatatttctggtcagtaactacaactcttaaggtgtta

SEQ ID NO: 158657 - DNA, 1000 bp, Homo Sapiens
tttttttagtagaaaattataaaatgagcttttttttatttttggcaggttaaaaaaaaatcagtgtttttaaatatagcattagttccatttacaaatactgtttccaaaatagttcttttaccaaggtctggtaaaataacacaaccaggtcaaacttttctttggatacttatactagaaataggctcaggttttcacatggaaaagtatggtgataggaaatacattttattatcaagcttccagtatatttacaaaaagttggatataaccaaaaaaatattaaaaatgtactgaacagtcattatagactactttgtacattatcaaatgtttctagcaattacttcttttacaaacacgacttaaagacaaaaagttatgcaggttatacagtatctggaataatcattcaactccagattctctgacagtgcctttacaaaatttttagaaaacttcttaggcatttaacaacaaatacaaagagtgcaattaatttcatggcttgtaaagtttgactatgtaagtatagcaaacaaacatcgttccagttaattttcaccttacatagtaaaaccacagtagattgattgcctagtgactcagaattattccattttgtgtgtgttgatataaacagactttggtgaaactgggaagtcatcctctatcacagggaaaataacatttctaaaaaaaaattttttttgaaaattaatttgatttaatctttgaagcttctatagaaggacaaattaccaagaggggaatgtttcctggaggtatttatgggtagatagtacagcataatggttgggagggctaagggtaagattagagccatactactggtctcaaatactactaactgtttgaaatttggcagtaagttaatctccccttgcctcagttttcttatctttaagatgaagctcataatgacttaacactatggctgctgtgagggtaaactaaaacataaaagaacttagaa

SEQ ID NO: 158658 - DNA, 1000 bp, Homo Sapiens
tttttttttttttttggttttatttctttttattcttgatgggcaaaaagcctcctttaaaaaacattattcttaagaaacctgggagagaaaaaaatgccagtgagaggaagacaaagaaaaattagaggcagtacattccatatttcagaactttagctttccagacagtccaattttgttttgtttacaaattcatcttgcagtacaaggtgaagccaaatggtacaaagtccacagaattgaaaagccattcatatttatcattcaattttttgatcttcaaatgttatgaattctccaaaaaggtaacagggaacagatatccctttggtctcactttatagacagggaaattaccaaaagaaaaatcttggctctaccatctctacttacagaaggtaaaacacttaacagagacagatttctgttggagttagactagatttcttttcacagcccttaatctcacgaggtgagaaggagtggaagttgccaagttgttggctaccagacccatcagtctgtttaactctggctaaaagcagagaataatgggcaagttaccaagtttcccccttcagctctggcgtgcattctgaaattgtggaagatcctcatgtaacacacacgctgcaacctgcatttgccacacagtccagggcatatagagcattgtgattcttcacagtccgcagagacaagaccaaaaatgaggactaaaaactaaaggtagctgagtttttcagatggattttcactctggcaaactcagtagttcactccctcccacccctcaaatcatttaagtaaaatgttcttccaataaacataaattgagctcttcctctgttatccatcacattctgccagttctttaaaactggaatatggtactaggtacagaaggctaaaggggtaggaaagccccaaatactataaagatgcacttataagcagtgtggggttatcaccactgtctacttactctcccattcta

SEQ ID NO: 158659 - DNA, 1000 bp, Homo Sapiens
gcttgattttattttattaaaaaagactggaactcagtcccatattcctattaagtccattttcccaagagatgtcactgtttgagataataacttaaatattcttgatgtggaggtagtctctctcttcctagtgggatgtcttcttagctcctttcccaaacttggcatcaagaccaagacccaggaacacaagcacagtgcccacccactgcatggggctgatgggattggcgaagaggatcacagaggccaaaattgtgaagaactttcgagttgtagtgatgatggagcaggtcaggggaccaaaatacacaaccgtcataaagatgaagctctgacccagggcactggtcagcccaaagagcaggatgttatagatgatggcagggtacctttcagcaaagctcaagaactcccagagctccccagtgaacaggattcccattcccagcagcaatgtcgaccaaaggttgatgttcagcatcatgtggttggagcctgtttggtaatgagcccgcatgtggtcctgggaaacaccagtcagtccatccagggtcagcgataatagcaagagtagctctccatagccgactgtgtgttcttctatcccaacaactttcttgggtttgtacatgaaaagggccactccagccacaattaacagcacacacaggtacttggccaacgggtacttcttcttcaagagggtcaccccaaggagcatgactgggattggcttgcaggatttaccaaggacctgagttgggtagttgacaaactgtagtgctgaattgctggagaccatggcacccagataggagatagaacaggcagcatagagccagctccgggtacgatccaccctggcagtgtcaaaaaactggatcaagatcttggcaaacacagcattgatcacacattgaatgaagaccaaagttaaggcaaaggtgaacgtctcctgcttggctccttccccatactttcctcttgttatctt

SEQ ID NO: 158660 - DNA, 1000 bp, Homo Sapiens
ttttttttttttttttttacgaaataaacgccgatctcctttattctgatctcacattcagcaaatgtgagagaaatgtgaatgtactgaaatgtctgccagaaaaaagaaaatccaacccctcaaaagaatgacatcaggggttttgatatctattcacctacacttccctcttccacaggaagcggcccaccttctgacccacactgcccatctctgtgcttatcatggagctttcaagagtgaggatcggaggctgtattgagcagtgggcacaaaccacagggagcgctgttcaaaaatggaaaacaaggtggccctgacaccgggtgctgctgggcaccctctcagacctgccctgcaacagcatcaggaggctgagggtccccagccagaaggcccaagaggggcccaggctggaaactttactgcgaagcagccctcatcttaaggtggctcaacaccacacctgagatctagcccatgcgacagtatggaagcaggaggccctactccaccacagaaagaacatttatgggcgcctaagccctgggagaatggcacctgagggaacagagcgtgcccacaagcagaccttggggagggagaagaggcagccctgctcctagtcgcagccagcgtgcgtcatgtccaggccccacaagggtgaccctggctcaggttctcatgctccagaagctggcccaggtggcagtgggttccctatggaggcagctcatcattcacaacacagcaacaaaccttctgctctcatgaggagaatgtattttaaacttgggaagagtcataattctgggatgtttcacatgttgtcagctttaaccttctacagacacaggccctctcctctgtgaggagggacctctggcatgtgtgggtgtgtggtgggtccctctccctattagcagaaatgtgttgggcatgagccaggtttatgatttggattgtgtcctgcacataacacctgtgagaatacaac

SEQ ID NO: 158661 - DNA, 1000 bp, Homo Sapiens
ttttttttttttttttttgccagaaaaactcctttattaccatctccctattacatttctattctagggttagtgttaatctcaggtcttattcttaagacagcaaaaggcttggagaagtagtgtaagtttcatcttcattttatcaaggatgaaatcaaagcaaggagctgtgactaggacaatacagttagtctagggcataactcccaaccacattagggaaagcccagtaggaacacagagctatagttggctcaacccttattcatgacatcgtgtttcacatcattcaaaagtttttgtggaagtctctgtagtgaccacctgatactgcctgggagttatttccatttgttcagtccctgaggggatagaaaatggaattattactttcttatagttcaattaggcaaatttggatagagcgcattgaacttagttcacaaagggtgcgaaaatccacactgctccttttaaaaaaaatgcatggaaagttacagcaagaagtcagggcctcgggcccagcacagtggctcacgcttgtaatcccagcactttggacggctgaagtggacagatcacgtgaggccaggagttcgagaccagcctggccaacatagtgaaaccctgtctctactaaaaacacaaaaattagctgggcattgcggcacacacctgtaatcccagctacttgggaggctaaggcatgagaatcgcttgaacctgggaggcagaggctgtagtgagtcaactgcgccattgcacgccagcctgggtgacagagagagactgtttcaaaaaaaaaaaaaaaaaaagaaagaaagcaagccagggccttggatttcacaaactaatgtttcatcacctccttccccacctcaagataactgccaggacactcttttttatttaatcttaagacaggtgaagagaaatcattggcggggtctgcccttcccatagcccttttgatcacaattttcccatgagcttcaaa

SEQ ID NO: 158662 - DNA, 1000 bp, Homo Sapiens
ttttttttttttttttcctttttttttttttttttttttttttttttttttttttttttttttttttaaatttttaaatttagaaatttattctgtttaatccacaagctttatatagctttagtttaaaaaaaatcaaaacaaaaaaaaaatcaaaacaaaaacagtgaaaccaagacactattccaaagtctgggcccttccagccttccaaatacaagaggctctgaaagttgtatataccaattggaagaacaagacaaaaatatgaacagagccatgacatttcattaaacaaattgtatgtaactgaaggatcctttctgggactagctcattgcctttacaaaagaaaaaaaacaaaacaaaaaaaacaaaaccagaataacagaatgagagtccagtgttccaaatcaacttgttacacatcaatataaacccacagtgtcctggcaaacaacatgctttcattttctgtctcatcctagagctcgaatcctgattcatttcagcagagactccacaggcaacaggaaagattgtggcattaaaatattcatttatacttttgtggtagttcaaaacagtggtcttatttctgggcaagcttacagaccatacaaggtcagaagcataacttaaatgggagctaagactcaaatgaaaaaaataagaagaagaaagaaaaacaaaaagaaaatcaaaaccaaaaaaacaaacaaaaaaacccctctgggaatagctagggcatttaaaggaaccataaaaatgccaacagtatttaaacccccttttttaaaaagggaatttttttttggcttaaaatatttcactcaatgaattatgtcagctgtcaatgaaagaatgtcactaatacactgtggacaccttttgcaatgtaaatccatgccccctttttttacatgttgaacttcaacctagcaattattacaacaaatgttatagtctaaagctcaaacacattttagcaattttgaaa

SEQ ID NO: 158663 - DNA, 1000 bp, Homo Sapiens
ataaatggtacagaattttatttttaacaaataagtagccagatgtatgactcctaggggggtagaagtggccctctctggaaattcataacatccaggatggatacgatgggattggatatggatatcctgttctggggcgctggagttcaagaaatgtgtttcttgtggttacagattattctgggagtactagatcctcaaataatctatttcctcagatgctccaagtcagaaagcccctttcctccattctggcttctacaaaagaagctcctcctagtgggcaaccctcccccttggctttccatgggtaatgcctttcagaagacacgtccttttttgaccttctcccttcaaccaggaccagccttgggaatgagatctacgagttccattgaaaccctgggctagttcagtactaaggccatgttgtggttgactgagtataagaaatccagatatcccactgcttttatattcctcttgatccctattccagcaagggcaagagaaaaatgtatgacctttttcctcaactgctaattttgattgtcactgaggccaacctcagattaaaggcacatacgacctacacaagtgttcaatcttgttacatgctatcaggtagacacaatacctaaaagattgactaaaataaaaacaacttttattatgttgttttagagacttagccccacatatatgttatacattaattcccttgcatttgtatagaaccttgtacattaagaaaaatgcttctgctttaatgattctcatacactctctaggctttattatcgtcattttacagatgagaaaagcaaaggctcagagggggaatagggtagagatagaagcagtgtagtataaagacaagaattctggcctaggagtcagcagacctggattcttatcctgacttggtcactaactcacggtgtggttatgagtaagtcactttccctctcttagcctcactatctgcatttatgga

SEQ ID NO: 158664 - DNA, 1000 bp, Homo Sapiens
ttttttttttttttttttaatttcaaacgttaatatattttctattttatattggacatatgcatctgtaacccctcatttgcagcaactatcacatcctcataaaaggggcaaaatttgtaagatgcctcttaaaataaatattcttttttataaaataataaaacttcaaataaatattctttacactaaacaatatgttgaaaaaattagaaaataaaggttgaattttactgtaactgtacaatatacatgaagtccaaagggaaatcagagtcttacaataaaggctttctgtaaggcaaaatacaatctaaaaacatactgattgattcacattcttccgaatgtacaacatattagtataatattttgtgtctgtgccatgtagtatggcacaacttgtttttcacagttgcaaatattattgtatatacaaaaatatagcacattctctctggagaaaacaatggaaaaaagtcatctgctaatttacaagttttgcaagtactattcacaaacaaaaactttgcctaggagtgtctgtgttgctttagcttatgcaatacatgggtcaccaagttctgtatctcatactttgagctccattagctgagttctaacaagcatatcagttaaaacggcacatggacaaaaagcatttcaccgcaaacagcaaagactatcccacctttctattaacagtgccaagattataactgtttagttggttgcatatgtgtattaaaaaaagaaagaaaaaatcctcattactgtaatattcctgattaatgatgctatgttggtttttcaaagttcctaggggggacagtgggaactttgcagcaaactgtgtttgagtttttacagcggcaaccaggcctgttaacccggtcataacacccctggcacaatttaaggcaacccttggctggaaggtaacaccataaacaaggcaaaaagagggacatgacacccatggctgaccatcgtgtacaac

SEQ ID NO: 158665 - DNA, 1000 bp, Homo Sapiens
ttttttttttttttttttgaaatacacaaacattaaaataagtttattaaatagagtttgggagaaaaaaagtaagaaattccatatatatgcaaatgttgactattatcgagagcagctttggattttttttaaatgttttttaaaaattattattttgtaaataacagaagatttgtttccaaaaagtaaggtgccattcagaagtatataattgaattaacataaaggaaaatactgaataaaaaacagaacatgagatattaaaggttaaaactttctgttcagttatttgtatctgaagttaagacaatgacataaactgagctttcaaatactgctaatttttccacttaaatgtagatcaagtaccatatagactattttgttctagaataaagtttctttgaaaaaggaacatatttataatcaaatttctgtagataaatggcaaaattttcagagaactagcttgaaatggatttagtagaaagaatgactgcttcctttaaaaaaacaaatatagaaatcttgcttccacgtaactttttaaaaactaatgtccattgtttttcccaatctgaatatgtttccatacatgtatgtatttgcaatttctattttccaatatgtaaaaagttggtagacaatgaagtagtgtgcaaatttttaggagagaaaacaatccctactggtttactaccaaactctcacagttatatagaatctattagcactataaactaactcaaaatgcaggcttcagaaaaactgcttcaatagcctcccaatctatctgtcgccttctatgaagtcttcacctgctattattccacaggctgagaattacttctgaaagaaatggtcaattttttcaacagcttggtatgttgacagcttagcaacggtacttgaatcacctctttaaaaaaacaacacaccactaaaaacacacttatcatccatgcttggtatatctcacaacaaattattaggaatg

SEQ ID NO: 158666 - DNA, 1000 bp, Homo Sapiens
tttttttttttttttttttttcttcaacatgatgtttaatattatgcattagtcttgaagtgatgtagggtcaaattcaatgtaaaagccttgcagcatacctacatttcaggccctggaacctgccctcatttctttttatttttttcaacttgcagtctaaaatatcacagaggaaaatttctagctgttcttcctagatgctgacaagtctacttaggagagtaaagatttagagacatagcataacattggtacaagtctctaagactcagactttggcccattcccccccacccctttttttttaactgatgcaaaaatttgaatcccagagaaaggtgacttatctgagtttacacagaagttagttaggggcagggctgggatttcaggcttaggtcttctggttccccatgtagttttcttttcctgttatataccatgcttcctttcctggaagtcatttttcagaccttggtgcacacagatgcagtttctgtattttctggagtgtcttctggaattgcaatctgatcttttgaacttgaagaaaatcctttgaagactgggcagataggaatgtatttcagaaaggtaattctttttactatgcccatcccaatggggaaatcgtagctcttgaggctggaagacatgtcactgttggcatgagccccagctttccactgtatcagaccacgctcctctgggctccctggcactgtgttgtcaagtatgaaagcaaggcacccgcccacaaacatctccgtggtcagcagcacaatcagaatctgatccacttcaagaatgcctgtattgatggcgccagggttggactccaggtaattgggcagcgtgagcccgaagaacatggaaaatcccagcacgaagaggttgcgagaggagttcatgtccacaaattgcaggttggacagccccacagctgtaatcatgccaaagagagtgcagaacatgccccccaggatggggtcaggga

SEQ ID NO: 158667 - DNA, 1000 bp, Homo Sapiens
ttttgaccaaggcaatggacagtttattgaggcttctaaaaagtaatgagtggctctcattatgttaaaatctcttttaattaaatattttgcattttacaaaggcgcctgcagtttctttcactttttaaatctaagagtataacctgtttcctttctgtaatactttagctcatacccagcagaatcaataggtgtaaaaaattaaattaaacttgtattttttaactatgaaacagttttgggggaaacacaaatgtatatatttatattacaaaaaaacattaaatgcctgtacaggtgtcttgatttcataatttacttcaaagatattgaattatcaatttaaatacaaaaatgctacattaaatatacagaataagatttaatacaaatccttttttaatttttcttttcggttggttaagacatttttttttttgtgtggagatgtttacatttttatgtcatccatctccataaactataaacttctgaataggaggggtagtttattttctctctctgtctctctctctcggtgatggaaaaataactgccaaggccatgtttttaataaattagaaaagtccgggaccgacgcagcccgcgttaaatgtcggacatacctttcttcaattcatagggagagtctttgcacaggtctagctgagactggctccgcaacattttcgggtctttagccaaagcgtccgctcggttcaacacggtctggtttaatccattgaaatgagaccccggaccggttgtggggcctggcccgggccccgggtggccatgaaggtgtccgaaggagccatagttcgtgtagccgggatagaagggcgcggtgtagtagagaggccgggacagcaccgtcccgcctggaaaaggacactgcgccgagggcgagcgtgacggcgccggggccggcgacgcccggctgcctcctagggcttgcccggctatgggcccgggacacggtgggcatggagagccc

SEQ ID NO: 158668 - DNA, 1000 bp, Homo Sapiens
ccagaagtaaggtaactttactcagataaaacacagatggtagcagatagaggccacaagctcatgggatgccattccagagggcccctcacccacagaggagcccctgtaggaaggaggcccaggccccatccgcacagcaagtcccggtgaggggctataacacacccccactccagcctctggtcatggacacagcccatagcgggcacagcatcatgatggaatggactctgcaggccacgcatggctcctgggaacccccagcccctcccttctcctcccagcctttccagctgtcttcccaccaggagggctcggaggtcacagcacggaacgtcttccaagagcccctgcctatatttctgcctggatgtaggcaggagctggggctggtgcaggagccagggcaggaaccagagatggggtcaagcaaggagtcctagtccaagcagggcctagactgcggctaaggctaggctggattctgtgctaagaaacagcatagaaacctgcaggcagaggcttccggcccagcctgcggagcacaggatgcagcaggtgatttcttgcccagcacacaagctctggccttatcacattttcctccactggccctagaatgagcaaagagcttgggcggatagcctgagcctcagccagggagcaggctggcctcgagggagcaggtcagcccaggaagggaggggtctgcccatgaccaggtggggtgtggccacagtagctggagattggcagcacccacccgatctcccatccccagggaactttcttccagcttgccaggtgtgacccactccatctcaccgggaccctcacagcagcgtgtcggtgcgtttgctgcgccacaccaccaggccagccatggcgacagtcagaacgacgggtataacgatcagcgggatgagaacctcgtctggggggtcctccaagtggaccctgtccacggtgcagttggagaagaactgcctgtggatgc

SEQ ID NO: 158669 - DNA, 1000 bp, Homo Sapiens
tttttttttttttttttttttttttttttttttttttttttttttcacacaccagcacgtcccacctcgtgctcacggattttattacacagatagtggcggcaatggcctcagcccagcccaccctcacctgcttttccagcccacaaagggggacgatcacggcccagcaaaagcgatgctgagaggggaaacagtccagagtccaacagcagaacttgggggaagcggtcggggtggccaggaacataaactatgtataggggccgggggcttctgcccagggctcccctggaccaggacgccaggtagggcagggaacctcagtagtcctccacccagccattctcagagatgaatgcgtcaataacctccttcatagccaagttggggatgagctgttcctgggtcagggggctccgggtcacggggtcaaaatgacccacacgctgcaggtgctcctcgatgtccttgcggtcgtaggtgatgccactgggcgtgatgcacggctcccgcatcagctcaaagctgatcttgccacacaggtagtcggggatgtctcgcttcttcctcttctcatccacctgagaaaaaagctcgtccatgtccgccatgtacttgtcgtgcttggcctcaatgcaggcctgctgggcccggacgtggctgtcgtcctcatcaccctcgtggtttcgctggcactcttccagctccctctcacgctccgcggcaatgagcctggagaggtaggagtgcagctcgctctcctggtggatgcgccgctcctcaatgctgttccagcgcttcttcttcgcgattcgaagagcgctggggatgtcgtccccgaagttcagccgctgctccttggccaggctgtaagctcgctgcagattggcgatggcctcatcatagctctccatctccagctggcactgccccaggaagaagtgcgccttcacagactgcccgtccagctccagggcgcgccggcagtcggccaggg

SEQ ID NO: 158670 - DNA, 1000 bp, Homo Sapiens
ttttttttttgcatacaaagacatacaaaaagctgagaagtatttattgctgaaaataattgatctttaggaaagaacagtgcaaatctatggcaggttcctgtcacagctaacatagcctaagcaggcacccttgggattagccctatcctcccaggccctggaagaaggaatctccaccagaatcatgaatccctagagttggaagctggaagtaccagggagtgatatttgattgtgggaaaagatggtgagtgaagggtgtggaaggaagactaaataagagagatagagaaggaaaagattaagtgacaggaagagaaatagagacacagaagaagagcatcagagacagaaatagagcctcagggagacagagagattgaggacacagcagaggagagacagaaatagagcctcagggagacagagagattgaggacacagcagaggagagacagaaatagagacagagacagagtgagaaagaaagtgactaggagacacacagagaccaaaaatgagagtcagaaatagagcagtggaaatagccatggcagagcaagagagagaggagagaaaaagacactgacggagagccagaaacaaaaacacagattgaaggacagaaagataaacagagaaatagacagaaacacagagatagaaatgaagatattcagagaaacagaaggagattagaaagacaaatagtgacaggggaaagagagaggaagagactgagggaaaggggtacagtgagagaaactgagaagcaaggacaggttcaggatctaaagtccagaaaaagaaacttacagcaaagcccctaacccaggagctggagtggcagaatttgaaccagaatctgatcagcagggcgagggcaccagcataagtcacatttgtttgacatttaacattcaaaataccaatatttacaatgagaataatcatccacttatatttccataactctctgcaataaagcactttaagt

SEQ ID NO: 158671 - DNA, 1000 bp, Homo Sapiens
ttttttttttttttttggcttacaaagtcctttatttagttcctaccctcttcatctgcatagtaaatcatagggttcccccccacccccaccacgaatagcagttaatcatggctattctccaaaaagctaggtgcaaattaactttatggctccagtctatctaatctgaatgaataaacaacctaaaggtttggggtaaaccacagcacagaagaagcaccagatctaggctccaggctggtctctgccattgctaacagggacaccaattccacagaatcatcagattttaaatggctgtttttgtatgtaccagataaaactagtgcaattttattgctgctggtacttttttttttaaattttgggatatacattttcaattggctactgtaacaaactaaagggaatttacaatacactgtcgtactgttcataaacttcaaaatgagagtagtgccatggaagaaaagagatccagttttaataccactttatggccaataatcagtatttattgtttctcatttgtcaggcaccattctaagctcttttaaaatattcagtcttaacaatcctataggccgttatctccgttttacaaaataaagattgaaataatttatccaaggttgcagagtcactgctgcaatcaggacttcaatgttctgctgcactgtcttcatcactgctttactgcctctcagatcagatgcacgccactacctagcacacaagaggatgtgtgaacacctcctactcattcaacctgaccttgtccttggctcttctccctcggtcttaagattcctccttcacccctccctccatttgcagatctccagggttaattaaacctttctacctctacccaaacccttgtttcctctgaactggttccagcctttaaaatgccctattccccacatgttaaaaacttaagtgctcattgtgttgcctgttctttaaccttttatgtcatggtaccctgatcaag

SEQ ID NO: 158672 - DNA, 1000 bp, Homo Sapiens
tttttttttttttttttttgagaaatagaaaaccattttattcgcatggtttacatttacagtttattagctagtcaacatcaacatgcaaaaataagcactaactacaaacctctacgatacggttctctgtcagctacggtggttcatttgttttgaaaagtcatcagtacttctttcaactgaacgattaatttctgtaatggatagcaattagactctacagttatggaaccatccggcaaggcctctgcagaaatttggtcccgtggatttccacgttatacattctcgaagcaggaagtaaggcggcacacagagggtgtgatatcgaaacgacgcagctacgaacacagccccgcgatgtgatatcgaaactatgcacgtacgaacacagtcccgcggacacgacccgcgaggcaggcgggcgtcctcgaagccagcccccgacggtggcggcgccaggcgttttggcagcagctctcgaatgaagccataagtgtccctcgtggcgcggcatcgcgggtcactgcaggtcagtccggtgccgctgccaccttccccggccaggccagggccaacaggaagtggtgaaggaccagcccgttctccaagtctcatcgttcacagaaggaaagaaactgaaaacacagggaaatcacggactcctatattttaaacgttcttaagtttccctcggtgtttaggtcagtctttaaagaagagtttccttcgcaagttgaaagtacttttcagaagcatcaaatggttgacgtgttacaaaatcctaccaatccaaatgttttcaagtacaaacttatgaaaccttattttctctcttcctaagagtatttatcgttgctcacggatctttggtcgcaagaaacagaaacgccgcggcaggctggagcgtgggacaggaggaaggcgtggcctccccgcccactgcagcccgtccccgaggcgtgcgcttcacgacgtggggcctacatgatgtaca

SEQ ID NO: 158673 - DNA, 1000 bp, Homo Sapiens
ggcaatgcaagagctcagtttattaaatgtgtgcgagtcggacagctgacggtgtcgtccttacgccggacagatggctttacatttagggaaggacaggctttcactatttaccactatttacacgtccgtttaacactgcagagacccggtacagaaacgtggggtggcggctaggggaatcagacagaccaggcgcgcgccatcagggctggaccggggcaacagatggggccgggtgaggtaatgctgtcggagctcgggaggaccatgccggtgggcacggcgccccgagttcagcacccacgtgtggtcatgttgggggccagtggcggtcactgtccatcagcctcaggacacctccaccctccctgcgtcctcagaccctcagctccttaggactggccctggagcattggggggcagacgaggaccccttgtcaccctggtgcagagaggccaggtggccaggcaggggccgcggtgggagggaggccttgcagtgggcgtaccttgagttgattgtccagagaccgcggactgcctgtccccttctggagacagctggactgggcggtgaggtgtggctgtggcccccacggcaggggatggagaaggcgaaagtgagctcaggactcggggtgggggtgggaggcggggctggcagccatgttgcgcaccttgctgctgggcaaggcgtcacgggcaggagccagccagacccaagttctgtgagcttccaggcgtctccccatcatcgctgccaccacgctcccccaagaggtagctctgggagttccccacggcccacatggggaaacagaggcagggagctgggagggcgccgcccagagacttacatatgtggaaggcaatgccgcaccaccttcctgcataaccctggccctgtcaccagcgacctggtggctggcttcgccatttccctaccctttggcaattaggggcgcagcgggccggggcgagtgtgagggtgagcacg

SEQ ID NO: 158674 - DNA, 1000 bp, Homo Sapiens
ttttttttttttttttttaatagttacaaatttaataaaatttgccttataaattacagcagcagccccagggctcagttcgctgccccaagaagcaacagttgggcaaagctgggcagctattgctggagagagttgtctcaagagttcagggctgtagaggtggccagggaccagcatcacctcctccaggacggccacaggacagcagcaggggccaggcagaggctcatgggccagtgggtgcacaaggaacaggagtgggggctgaggccaggccctgtgggctgccgagcgcccctgcccactgctttcctcagtccagactggccatgagcaggtgcagctcgcggaaggtactgccatggcggccgctcaggcctgacttgctcttgaccaggccgctgatgctcttaagctgcttgtagcagagccggcacttatgcagcctctcctccctgctgatatccacacccacagagggtggggccgccagcatgtctgtgatgaggggcagaaaccgctgcaggatcagcttcagggaggtgcagcccgtctggacgtagctctcatacttgctctgcagaagcttctcaatctgtggcaggacggtggtgcacaggtccagcttccacagggaggctttctggttgacgatgttcaggaggtccaccaccaccgacaggtcgttgatggccacagcggagtccaccgacgtcttgatgtcgcccatggtccacacagcccgcacagtgtccaggttcttgtggcggctggtgagcaccacacacatggtgtcgtggcctttgcggatctgtgacatggcatcctcgtccaccagctcggcctgctgggggatcttcacggcgggcaggaagtcggaggccttcagcccgatgggctcgttccgggtggcagggatgatggcaggctcagccttgggtgcaggtgtggaagcaaccactgggggccggggcaggacctccagatttggcaccgg

SEQ ID NO: 158675 - DNA, 1000 bp, Homo Sapiens
ttttttttttttttttttttttcattcatcaaagatttattgagtgcttactgtgtgccaggcactgttctaaagacacagcaccaaacaaaactgttatagaacaggataaggcaggtcatctcccagatacgacactttgataggaacacaaaatacaaataggagagtagaaagagatgaaatacaaagagaaagagctgatattgggcttatattaatattgaaaggccttacatgctagatattctaaatgggagaaacatgctggaaagatacttggcatgaatgaacttatgtccctatgttcagaacagactgctttcccttctctgttggttggctcttctagcctcctaggaacttttataatcaccagtatgatccaatataaatactgcacatatgaaggttcccagttgaggagtttggaagcaaaaagggaaagaatggctggcaaaggcttcaatcttctgtctccttttatcttcccaatggctagtagaaaatactatcatcaaatctcttccttgcaacaatctcccatttgatatttgtctgcattgtgactcaattcctgaaggttctgttcttcattcctttctggtagaatcactggtaaagttgttccgaggcttaagtgcgataacccctgtaaagcgctggagaacggcaaaagctctacaagccggcagggcggttttaaatgcacgtgtatccatatacaaggtctcattgatacattccgttgtttggagtttagacactggctgtaagacgtttttcttttctcctaagcaggacccgtatttgtttacctcccaacgtagactaaatgcctgtgggctggtagctataagacgacccctcggccccacaacctctaagttcacttcacctccgcggctttgcaaaagcgctacacgcacgcgcaagaagcaagaggactgcaaccgaagaagcaaagggagagccctgcaccacgatgattctgcgcatg

SEQ ID NO: 158676 - DNA, 1000 bp, Homo Sapiens
ttttttttttttaatgattgatctgatgttccttttatttataacaatgttaaatgcaattgtcttgtaccgtgagttgagtattacacattaaagtaaagtacaagctgtaaacttgggtttttgtgatgtaggaaatggtttccatctgtactttggtcctctgatttcacatattgcaacctagtactttattagtttaaaaagaaattgaggttgttcaaagtttaagcaattcattctctctgaacacacattgtcattctctctgaacacacattgctattcccatcccacccccaatgcacagggctgcaacaccacgacttctgcccattctctccagtgtgtgtaacagggtcacaagaattcgacagccagatgctccaagagggtggcccaaggctatagcccctccttcaatattgaccttctctgggtttaatccaagttctttaactattgcagcagagacagctgcaaaggcttcattgatttcaaatatgtcaacatcttccagtgaccaacctgcttttgtaacagcttgctttatggctggaattggtcctattcccataatggaaggctccacacccacttgggaccaggaaactatccgtgctaaaggtgtaagcccacgtttatcagcttctgacttcttcataagagcaacagctgcagcaccatcatttattcctgaagcattggctggggtgactgttcccgttccatcagtaagaaagtaaggctttagcttggacatggcttctatgttgctcccatggcgaggaaactcatctgttttaacttcaataagaccttttctagttgacaccaaaactggtacaatctctttgtcaaaatggccagctttctgtgcattctctgtcctgttctgggacagaactgcaaccttgtcctgatcttctctactcacttgccattttgtggctacattttcagctgtaatacccatatgacagttgtgaaatgcatctgt

SEQ ID NO: 158677 - DNA, 1000 bp, Homo Sapiens
ttttttttttttttgcaaacatctttattaatctcatataaaaataaggtccatggacggtcctcggggctggggcttgcgggggcgaggtgcactttataagttacaggccaggctcctgctgaggctaagtatggctatttggagggggctttagggtgggtgctgcaagcagcatttgggggaaggggcgggcgatgctgccctctgtggccaagaggaggatgcaccagcccgtttgaggcgggccacagcggaggaggggctgcccggccagccgagctgaggaccaccttccttgagcctcagcctgtccacggccccacacccctgcagaatccacctgcagaaatagcggctacagcgagaggtcggaggtgacctgcagtggggggcccgggggacgccgacgggcactgcggcggcctgtgtctgcgcggatgtagggctggttccgcagatctgaggggctagaggggcatctcttctcccaggctggcctcacagaggagccgggatgtccgcttgccggtgcgggccgtgaagggcaccgtcttgatcactgtgatgatgtcttcaatggccccatcacggtcgctctcataaatgagtggctccttctgctgcctccgtttcagctcagagatgaggtccatctgtggccgccgggcctttggcggtgacttgggtgctgggggctcccctttgcccggggtatcagcgcctgcctcctgggcagcggcttcttttttccactgttccacctcctgctcagctttcttgtaggccttaatgaagcggctaaagagggagaagaacaggcctggggatgtggtcttggggttctctccgaagtactccaccacagactcaaaggcctcctgagccgtcttgctgtctgccagcagcttgtccatggtgggcgagttggccctcaggaactccttgagcaccatgcagtcatcctgccgcacaaactctctctgtgtcaactctaggc

SEQ ID NO: 158678 - DNA, 1000 bp, Homo Sapiens
tttttttttttttttctttttttttttttgagactgtgaaatctgatttattagataagtgtaaatgtgtaaatgtagccgtataataagtactcagcctagcctcagaatctaaagttgtcaatttttacaatcaagtcttgattctcttatttctgtcttgcctcaagcttacaggccccaaagtctcagttgataaagtgaaaagtgatattttccacttccgcttggcataagacacaactttagccctccctgatctctttctgcctctttcttgaccttttcccagtaaccaatatatttttctttgaataaagtaaaatgtatttttgacattcctctcattaaatgtcaaccatgttggcaggttgtatagggatggacaacaaagatttttattggggcaatcagaggatgaaacatcattttttacacgtcatgaaaaggtctaggattataggacgctgctctgctcctgaaagaattgtctacctacactaagaaataacagaatagggaggtgttgctattgtggtcacctgaagcttgaggaaaaaaaaaaaagtagtccaatcaaaagaattctaaactttcccccaagttgcaagaaattgtctacccacattttctttcaaatgttcctttcattgtttcattcctttaatgtttgcagacatagattagtaataggacctagattagtaatgtttgcagacatagaccttagtaatggtctgcacatctgaccaaagtgacaggtttgaggattccaggcagcttgagaaaaggcaggaaaggccagaaccagtgtcaaagggtcagggttgagcacaggatacatggaagctcatcttccccagcaagagggaactcaacagctcacatctacaggcagcaaagggggctgcttgtccctgagagtaaggcataagcccagtgttcagactcctgaggggatgagggagtagtggctcaagcctgagccccagaatgagta

SEQ ID NO: 158679 - DNA, 1000 bp, Homo Sapiens
tttttttttttggtaattagcacttaattttaattaaaatcaacagttcaggagaagataagatagtgtttaatatcaatttctgagaaatcacatttatataaaagaaataaaacaggccagcagaagtccaaaaaagattcagcttacattattgcacttggatgaaatatgctatttagagtagtataatattcaggccaggccaggaggagaaagagaaaaatggagaggacaaacctccaggtagtatttattccggattccaaactctcctgcggcctaaacagtatttagtctattggaaacattcagcaaggtctttacaaaaatgactgcagtatcttcaacacatttgagttgcactcatacttcgttccagtcatgtgcaagtttaatgcacagctctacctcacaaaacgggatatctatgacaccagaacttccctgtgcccaaggtcatggacaggaggggaaggcagtgaatttctactttatgcatattttagggagcaatactgtggctatcatttacccttttgagcaatcttgattttggtcatttataattagaacatgagaaaaagtgacagtgaatacaaatgagtactaaccgaattcctaggctggtactagaaaataaaataaaaattgtaaaaaagtcccttgccatgttcacaaaggtggcaataactgtatatataagaaaaaggctgtaaacttatagaaaagataaactctggcttctaaacaaattacaaaattgattttgcctttatccttgagtgtaacacagaaaaatgtaaacctgtagacctagttaccaaaagacaattatccttcttagctcaggtatgaacttaaagtttggcctgagctagtttgatcttcaagttttctccaagtttatccatgaactcaaatgtattcaagtagtcagaacgttgcacattgggtaaacctttaatgcaagcagccaagtccttggtcatgaagccag

SEQ ID NO: 158680 - DNA, 1000 bp, Homo Sapiens
ttttttttttttttttttttttttttgagacaggttctcatgctgtcacccaggccggtgtgcagtggcacaatctcggctcactgcagccctgacctcctgggctcaagcgatcctgcaacctcagcctcccaagcagatgggaccacaggtacaagccacaacgcccggctaatttttatatattttttggtagagacggagtctcatcacgttgcccaggctagtctcgaactcccgagttcaagccatcttcccgtctcacctcggcctctcaaagtgctgggactacaggcgtgagccaccatgcccagcctaaaaaagggagaaatttctaggtgcatactgcctgctggactgtatagcccattacaacatctggtcactaagaacctcctattaattccttacttgcattctcaggatcaagacaaaaaatatgagcaagcaaaaacttatcatcaagcaaaaaggtatctatctattaaaatagctagatatttcccaaacacccctcctaggatatctgctgccaataaaaagtttggggctagtgaaaactcttggcattaaataaaagtaggaatctatttcattggctttctctgtggctcaaactatggccatggaaaattatgctctggatataattgtgaatatagaggtctttaaactgtgtcattgacactattcctatatcacataaagttttatgttacaatttatactgcactggagaagtagctaaagggactatttgccaggaagcttctagtaaataatttctacaaatttgtaaaataggagttgtctacacttaaactggagaattctacagcataaatggcatttctattattagtaaacctggcaaatctgtgtgagctctttattaattgggatatattccatatccattctcactcatatttttagaaaaatcattcttgagtttattttttttctttaagagacaggatctcattctgttgcccagagt

SEQ ID NO: 158681 - DNA, 1000 bp, Homo Sapiens
gtgccataaaaaagaaaggctctagccctttaccaatgaggtgatatgcccaggctatgcctgtcatcaaatccataagcatactgatgatggccatgagaaagtccagcacacaaaccatgccccagactgcatctgtgcatacacagagtaaaagccctgctgctatactataaaatggcacctgaaaataatctctacggtatgtttgaaaattggcaggttttttttttttttttttttttgagacagtctcactctattgctgaggctggagtgcagtggcgcgatcttggctcactgcaacctctgccgcctgggtttaagcgattctcctgcctcaacctcccgagtagctgggattacaggcgcatgccatcaagcccagctaattttttgttatctttactagagacggggtttcaccatcttggctaggctggtcttgaactcctgacctcatgatccacccacattggcctcccaaagtgctgggattacaggtgtgagccaccgcgcccggccagcatagtatttttatttataacgtgaaaaaaatgaaaacagatacttcactacaaatattgaacccaagttagaaaatttttatgcagccaaaccatgactttaagctctatttacactgatggcggccaactgagatgcagaccacacccatgtggcgtgcagcaagcaggacatgcagggagccttccttgctcacaaggcttcagagcaagcgcacggtcttcccagtcactgtcaggaaatcatcatctgccagggcacgcagtgcttcttcaaacatatctttagtaattgctatgtcagattgtccccgaatatcttcaaaaagttgctggtattttagagctggtgttttgcccttagataaaataagctttttcaatgcttcagctaattcttctttccgtttacgagaggtggcactcatccccgtagtaagaatagatatgtccacgatgccagtccggggatc

SEQ ID NO: 158682 - DNA, 1000 bp, Homo Sapiens
tcgcgagcttccttctggattccgcagcgcgagaggccgccgcggaaactccccgggcgggcatcggagctctggggcggggcggccgggctcagagggcgggcgggagcaggcgggcggcgagggcgggcagcagcagcgggagcaggggcgccccgggcgccggggccgctgcgcccgagcactgctgagacgacatcccttccagcgccgccacgtagtccagccccagccagccgcggtaggtggttttctctccgacaggcaccgcccggacggtggcatccttgaaaagcaggtcttggccatgatagttggaggagtcgaacattttgaacccgttcttattgtggtcgtctccaaacaggtcctgggccttgtccagcagtccatacacggtgaagatgttggtgtcgggccggaccatcacggcgtggggtggtatctgtgccaggttgcaggctgcaaactgggacacctcggctcgggccccgttggggcacagcagttcatagtcctctgacctgagctcagcagcccagggctcggaattgtggccgtttgtgttgtcaaagacggttgtgtgcctgacgaaggcaacgtcacccgcattctccaccaggcacctgaaggcgccgcggtagccgtaataccgctcctggctgttgcccacacacttgttgcggccctgctcgtcccccacgcacagtgcacacagcgaggaggggtagttcttggggttgttcacgggcacgcagctggcattgaagaactcgctcactgctgtgaggacgtcacagtccttgggccggatgaagcctctctgaataagggcacccacggggacatcccagcctgcagggctgccgaaaccggcgtggcaggagcgcttgccccgaagctcatccaaggtgaaggcgtgggagctgtcccgtctcaccacggccaccacgtagtacgagttgctgctgtcttccggggcatagtgctcgccggctgc

SEQ ID NO: 158683 - DNA, 1000 bp, Homo Sapiens
ttttttttttttttttctatttaaagagtaaacatttacggtataaattatgcacacataatagtagacacagagtaatgcataacggtgtgacggggcgaggggacctcaaggtgacaagaaagctggtcctgggctggtcaggaggagtcatcaccaagatactcactcataaagttcacccatgataatctaattactgcacatgtaatatattaaaatatattaaaacataagaaaataggacaggcatggtggctaatataataaaatatattacaatataataaaataggccaggcacggtggctcattcttgtaatcccagcactttgggatgccaaggcaggcagatcacctgaggtcaggagtttgaaactgggctggtcaacttggcgaaaccccgtctctacaaaaaatacaaaaattagctgggtgtggtggtgcctgtctgtaatcccagctattcgggagtctgaggtacgagaagtgcttgaacctgggaggcagaggttgcagtgagctgagatcacaccagtgaactgcagcctgggtgacagagtgagactctgtctcaaaaacaaaaacaaaaacaaaaacaaaaacaacagaaataatgataccaattaatatggcactgttaagggccccacaaccctgtattggactgaacaaagggcgaacgtgggaataaagagaaagacaaaagagtatatttggaacaaggggtcagggggcttcttgcttctcgtgaacaagggctctgatcttccacagcccttcgtatttattggtataggagatagcaagaagaggggtggaagaaggagtcagctgctgggtccagagtaggcttgtaagactgcattcctcaaacaataggctctagatgacccagtagataactccaatgagcaccatggagtgaatgccctcagcaaaccttctgttggcaggagcagtcgtgagtttgcccacatcctgcattcatgataaacaa

SEQ ID NO: 158684 - DNA, 1000 bp, Homo Sapiens
tttttttttttgatttctcgaaatttttattaatttttttgtttttttacagcttgatcctcttatgaaaaggaaagaatttaaagatgaacaattacatttttgtttaaacagcaattaatcctcattacagagaacaaaagatctgtggcacattgtctttggaaagatcttttgcagatttttcttctaaaaaaaaactataattctctcacagatcacatattctttcaaacgactatacaaggcagctaaattttattcacaaagccccaagttgcagttccattgctgaagtaggtaaaatacatggagttccccttaatttgtgttgcacatcttcccattgagagcatcactgcttccctaccctatgtacaaaatcattgtgttgatgatagctggcacgttattccacagtaattaaagaaaaacttattaaacataggccagtgattttcatttatcaactggaaaatttactcctttttaaaacaattttaataataccaagatttgactttcctccaaagttataagaaagcaaaaaatatataatataatataatatataatggtaataaataaaaaaaaggcaaccctgctcaggtattatccaaaacatgatcacattcagaaaaaaaaaattaaaacaagatttgggacacatgcgtgcgtacatacacacatacacacacacaaccccaacatgaacagtgtatacttgatatctgagggggatatgcagtaattttaacaatacatgtcgatggcctgaacaaaggtgaatgctgcctgtgttaagcattgcttaaaaaatctacttttaagcaaagcaagttgccttccttaggtcagccactgcctggtccgaccagtgcagcttggccagcctcactatgagtggtcttattcccttgtcctctccaggccgatatactaatatataggctcacaaggagctgtagggtttccctcctgccctcttaggtagagaagt

SEQ ID NO: 158685 - DNA, 1000 bp, Homo Sapiens
ctatccccatgggaaacacgcagaagctaaaatagggaccacagatgggcacagccaaagcactcccccctttaccctcgctcttcgttcagcctccaggcgctgcatgatcagcatggtgtccacatcatcgtcctcctcctcctcgtcatcttcgtccttctgcttcgactcctggagtctcttctggaactgccactccagcatgagcttgcgcagccggtcgctctcctcggcgctgcggtccggtttgctctggagctcctggatctccttgctcagcatgtccacgatgtgcatctgctgctgcttctccagcttctccttggcgtcccgcttccacgggtcgggggacagactgtcccccgaggaaagctcctctttgctgactgtaatgtactgcaagtctctgcgctcgatcgtgcggggctgctgctgaggctgcagctcccgaatgactgtttcctgtggccgctggagtgtggaaggcttttcgggcttcatctgctgtgcagtcaggggagaaaacggagcagggtttaaggactgagtgcgcatctggcccaacttcctctcctgctctctccgcttcctctcccgctcctcctccaggggggccttctccttctcataccaacgctgatgttcttctctctttctccgttcagcagcagccacctgcgcagacggcagccctatctggttggcggaagggggtggtgggagaggcaaatccatggacattccatcgaaatcaccggcatagtggactggaggtggcgggggtggcggaggcaggtctgttcggattggctgggagacggccacaggggtggccggtatggctgctggtgttttccaacggccagggccacttttggtcagtgtggaagcaggggtgaccgacttagaggaatggttcagatgctcctggctagaggtactggagtccagtgaggagctctgatttatccacatatcactatcagactttcggtcc

SEQ ID NO: 158686 - DNA, 1000 bp, Homo Sapiens
ttttttttttttttttttttttttttttttttgtcgttgccaaaaatatacacatcttcttttctttattaaaaaaaaaaaaaaaacccaacaacaaaaacccaaacagaaacacacacagaaaaatccacacatgcaaagagactgacaaggccggagcctggggaagctggaaacccctaccctgggctccaaccccagtgcaactgaaacagggacacaggcttcgccttgcctctcgcctctctcctgactgtccactcagcctctgtgccaaaggcctgggcaggcggggactctttgaaggtgagaattgcccactctaccctggggaaatagctggtgggtgaggggacagttgttagtcagcttagtggctcccctggttggtgggggtggggtgcaggaggcaagctggctaattctgggagggaggcttttgctaaaagcagtggcatttccccccaccttacgccctcccccaagccctggggctccccttgtgccagagaaggaggaagctatcagtggggtagggggccctaagggggccctgagaccatgtggggtcaggggagggaaggcaggatactaccctgattcaaagccctgtgcccccagcgactctccaatattggagtactgctctggtgtttgttaaccattcatgcccccagagagggaccaaagttggtgaggtggggagggtgcaaataagagctgggaggtcccctctctggcgctgcttcatctgaccactgcgcctatccctgcccttggctgccctgggtccaggaggagagagacaggcagacagacacacacacacacacacacacacacacacatgcacgcacacacacactcacacactgagacgggcagctccatctccccaccctcggcactcctaagtccaatagtgcaaacaaagggcggggcaccaaggaaggccagagcctccccgcacctgccctctcctccccatcacggggcccca

SEQ ID NO: 158687 - DNA, 1000 bp, Homo Sapiens
ttttttttttttttttagaaaacaactgtgtttaatgacaatcctcagtttaaaaaaaaaaaaagaagaagaaggtttatacacactgtacacacatttacaatggctttggaggatagcagtgctgcgaaaagggcttcaggaggatccggcctgggacaggattgaggtatgttgcagcctccagggcctggggtctcctgcatgaagaatacccctccccatttgactgtgaactttttggcctggattctggagaacagatttccaggattgtcagccagaaggcagacagatgcaggcacctaccaagacctgacctcaggaagtggccctgccctacagcccagttgctcagccagggctgaaggccatggggccccagcacccttgcttcagtgccagcccctggaaggaacctcacaacagggatacagcaaggacactccagttcccccagtcctgccatggtgctaccctgagggacagggatggagacagggcagccaggtttgccaggacctgcatagcgggcccaagactgcccttcctcttaagtcatgccaaagcctccctgcccagtctgagacagtcgctggcaggtgaccacgacctgcgtggccctcccggcagttgtcatggtggttgtaccccaccccatccccctgaggagacatgggctcagtcccatgcctggtgcccacagccacaaagatggccatgggtctctagcctgatattcgtggcctggcaggggtcagcacccctgagggcatccaagccatggtcagaggaaagtgttggcaggctcggcacagccaaagaagtcaggacccacgagacgggggaagccttccagagccttcaccttcacagggtcaaacttccagtagaggcggccgcgcaggaagtaggcatagccatcagcatcctggaaggcagcgtcgatctcagagggcacccctctccagtcagtggccctgcggggcacgggactgtc

SEQ ID NO: 158688 - DNA, 599 bp, Homo Sapiens
ttttttttttttttttttcatgctgttcatgggatttattgtcattcctccaaggtcagcaggggaaggggacaccagccacacttcaccacaggcataggtggcactgagccacctggcactatctccacgtgctccacacggaggggtgccttctcactggcagcagctgcacttctctgcttctgcctcagctgcctctccgcctttgcacacacagtccttggcacacttctcacactccgcagggcagcaggagcagcagctcttcttgcaggaggtgcatttgcatccctcgcacttgcaggagtccgcgcaggtgcaggagccaccagaagggcaggggcaggtctcagggtccatgtcgaggagagcagcagctggaggcggtgaacgggcttctccaagcaactggacgcgcggcttggctagtggcagcaggtggcgatgcttttatagcctcgggcgggggcgcgcatgccaagcccgctgggcgcccgcccctgcgcaccgcgcccgctctttccgtttgtgcgcttgggctccggcgcacgcactgcatctgtcgcccgcccctgccgtgtgtgtgcactgccggg

SEQ ID NO: 158689 - DNA, 1000 bp, Homo Sapiens
gcaaacttgtttccttttattctgtggaacgtcactaaagtaaacagacatgcatgatttatgttaatttatacatgatgagaattaaggctgaaaatgacttctggggaaactcctactattagtttcagatcttctgggcaggggctgacttctcttggcttacttatacttcctaactcccagtgggcctgaatagacactggccagactttcaaagtagcttcttgaagatggatggtgatctgtttagaataatccattcacctgttctgtttcagggtccaaatcaatatcataaaaacagggccgggtggggagtccaggcattgtgctcatcgttcctactaaggggtacagaaaaccagccccaacgctggcgcggatgtcgcgaatgggcagaatgaagcctgtagggacacctttttgctctgggttgtgagacaaagacaagtgtgttttagccatgcagatggggagattcccaaagccctgcttcgtgtagacttcagctttgtgttgagcttcgggaagtaattcaatgtcatctgctccatagatcttctgtgcaatgatcctgattttatcctcaactgggagcttgaggtcataaaggagctggaagctgctgggtgcttgtgctgctctctggacggcctgagccagggctaaggcacccttgcccccttctgcccagtgagtgcacttcacggcatcaaaagccccatgttctctggaaaggcggctgatgaggtccagctcagactctgtatccgtcttgaatgcattcacggccactactactggaattccaaacattctggcattttcaatttgtttcttcaagttactgaagcctttttcaaccagctccaggttctcctgtatgtaagccttgggaagaggcagtccagcagtgaccgtggggccgcccccgtgcatcttgagagccctgacagtggcaacaagcaccaccacgtgggggcagaggccggaatac

SEQ ID NO: 158690 - DNA, 1000 bp, Homo Sapiens
tttttttttttttttttttttttttttttttgtgaggcacagaaaatctttattgccacaggaagcaagtgcattcgtcccacctcaccaacagcttgaagagtcacaaaaacgtggacatcgcacaataaagtgtaagagactcggggagaaatggtcccttggactatattggctgtaatactgaggtaaccaattgaccttgttcagtgaaaatacctctaacaaaatgaaaaaatcaactaattataacttccaattcacatatacaattcaaataaaaatatatattatttgctttaatgtatagcaagtttaatacattagtgtttacaaaataaaaactgtattctactgaaatttttcttgtgcttccaccttatcactaagcttgaaagactagaaacataagatagttaaggaaacttattatgaatttaaagatgcaatctgtgggtccacaacgaatggataaatattggaagttggaagattactgcatcttttaaaattgtggcttatgaaaatctacaaacttgactgtaagacacaattaaaaaaaaacaaaatgtttcaaaatagattagaatacaggaaacgtttcatgaaactactgagatatactaaccagtgctatggctaatattaaaaactgaacagtctattgaaatcgtactcatactatttctacacacagtgaacaatacaaccacaataatcaacctcaagctagcaacaaagttgcaaggtccataagaagcttcttcagtgagcaaaacactatggtacaattaaaacatttaggaaggggaaaaaagccttttaacagtataaaagttgtttactggcgtttcctactgtaaagtacttctacaaattaaaatgaagaagcaatttatatacgtgacagtgatctgagactacagtgcagacatttcatctaacatttggctgacaaattttagtgtaacagattatgacttaatattttttacaatta

SEQ ID NO: 158691 - DNA, 1000 bp, Homo Sapiens
tttttttttttttttttttttttttttttttttttttttttttttttgctgactcaatgtttcaccactttaatagaatattctaactattctgtacaaattgaaaacactgtattcagttacaaatgtgttctaaggttaggccgagcactctccacaggcctggtcagtgcggacacggccatccccggctgccggagagcgccgtcacccacttgaaaaccccacccaccagccgccaagcggtcacaccaaacccaggaccttcagacaggatgaatggtggggccccgcaatggggctactgagaaagcaggacttgacgctcatacgctccactgaaacgcaggacttcccagcccagtccctcagtggagaagactgccgaagcccggctccggcagcagggtggcgcctgcgtcatgaggacgggctcgcatcttcagccctggtggcagggagcggcgtttcttccgcacaggccttgcgcctgctaggaagtggcacatcttcctgctcagggcaccaaggtggttcagaaacgttaaggacgagccacagcgaaaagccgcagtcctcacaggcaagaagggataaataaatatgaggtgacccgcagcagctctcacctgggctggtgtgtcacaaccctgacccacccctaaaaaaaaaaaaaaatcaagaagcaacatcctaaggagaacagggccctactctacacagccctttctgagatgatcggcatacagcaggtgatgcaggctgcacactcagcagattcagcggctggaaacagcaagtgggtttcttcggatgaaagggaagaattcagtccaactgcaggaggggtgggagaggttccagatcctgggaaccacatcaccagacctcggccctttttgccaagtgacccccaccccaccctgatgtggtctacagggccctcccacagggaaaggcccagggaagtccagagctacaggcaccaaggctgcagagg

SEQ ID NO: 158692 - DNA, 743 bp, Homo Sapiens
tttttttttttttttttttttttttttttttttttttttttttttttttttttttttgtgtttcaaggaggaagctttatttgggaagagtgcggttctgctcggccctgatcagctctgccctgcccaccccatctcagccaggcggctttacttcttcctgatcttcaggtctttcttcttcctgatttccttggccagctccccaatcaatctccagtactcattgaacttgagctccgagtcctgattcacatccaagctcttcatcttctcatcaagagagcccacatccttgagcagatggggcaactgctgggtaaccagctctttgaactcgttgacgctgaggctatccttccggccctcctgccttgcaaaggtgaagaaggtggtgaccacggtctcaatggactcctctagctctgtcagtggttctgctgccattaggaccctgaggccaaagctgatgtcctcaaggggctagctgacctttgtcagggctgacccggcaaggagatggggtagagtgagctggagcctcagggctgaggtttataagcagcggggaaggaggagagagctgcttccaagcccggaggtgtcaaatttccgtggtcgattcgggctcaaccagcacagccagccacaggtactgcaaggcccagcttggggtaagacatccagtgtccctcccaggacctccttcccacctctttcccctgcaccatccactgctgcct

SEQ ID NO: 158693 - DNA, 1000 bp, Homo Sapiens
ttttttttttaatggtcttttttttttttttaatgtttcttcctctgtttggctttgccattgtgcgatttggaaaaaccacttggaagaagggactttcctgcaaaaccttaaagactggttaaattacagggcctaggaagtcagtggagccccttgactgacaaagcttagaaaggaactgaaattgcttctttgaatatggattttaggcggggcgtggtggctcacgcctataatcccagcacgttgggaggccaacgcgggtggatcacctgaggtcaggagttcgagaccagcctgactaacatggtgaaaccctgtctctactaaaaatacaaaattagtcaggcgtggtggtgcacacctgtaatcccagctacttgggagactgaggcaggaggatcgcttgaacccgggaggcagaggttgcggtgagccgagatcatgccattgcactccagcctgggcaacagagcaagactctgtgtcaaaaaaaaaaaaagaatatagatttttaaatggcttttacttttatattcgctaaactttctcaaactggatcctgcttattacaggaaagagttcttggttgttttctccttggccctatccctgatttacccttagagccacaccagggtatgttgaggtgatccagtatatggacagaggaagggaaacagctaagaatgactccagcccccatcctatgcactcacagaagcttcccatatcctcttggagagagaggaagaaagtttttccttttattccttatagtctggctcccactaaaatatgtcaaggcataaagtcttgctattccatcaattttagaggatgtgacaaggggcctttcctttttctcaaaccaaaacggttacagaccctagatattccctaagggaggaagagaaagcttagagagagcagaagaaaagtcagaaggatccaaagtctcatagaaaggcactggggttggctctaggatccttct

SEQ ID NO: 158694 - DNA, 1000 bp, Homo Sapiens
ccctgatctctgcattgggaaggaaaatgcaaaagtggaaagagttggagagaagaggagattaagcttgagatcgctgttggttttgatttttaaaaagatatttgtgaaagtccaccattcctttatgcgcaaacaactccagaaacaagctgcaaaaatgttcctgatttctatttacaagtgtccctagtcgctgcagtggttgctgctccaggaatcccttcgaggccccagtccctccccacttaggaccccaagtccaccagactggaggtgagggggccgagcagagagtcttggagctgatgctggtgggtctgcaggccgtgactgggctgcgaggctgttaagcccgggagagaatagtttgagctcctggcgtggcccatattgccctgcagcagaaggaccgagttctggtctggactttggggaggtgagaattcctcttctgagctggacatgagcggcttgcccccttccagaggagagagttggttctgcttgttggaggaggagttattgttttcggtgttctccctttccttggcctccgcggcccggtctctttgcctccggttcttaaaccagttgctgacctgggtggtggtgaggccggtggcctcggccagctcccgcttctcacgcggcgatgggtagggattgtgcgcgtaccactcccgcaggacacccctcgacttctccttgaagcagtagctggtctcctcgccgtcccagatggtgcgcggcagtggaaattttcggcgcacccgatatttgcccacggcgcccaggggtcggccgcgcagcttctcggcctccacgtaatgcgccttcagccacagttgctgcagtttggggtggttgtgaggcgagaactggtggctctccaggatcttgtagagctcacggaagttgccgcggtggaaggcgaccaccgccttggccttgagtacgctctcgttcttgtgcaggtggtcgcaggcgggcagtgacc

SEQ ID NO: 158695 - DNA, 1000 bp, Homo Sapiens
ttttttttttatttcaagaatggtatttatttccgacattactgtagaggcacacattggactctgacgattccccttgcagcagacatttgtgaagctgctggtcggcacacccatcaatcagtgactcctgcactgcagaggggccacatgcacgatgctcacgtgtgcacaggggggaggacagcacccccaccaggcagacgggcccagaaacagcatctgcccagcactccagaccatgcctgccaccagggcttctcagttctctagcatttgaacctctgatttaacattcatctctctccaagactgggtggggcactgcctgtggccagacgtctcccacagcagggacagcaccaggcaagaagggggcctggtctccaggcaggaggagtgcagcccacctcccctctggctgacccctgggcagtgagcctttccatcacccctacacacatcaggctcagagacaaaaggcaggaacttcttggtacatgattttataggaagcacatttgtgttcaagtgaaggcagaggcgtccaccccaagtcaccagagcgcaggtgcagagaggaaaagctgtcagctagtgccagcctccaagggccagcgctacccttcaacagctggaggcaccactgtgcgaggctttccacaccggcctccctcaggaacaagacatcctcaccaggcaggggtgaggtatgggctccaggactggcttcagcaggcaccaggctggggcaccagctggggcctgggtacgcccagaaggtcacacagacggttgcgctgctctctcaccactgcaagctccgcgtcccacgcagtgtcactgagcacagtcaccacctcgtccagcacatccgcgcccacgacgtcactgtaggtgagcaatgtctcgtacacctggctggccgtggtcttccggatcagcgggaaacggtggcagaggagcagacacagctgcaggagggcctgcctcctcacgt

SEQ ID NO: 158696 - DNA, 1000 bp, Homo Sapiens
ttttttttttttttttttcgctttctagcgttttattgttttcttgcgtttttgtcgtttcgttctcgctccggagcgaaaagtgaaaacctgaggtggagcccgcgggccgggcgagccaaacccgggcggaggggccgaggggccgaggggtcgaggggccggcggggtggtggctcctccagggctctgggccttctcccgcagccaagggcccccccagccctgtacaatatagatgctcacgtaaaatgaaaaaaactttaaatgtatgagttaatctctaaatatatgtacacagcaatgtacacctttgaataaattaataccaatttgcatattctgggaaccttaaagcttatttacacaaattaccatttatttcataaatatcttttttttttttcccctggggactcaaggcagaagtgccactccctccgttgaccacggctgggaggggtgcctgtctcttcagggaagaggtggggagactaacaggttccctcccagctcaggtctacactgacttcagtcgtaactggttccagcatccctcaacccagttttatcacgcggtctaggcccaaggtccagggctctgggactccctccgatgctcccacccctggcccctgcaccttctggcttctgcagggaccgctgggccctggatgaggcctctcccacctcgctggaagaccagagacaccttcggatgccaccttgacgctggagcggatctggacctagcccagcagctcccaagtgactgtgtttccagcagcctgatccttgttgaggcccagggaagtgtcccaggccccgacttgccagacgaggctctattccggctgctgcagcccacttttctcctttatttaaataaatactcattctgtgctgtacacgtcccaagcagcaggggcaggcagcccgggtggcctgcgtggcaggggagcagctgggcagcccctcacttgggcgactcccggcctgg

SEQ ID NO: 158697 - DNA, 1000 bp, Homo Sapiens
aactttctcaaatgacttagatttaatcatcggaagcaaactaaatggaaaccttacaatagagaagaattacatgtcagtgtcttttggaaaactgagctgggacagaaagggactgggggctgccccccaacctgatcccttctgaacaaagacgtccacagtgttcctggcactctggctcaggaaaaggggagactctgctggttctgtgcattgaagtagccttgcctagcactcactcctggccagcatcaggagccccgccttgccggctctggtcatcgcctttctttttgtggcctgaaacgatgtcatcaattcgcagtagcagaactgccgtctccactgctgtcttataagtctgcagcttcacagccaatggctcccatatgcccagttccttcatgtccaccaaagtacccgtctcaccatttacaccccaggtctcacagttctcctgggtgtgcttggcccgaagggaggtaagtagacggatggtgctggccccacagttctggatcagggtacgaggaatgacctctagggcctgggcaacagccctgtatggccattgttccacaccagtcatggccttggatttttctgtcaaggcatgggccacagccatctcggaggccccaccccctggcaccagctgagggtccaggagaacattgcgacacacttgcatggcatcctggaggttgcgttctacttccgagagaatctctttgctagccccccggaggagaatggtgcaggccttggggtctttgcagtcagtgatgaaagtaaagtattcatctccaattttcttgatttccaacaggcctgctcctgttccaacatcatcttctctcagttcctctggtcggctgactatccgggccccacaggctctagcaatgcgattattgtctgtcttccggactctgcggatggctgtgatattggcccgcataaggtagtgctgagctaaatctgagatgcccttttc

SEQ ID NO: 158698 - DNA, 1000 bp, Homo Sapiens
ttttttttttttttttttttactaggcatgtccatgttttattttctttaggtgtttttctggaaaattacattttcaaggaatcagcccttacaaacagagctaatctttcaaaaaataaaacccagtatctagattctcaaaacttacaaaaccaactggaaatgtctggttgtcatgctcaattcagtttcacatcacaagtaatcatctataactatttcagtaggcaaattccaattctaaatattactaacgattaccattgttattctcaactgtgttgacaattgtcttattgctgaattgttcataatacatcttctttggcaactttattaacaccatgggacaactaaaggtctggattaacttagtatttcaaaacttcattataattatttaaaagtaaatgctagacttaaattatttaaatttaaatgctagatttaaattatttaattttaataaaatttaaatttaaatgctagaataggaaagcctccaaacatgcctaatataacaaaaacaaaaattgctaaataatcactactaaaagcatttccattgtatgtacaagtatataactcaactttaccaacaaaaatattataatttagctccaattctctatcagacctactgtgattaaaaaaaaacaaaaaataaatggagaaagcaacatctgggcacctgtcaaatttttatggaaggttgttttatataaattttaaatggcttaaaatcagccagaatgcgaatttttcactataatactttataaacttgtactttcttttttctttctttctttttttgagatggagtcttgctctgttacccaggctggagtgcagtggcgcaatctcggctcactgcaacctctgcctcccaggttcaagcgagtctcctgcctcagcctcccaagtagctgggattacaggcacataccaccatatccagctaatttttgtatttctagtagagacgaggtttcgcc

SEQ ID NO: 158699 - DNA, 1000 bp, Homo Sapiens
tgcaggttccaccagaggcttttatttcagccactcaggaccctggctttctgctccaaggcactgaacacagtcaggctcttctaaacactggcagggacctcccccacagccgcccccacagggttctctgtttcccaagtcctgatggattcaggcaagaccttcacacattcacccactacctgctggacaggagggtcatgaggcagcctgtggtgcccagctcagtgtgacacactgccaatgtgccgcctcccccagcctctgatggggccgggccttgaccacgtgacaggctcaagctgccgtgcacatcccccaggaaaggggaagagctgctaaggtgtagcagtgaccaaacaaataagaaatgctactgtggaggttacacagatgcttatttggtttttaaacaaatccaacacaaaagaaagaaagagggaacagggtgcttgaaggtgggggaggagagggaatctcatctgtaaagtgcttttccagacaccggaacctcctagtctagcctggcacacccatgtcactcagaaaggtcaggctcagggtggagatggcatgcaattcccaacacacttggtattcagagtggacagagctacacagcagccttccctttgtcggggtccacgcaatctacacatggtcgcaaggtctctgcagccacagtctgcacacgtgggcacaggcggcactggtgcatgcctgtcgggctggggccacactggggaaaggcctcatggcaacatgcactggaagctcctcgtggcggaccatcctcaggccgccgacaggaatgggaagaaaaagaagtcgaaggcgaacttcacggcgccatgcacggtgctgcgccagtcgtgctcgatcttcacgtgccgcctggtgggtgagagctgggccatgcagttgaggcagctgatggccttgagctcgaagacaggccacttgctgcccaggcggccctccaggatggtgctgaact

SEQ ID NO: 158700 - DNA, 1000 bp, Homo Sapiens
ttttttttttttttttttttcaataaacatgtagatttattttaagtcagtttggtacatgatacagattggttttgcagtttttaatgaactgaaatagaaatgtctaaatacagcagtatctgcctgtgcaacaaatatctgtaaggtaaaataaggtatttgatagaagaacatctgcaagaacaaatcagatgaaaaatctgaaaaggtttctatataccttctggattttaaaaaaacccaaaaattaatggctcaagatactacattgctaaagttaggggaaaaaagtaaaaaggctgtgagttctgttgcaagagctcatttgtagacttgcaaaatctaactaattttatattatgcttgttgttagagcagtgctcaaaattacagaagcttcaaattgttatgttttcacaaaatttgctacatatgttgacatgaatgtgtgtcagggaattcatacccaggtaaatgacaattacatcagtatagctaatttttgccaccttgggaggaatggaattctgcctattttcgaattaatcctacagcactcactaaaaactaacagccatggcaccataatacattttgtgaggtacctagaatattactaatggaaacaaaaaatgtgaggtaaaccgacctttccccaagaaactttgaagccagagattttaaacaattaaggcacttgaaaacattaagtatatgtacaaatgtgcaagtaaaacaaacagctgtaccaacgagtaacaaagaaacagtaaatcttcatcttaacaacctttaatagttatctaaatgcagagtttgtttatgaaatgaaacaaagcagtttgtcatttcttactataaaatattgaaaatcaagtgcgaaactcagccactattggctaaagaaactaaataaaaaacgttaatgacctagaaaagcaaaagcccattttaaactacttaaagcctctgcactagtccaatgagtcaaaggcaa

SEQ ID NO: 158701 - DNA, 1000 bp, Homo Sapiens
ttttttttttttttttttgtggggggggggttatatgggtttaatagttttttttttttttttttttgtggggggggggcagcagcgggaggcagtggtgcctgtgggaggcagtagtggctcgtggccagaccagggctcggcagcagggaggcagctctttagggagaggcacaggcttaggtagcaagagacagatgccaggagaggggcccttcctcagggtccagcctcccattctgctctgccacgtttaccaagcagagtctcggggcatccgctgtaaccatggtggtgccaccactctgctgggtacaggccatgttgctgtatctgggtgcagggacagccaggcacagggtggacaggggtgaggacccctggcaggggcccacctggcagcagccagagcgggctgtacctatagacaccctccagccatcccccactctatgccaggatgggaagcgagtctgaggcctggggctgcttttctccctacacctgtccccagggcttgggctcgccacttccggtgtgtgcatcggtgtgctggcaggagggagaaggttgggatcagggactaacggggtgtacagcacaggctggtgggccctcagggagaagctgggtggtgggtatgcagcacaggctggtgggccctcagggagaagctgggcggtgggtatgcagcacaggctggtgggccctcagaggcagggcaggggctgttcggccccaagacagccagttgtcagcctttgccagggcgctggacagggcggggaagatgaggggaggtggcctgctgaaatgtttctacttatttcctgtgctgagttggagggccacctgatcccactcagccagaccctggaggcagcccgggctgcacgtgtggggggcagctcaccgggaagcaggcaggagtgggggacaggctgagcccagtggccatcaggccttggggtacatgccaaggggcaagagagcgctatgg

SEQ ID NO: 158702 - DNA, 1000 bp, Homo Sapiens
ctttttctttcaatagcagacttttaatcaatgccagagacaaagtgaggccgagctaagaacacgctcagcttcgttacaatgaagaaatggtttcctttcgatgcaaagtataattgtaaaccacagtgctcgcacagttcacgactgcttaaagtgaaatcttagccatacatcacctaaaagtaattaaaaagtcaacacagctgtgcggaaaaggggactctttcgagtccgcccagttctcaatcagaataaaccgtcacaaggccagtgagggcgggcggcgctcgcctggcccgtggaaggagataaaaggaaacaaacaaaacaaaacaaaacaaaattcctccaaatcaactcgagagagacaggcagttcactgtgaattctgagtagtttccctaaaacactgtttccacataaatacaataaactctattattggtatgtcacaagtgctagataaactttttttcttaatatgacaaatgtttaagtagtcctttttatttttcttacaataaaaagtacaatttcttaagaataagttcaataagacgcaaacttccccgccctcctctccttcaaggttttgttttacagaaaaatttccatcttttgtatctgcaaatgtcatgagaggggaacagaaaggcatttttcttcttccccaaagctgccgagtttggcgtgcaaaatctgtatacaatataaagtcatgccggtcgtacagtccatgcaacctccaggtgtaggaaacttaaaaaaatatattcatatatatttatatctatatatttatatatgtatcaatgcccataaaacacgtgggcccaaagtctacaaaaagaagaatggaatgagcacgtggctgtgaccagtaaagaaggaatgttctgatcaaaaagaaaaacaacaaagtccattgctagtgctgcaaaaatcaaacttgcttttgtgtcagaccattacgaaatggtccttccccttgcaaaca

SEQ ID NO: 158703 - DNA, 1000 bp, Homo Sapiens
gcagaacgtacacaagctttattgggcaacagcaacgagccacgctggcaaacaatgaaagtagagtcgctcagaaacacgaaagatcatatgtgtgtcatcacagcatcgagaatttaaatcatctggaagttcctgctaaattaaagcatactgtgccagagctcccctctaatcaaaaaacgctgtcctggtgaaaatttgcaatgaggattacagagagagagatcaaccaatgaggaaatcacagactcttacatgagtttacagttaaccccactgcaacaaaataataaattagccataatttgttttttttgcaaataccatgccccccacctgaccccacaaacacaacagtcactgacatggcccagctatattaacagactgcgcctcaaaccatgctgtggcggagaagacagattcacgggtaatgccgctttggcctgagaagatgcttcggagctccaggtggaggagctgctcacgctgcaggatgctttgcaggttcattcaaaaccaaatttttttccaagaagaactggacataattcatgggaatattttaagtatatataagtggcaaaaaagctgtacattaaaagaagggggagaaataaaatgtgttgtatttacaaagctctttgtatatttttttaaatgaaaacaaagctgggagtgatagaattttaatgcaatgaaaaccaaataattcttcaaaaaactttagatgacatcattctctcgctctttcacacacacacacaccccccacacacttcaaacatacagaaaaggttaaagataaaaatagctgataggtgtttaagtaggatggagcagaagaatgtacatgtcccatttgcaattttggcaaaggtttaaaatgctgccctaaaggcacgcacgcatgcccagcctaccccagtaaaaacaagacaaagtataaaaagaaaagtctggcggggggtgggggaggcattagcatatcaatttc

SEQ ID NO: 158704 - DNA, 1000 bp, Homo Sapiens
ttttttttttttttttttttttttcttctgaacgtgtgtcaccatttattgtagtttgcgttaggaattgaacagaggacattgtctgtggagggaaaaaaggaaaagaaaaaagaaagtatgctttttatagacttaatttcttcagaacactttatggtttcaaatcctttttttttttttaccccaaaggaaatttgagaattcaagtatgttaagtagggagcagtaatacaaaaagtcttatacttgtgtgcgcgtgtggctgtgtttgtctgtgtgtgttgaaaccggcagacatactcccacattcttgcaccctcttttgctttggtaaggccaaacacatcacacaaatgaccctgcctcaaactcacacacccaagggttgaagaattgatttacccccagaggataactgtgaaggtttcaaactgtcacgtagcattaaaaaaaaaacccaaccctcatctccccaaaatataagtcacataagtcctgatacacttacacccctagattttgctgcagctgctcctcagatgccgaagagaggcttatcacaaggaccagagcagcaggattttctttattttgtttagaataaaaaaatcttaaagggacatttcaaaagaaaaaaaaaactgaaattcaaattctgaaaatatcttgccttttttattaatcatgtcatctaacaccaattaaaaaaacaaatatgtgaatatgatataaaaatacgatcccaggattaacacttggtagcaggcacagttatctcacagaatatatgtttggagggccagggaaaggagtttacttttgtttttgcttctcttaaaaaaatccacagcagtgcaagtagggtcaggaagggggagaggggaaaaaagattctttagcagcaaaatgtccaaggttctctaatcacaatcaaatcaacggatattggattaaaaaaaaattcatgaagggatgctgcccagacccattagccatc

SEQ ID NO: 158705 - DNA, 1000 bp, Homo Sapiens
ttttttttttttttttttttttttttttttttttttttttttttttttttttttttttgaggtcactgagggatttttatttgcactgattttgctataaagtgttactgaggtagagccaactgtccagggttggacaggggcaaggaacacaaggacccaaggaaaggggagccagggtcctacgttgtggtgcagtgcctcccagtcatccgtataaacaataaattgggcaataaatagacggtggacaaggatcggagggacaggcagagaaggcttcaaggagtgacaggctataggccttgaggaataaaacggtacagagttaggcatggacccagagcctacttccccagccttcccagataagtttagggcatatggagcagagagggtttcagccggaaggcatcaagaaaagagaagacaccccgctttcgaggggttgcccctgcaccgccaacccctcctttgagcagggggaggggcaggggacctcctggggaatccatggagctggtccgcttgagccgcaggcgggcacgggcctgggcaccccaggccttgcctcgagctgcagaggccacaagacacttctggtactgaaccatacaggcagcctgcacagcttcagagagtccccctgcatggggctggcaccagaaggctgcgcactggaagctctgacggcccaggtcagcgatgaggccaaaggtgtgtgggtcgcggccaacaccaataaatgtcacaaggcgcacagggcactgccacaatggctcctcctctgtactggcctctgcctgaatgggatgtgcagtcatgagagagtcagacacactgagcatggtggggacccaggcattccggtcccccctggcggtgagggtaccaatggcctcgttcagcacatccatgcccatggccttggtgactggcagtgtccccatatacagtgcctcgtacttctgagcagcttggcttaccgcatccagcagct

SEQ ID NO: 158706 - DNA, 1000 bp, Homo Sapiens
tttttttatagtcctaataaaattttattgagaactagtaagtcaaatactttacagaacatagaaatacatatgatcccagcctttcccattaaatgacaacataacattggggtagtttccctgaatatcccaaacagtttgctttataattagagaaacagttcgtctacagctcaatagtagagaaaacacaggaatgaggtgctcttacttagcggaagagaaatgaaattggaattcagtgtaaataataaaggactacagatgagttctagcagccaaaggagtatacatgtaaatagtcactcttcacattttctatttctaaagtagctagtaaaaggcagggcatcgtaagatcagacaaaaattaacctgaggacatagtagcagagtatgtctctcaattcagttatttaggaaatgttaataaagaaagtaaccctagatccacttttacctaaaactctacctaccatgaaggtttttgatgccaaataattggaactgacatcaaagatgaaaagagagccacatgactcaggattaaagactgacaactcaggccacaccgccgtccatggtatctatggaaataggataatgttaactttttacatgatgaaaagttaactatttgcaatttctaaattactatagaaacagaaacatgtgacaggataaatgaacactgcttgatgacctttgacaacctttgaaggttttattacctagtccctgtatagagataagagatgatggtattgagttttctaggaaccaacttctgggaaagatttttaaagaagaaaaatatctgagagaaaaatacaaactagaactgaaacaatgatgccacttccttttaaaactaagaagcctagtataaaagtttctttagttactaccatgttgttaggggattgtctcagcgttgtaggctttgctgaatttaaaatcccatcaaaacttttttgctcttaagcataaatacaac

SEQ ID NO: 158707 - DNA, 1000 bp, Homo Sapiens
caacttggatttatgtccatgattcgtgcaaatagctatccagggatggacagccaccctaatctgggcttctggcaccacaggcctccagctatggggtccagggtctgaacctcagggcctggcagcttcaggctggcgcccctcggcggacgtggctggcatggccttctcccatctgtgatggcttcagcaaggctactgtgagtggtggtggagagggccccagagccagaatatccatcattctcttctgttctggagacaaacccacacttcccacagctcctcacagaggggtaggggtgtgcgtggggcaggtcctgctacagagcttgaagcaaaaattaaacacacacacaaattggtcatggcaactagagggcctgaaaccacttccgggaggttttgaaggaagggggtcttggctgcctcccactcttaggattgctgctcctggaggcttctgcaaggatgggggtcaaagccggatgaggcctctctccactcagcagcagggaaggagtttttcccagtcactcccagcagagtacaaatgaaagccttctgggtggagcctccccagtcctgtaaacagctcagttcagggactggtgtacaagctggccacccatctcagcctctcatccagctgaggctctggccacaccgtgcaagtggcttctagtttttggcaattgagatcagctggctctgcaagatgaaggtggagccaaatgacacaatctggtctcactgaggcccctcacggtcattttttggagactctggttctgtaggcctggctgtgggagggtccatcacttgggagctctgatttggatttcgaacccctccacagggtagacgccaggtgtattccggcagatggaagaggcgcgagttggggagtgggggcgggtgctccatggccatggggggaggggggtagcggatctgggaccagtcctcgaagccatggtgtggcaccatggctggc

SEQ ID NO: 158708 - DNA, 1000 bp, Homo Sapiens
gaattctagaagtacaaatagttgactgtggcaatgtagaccctgatgcaggaacttcagataggcagccagagggaggtagtaaacgcaaactgccacaaatgggagaggagtggtaataaaagggctgaagatgtcccaaaggttgaaatgccagcaaaaaacttcacatgaaaggatcttctggagtgattccacaatattgaaaattcaagggataagatgttggaagctagtccaaacttagaaagaggcaaacaccaaggtataatagaaatgatgcttgctggctaggcatggtggctcatgcctgtaatcccagcactttgggaggccaagacaggtggatcacctgaggtcgggagttcaagactagtctgatcaacatggagaaaccccatctctactaaaaatacaaaattagctgggtgtggtggtacatgcctgtaatcccagctactcaggaggctgaggcaggagaatcacttgaaccctggaggcgggggttgcagtgagccaagatcacgacattgcactccagcctgggaataaggtgaaactccatctcaaaaaataaaataaataaaaatgaaagaacgatgcttgctccgtgtattagcccattctcacactgctataaagaactaccagaaactggatattttatgaataaaagaggtttaattggactcacagttccacaggcttaacaggaagcatgactgggaggcctcaggaaacttacaaccatggtggaaggagaaaaggaagcaggcaccttcttcacatggtggcaggagggagagagagagagagagcgaagggggacttgccacacactttcaaaaaaccagatctcatgagaactcactgagatcttatgagaactcactatcacaagaacagcaagggggaagtccgcccccatgtattcagtcacctcctacctaggtcccattcccacaacacatgcagattacaatttaagatgagatttgga

SEQ ID NO: 158709 - DNA, 1000 bp, Homo Sapiens
ttttttttttttttttttttttggatgctccaatggctttattaactccctctttccgttgtggcaggacctcattagctgcagagctggaagggaggccaagaagctgtggtctcagtacgggtcattaaaggggtacagaggatgccctgcatcccttgggactctcttcccatccaccgtaagcataggcacaatatatctccaatttttgttcagggcatttagctgcttcatctcttctgggctaaaggtgaagtcaaacaccttgatgttctgaaggattcgagaaggagtgatacttttggggatgcagatcactttccgctggacctgccacctgagcaagatctgagctggagatcggccatacttttcagccaatgccaggactactggttcctccagcaggacaggctcatcaggatcacgccatgcacgatcagaggagcccaaagggctataagcagttacctccaggccacgtgcttggcagtgggcaattagctcattttgagccaagtatgggtggcattccacctgcaagacagctggacgcacggaggccacactgagtatgtcatcaatctgccgactgttgaagttggacaggcccagcgcctgcaccagccccttagccaccagtgcctccagagccttccaagtctccttgtagtgggtggagtcgtagcatatagtcccatcagcattcttggggaaggggttgtctccccgctcaaaggcataaggccagtgcatcaggtacaggtccagatactccagctggaggtcagccagagtcttccggagggcaggctccacatcctcggggtggtgcttggtgttccacagcttggatgtcacaaacagctcctcccgaggcaccgccttgcctggtcccacgtcctccttcagggcctccccaatctcaggctcattgccgtagatagcagcacaatcaatgtggcggtagcctacgctaagggcatacttaacagct

SEQ ID NO: 158710 - DNA, 1000 bp, Homo Sapiens
ttttttttttagagccagctattgttttattgaagcaaaaagaaaacagaacaaaaacaaaaaattgtttcccaagacattgaaatggctgacatcttttcagtaataatcagaacaatatttatttttatatttaaaattcatagaaaagtgccttacatttaataaaagtttgtttctcaaagtgatcagaggaattagatatagtcttgaacaccaatattaatttgaggaaaatacaccaaaatacattaagtaaattatttaagatcatagagcttgtaagtgaaaagataaaatttgacctcagaaactctgagcattaaaaatccactattagcaaataaattactatggacttcttgctttaattttgtgatgaatatggggtgtcactggtaaaccaacacattctgaaggatacattacttagtgatagattcttatgacttttgctagataacgtggatatgagttgacaagtttctctttcttcaatcttttaaggggcagaggaaatgaggaagaaaagaaaaggaattacagcaatactgttctttctataggaaggattagatatgtttcctttgcaaatataaaaaaaataataatgtttactactagtgaaaccaaggtattaggaaaataatgtacaagcatctcttgcaagaaagggtaagattgttatgagtgaaatcgtgccttcctcaaattttattcccaatacctccaaatattatcttatttggaaataaggtctttgtagagaatataatgttaaaatgatttcattaaggcattagcggtgggccctgagccagtatgactggtgtcttaataaaaagggaaaacttgggcacagagatgtacataaagacaatgtgaagagtcatagggacaagatgccttctacaagccaaggagagaggcatggaacagagcccttccttgcagacctcagaaagaaccaactctgctggaatctagatttgggatttcc

SEQ ID NO: 158711 - DNA, 1000 bp, Homo Sapiens
ttagtattttggtcttttgacttcaaccccatcagcttccatcttcttcctcttctcaatgattgcactaatcttcttccactggcgatcaagctctgctttgtcattggtttccttgaagcgcctggttttccgcccttcagacattttgataccatactggaatgcagccttgggcaaagcttctttgttgttcatatactcgctgtattcttcctgggtatcaaagtcccaacggcctaagggccccttcttgttaccctggtccattttgctataatccacctcctcatcactatccacagccatgtcatccatcgtggctgggtagcactctgcataactgttggacatgccaaagaaatctcccagctgctttttgtcttctggcttcttcagcgattctgtgccttcccagccagcagacccagcaaacttttcattgatggacttgatcaactccttggtagacccaggtcctttgtcaacgtccatgggctcatcatctacttttggcttctcaaagtaactgtgtctcttcttttcctcttctctctctcggtcccgctctcgctctcgttcccgatctcgttctcgctctcgctctcggtcacggtctctgtctctttcccgatcacgctcccgttcccgatatctctcccgctccttgtcccgaggtgtcttggttgtggagggtacgtaatccccaatgtcttcaaaaatattcatgtcagcctcaggaggtttcttctcttccagcttccctttatccttcttcttaagcttcttgttacgggttccctgcctcaggtatgaaaggatctgggtcagcttgctaatgacaatgtcatttgtggtcagtgtagtctgggcctccatggtggggcaatcagccttgctgcggataagagtggtggggatatctgtgtcagcatactcatcatccaggtctaccacataggccatgcggcccggcaggaacaactcattccgctcatat

SEQ ID NO: 158712 - DNA, 1000 bp, Homo Sapiens
gatttgaaaacagataattttaattaaaagcaatggacagagacctaaaaataaaaatctaggtatattagcagaataattttaatagtttatgttataatctctcattggaaggaatagaagcaagtacttagctttccacaattaagccttataatgatgccacaagaataaactaatccccaaagtcgagaatgtataattttcaaacacttttttaaaaagctggtgaataacaaagagctaggattaaataatttatttaaaaaaaacttttctcataaatctgtttcataagcatatataataacatcatatatattcttaattggagtagaaacgtttttaaaattactgtgaaaaacaagagtgagattccagaaaaaattgtgccctaaagaaatctggtttaggccaggtgcggtggctcacacctgtaatcccagcactttgggagtccgaggcagacagatcacgatgtcaggagatcaagaccatcctggccaacacggtgaaacaccttctctactaaaaatacaaaaaattagccaggcgtggtggcggtgcctgcagtcccagctactcgggaggctgaggcaggagaatggcatgaacccgggaggcggagcttgcagtgagccgagatcacgccacttgtccccagcctaggctacagagcgagactccgtctcaggaaaaaaaaagagaaatctggtttagaagataggaatgttcattgaacattgacctgaactgtcaattggaactaaagctttttctcatttctccacctaaatacaggaaaacaaatataacatattgagtttataagttctccagacgtcaaaattggtctggttgattaatcaagttaaattatttaattctattttctattcctaaatataataactaaatataaatcactgctcaacaatgaataaaggtggaactctaattctacccaattaatcttaaaatgtattattttgagaaccaa

SEQ ID NO: 158713 - DNA, 1000 bp, Homo Sapiens
tttttttttttttttttttttttttaagggtatctgacagcaatagatttattaagtatccccgaaaatataaacacaaaccagtaaaaaacaaaaccgtaaaacgtcaggcctggagctgcaataagacagagacaggagcagctcacacgtggcctaggtggggaggacgaggccataaatactgcaggagggcggcaagggagccctagggcgaggggaaagcagggtgtcggcagcaagatggctccgggggtttagacactgctggcttcggccccggccgccacctgcctctcactccagctgcgagcagcttcacttggggccctgggcctccgactcctcctcgtcgtcttcgtacatctcgccctcttcctcggccgtggcgtcctggtactgctggtactcggacaccaggtcgttcatgttgctctcggcctcggtgaactccatctcgtccatgccctcgcccgtgtaccagtgcaggaaggccttgcgccggaacatggccgtgaactgctcggagatgcgcttgaacagctcctggatggccgtgctgttcccgatgaaggtggaggacatcttgaggccgcggggcgggatgtcacacacggccaccttcacgttgttggggatccactccacgaagtagctgctgttcttgctctggatggccagcatctgctcgtccacctccttcatggacatgcggccccggaacacggtggccaccgtcaggtagcggccgtggcgcgggtcgcaggcggccatcatgttcttggcatcgaacatctgctgggtgagctcgggcacggtcagggcccggtactgctggctgccccgggctgtgaggggggcgaagccgggcatgaagaagtgcaggcgcgggaagggcaccatgttgacggccagcttgcgcaggtcagcgttgagctggcccgggaagcgcaaggaggtggtgactccgctcatggtggccgataccaggtggttgagg

SEQ ID NO: 158714 - DNA, 1000 bp, Homo Sapiens
cagtggaccacattttcttatttattaaagaacagaaataaattttgcttaaatttaaaaaaataacattaaaacttagtttatctttccactgagtaaaactgagaaaaagttggcttttagatcatatatttatttaaaaaaataaaatgggaaattgacaaagttaccacattattctgcatgctaacaggatttcccaagcctgtgagagaatcatttcttgagcaattaaaaaaaaaaaaaaaaaaaaaaggacttcctcaacaatgtaaagataggaaacttttcaatccaaattcaaggtctttattactagttccacctcacaagctagtgggatgtatctgtgtcacaagctgaattcctcagtaaagaaagcttgagaagacactaaacaaggatgttactaaaagacaatgatttgttaaaattataaagcaatcatcttttggcctgcaaacagtcaacattagaactctccaccactgcggatctggctccccatcacagtattattctgaatccaggataattacaatcacatggcatttttttctgcatgctttcttggcccaaaccctgcatgacaacatatacaatttacaagatgggacttgaaattcccattctcacacaggatagttagggcgtgttaccaataataaagaataaaagttatacaacattgattattataaattatatttgttcttatccacccccattctccttaatatgttactttctttcctgcagaaaacatgatgttcctatataccaattacatcattaatgatgattagaatgagctgtagagaccttgattctgaagacatgtatgtgcaggtgagacgcaatctgattgcaaacactgacacagtagcggatcaaatcaaagaaagagaaaaccagggcaatccaaagtacaatatattcatcaataaagctgttaaaatactggtccagaaacaaaagtgccggacctatgaatgctgtg

SEQ ID NO: 158715 - DNA, 1000 bp, Homo Sapiens
tatttgtaaagctctgccataaacttctagcgtgtgccaatggtcacctgccacactcgcaccaggttgtccgtgtagccagcaaacagagtctggccatcagcagaccaggccagggaagtgcactggggtggttctgccttgctgctggtactgataacttcttgcttcagttcatctacaatgatctttccctctaaatcccagatcttgatgctggggcctgtggcagcacacagccagtagcggttagggctgaagcacagggcgttgatgatgtccccaccatctagcgtgtaaaggtgtttgccttcgttgagatcccataacatggcctggccatccttgcctccagaagcacagagggatccatctggagagacagtcaccgtgttcagatagcctgtgtggccaatgtggttggtcttcagcttgcagttagccaggttccataccttgaccagcttgtcccagccacaggagacgatgatagggttgctgctgttgggcgagaagcggacacaagacacccactctgagtggctctcatcctggacagtgtatttgcacacacccagggtattccatagcttgatggttttatctcgagatccagagacaatctgccggttgtcagaggagaaggccacactcagcacatccttggtatggcccacaaatcgcctcgtggtggtgcccgttgtgagatcccagaggcgcagggttccatcccaggagcctgagagggcaaactggccatctgaggagataaccacatcactaacaaagtgggagtgaccccgcagagcacgctgtggaattccatagttggtctcatccctggtcagtttccacatgatgatggtcttatctcgagaggcggagaggatcatgtccgggaactgcggggtagtagcgatctgggttacccagccgttgtggcccttgagggtgccacgaagggtcatctgctcagtcatggcggcggcgagagcggtgt

SEQ ID NO: 158716 - DNA, 1000 bp, Homo Sapiens
tttttttttttttttttttttttttttttttttttttttttttttttttttttttttttttttttttttttttttttttttttttttttttttttttttttttttttttttttttttttttttttttttttttgaacattcacaacctttattatgggtgagagcttcactacaactttagaaataaaaagtaaaattacaacataggtcctaggccttggcgagcctgaaaaagaagattgggaaggagggcacagggtccttccacctccctggaaaggtgcagaatgagccaggcctaactacagggccatgagcctctagaagcttaggggggaataagaaacactgtgaacttagatatataaatagagagagacccaagcaataggccgggcctgactcccagacccctgcagatcatggctaaggccttacatcctcctctgtcatactggagtaggaggcaggggaagtcatctttggagtattttggtttttcttatttatgtacaaaaaagtccacatccacaatccaaaataaagttctctgtccatctctgaaactgcctgtctcagtttttccacctgtctgtttggccgaagggaatggaatagacatgaagagacaatggatgtgaagaagaaatagagccatgggtttgggtaataagaagagagagcatttggggttcaagagaggtgccccttccccaagaggctctagacatagtcaaggctgagggttcagcccttctcctagctcacataccatcccatttgcctcccactgcctaggttaacatacccaaaggaatgtgccaccatctaaagaacatttccagaaacagaccccagtgtccttaaaaagaggttaaatattaaccctttgggtgctggccttgtcaggcagagatgaggccaaaagtaggcatctgtgaaggtctgtctggcccttggccagagcccccagagggatcagagtagctggggttgggac

SEQ ID NO: 158717 - DNA, 1000 bp, Homo Sapiens
tttttttttttttttagtaattgtattctttctttagttatttacttatctaataagaactttatgtttagcccatttcctttaacttaaaaacaaacactgccttcattgtaccaaattactcttcacaatcatggttcatttaattctgggggttgtcaggagagagcttaattaaaccagtatgaacttagatttccagagccaagtggtttcggcttgccacatcaagccacaatcgtgattttccaccagccatgtttacagtagccaaatatcctcctcaaaatgtcttattgtagtcagaattgttgtggtaaactaaatccttagtaggaagtcatatcccttcaaaaatctaagatgaagtaactataaaaagacgtgtgaaaacacctcagaaaactagcttattttaaaaacattgcaatcaaaacttattttcctgttatctttacatttcttggttttcataagttaaatatacagtattcacagaaattaagctggtggttatgaatcaccaggcagcaacagacagtatacataattatttgacgagtgcatccaacatattttaaactaaaaattgcagtacaaaaataaaactaacactgttagcatcatcttctgagtctgtagagtcaatcttgagtcaagttgattacgaggtttttttctataatgtccttcaaaaagagctgctctgcagtcacattgtgatacgcgttcttattcatcaaagacatggtggcattcccatagtagtgcaaaggactcttgaggtcagaaaagttgtatttaaaaccagctaggtgaacttcgtgacatatgtaaaacgccaatgtgatggcaataattcctgttgttgggtgtttaggtttctgatttttgggaaacacttttggaaaatgaagcagttcataagctgctgttctgataatgaaaggatctaatattcggatttgataaggtttataaatcaggtttaaggctggtt

SEQ ID NO: 158718 - DNA, 1000 bp, Homo Sapiens
ttttttttttttttttttttttttttttttttttttttttttttttttttttttttttttttttactgagacaattttattcactatggatatatatacatgatcaacattttatcttcattcttcagaagacttaattagagtagctttcttctcatacttatctctaatctctttaatattttccgagagatcttctgacatgcattcttcatattctctatcaactttagcaatctgctcctcaagatgtttctctacagacccaacatgtgtagcaaccatctctaacagacgttgcaagttatttcccacttttcgtctttcttcagtcgtggtttgcacaactagttggtattcccgctgaacagcatctaattcattcatagcttcactgagcccctggttaacagtactttctagcaggtgcttgtgtttctccaaggactcaagctcactggcacatttttcatcctcttcctctgcttccttaattttttgttggtaaagatcatccagcttttgaacttcttctttcagagttctcacacttctcttgctttctgttatcattgcattcaattgttctaaagtatcctccaaacccatttttttatttagggctttattaatttcttcttcagtttcattcaggagttccttaagaggtacataaacttgagccctgtatttgacaaggcagttggcaccagcctcgggattaaacttaatttcaaagtcataacctttggaattctcagcacctttaggaataagttttaattttctagccaatttgtgatactctgctaattgtgtttcaatcgcttctttgcctctggcatattttaactcctcattccacaacttctgttgttcagcttccaggtccttggttaatttattaatagtctgctgcaattcatttctttcatgatttattcgctcaatgtctgcaactgagtacttctggttgtcaatgatattctgtagtcgagtg

SEQ ID NO: 158719 - DNA, 570 bp, Homo Sapiens
tttttgctgaaagtggttactttattggttgggaaagggagaagctgtggtcagcccaagagggaatacagagtcccgaaaaaggggagggcaggtgggctggaaccagatgcagggccaggcagaaactttctctcctcactgctcagcctggtggtggctggagctcagaaattgggagtgacacaggacaccttcccacagccattgcggcagcatttcatctggccaggacactggctgtccacctggcactggtcccgacagaggccgagctggggaaagttaatgttcacctgggggcaggaaccctccttatcattgggcagagagcagaaggtggcacagcccgcgctgcagcacttgaggttgtcggcgcattcgctgtccgagacgcactcttgcgtgcagttctggtcagcctggagctcggggcacacgccagtcttctctgctcctgtgcctgagactagggtgaagccgaacagcagcaggctgaggaggagggcggcggctagcgggcctaggcgacaagcaggcatggtgctatgcccgggcggggtgcaggtg

SEQ ID NO: 158720 - DNA, 1000 bp, Homo Sapiens
tttttttttttttttttttttttttttttttttttttttaaggaaagaatatatttgaaccacataaacaaacaaaaaggtattacataagaaaaaataatgtaacaatttatgtaagtacctaacatatgagcatgctcttacatctaaaacaaaaaataaaaaggtaacattggtactatatatatatatttgacaagtgtgcattaaagaattctctaatataaaacatttaaaatgtggagaatactttttcaagatacagaaaacaattgttatgataggcacacccacaattcttataacaacatgcttgcgaggataaaatccacctgagcactcatttctcagatgtaccaacgctagaaaagtgttaagcactgaatattgccacccacttttgcaatgtttgagtttcaacactgattggtatgaattctgaattacacaattaattactgttatttttcagtctttctgccatgttccatatagaaggcatgtatttaatatgaatacttaacacagcaacattatttgtagcaaagtcacttccctgtgttcatttttcctttaaaggcactacatttagaaaagttattacaacaaatagtgctttggaagatctgaaactccaaatcaatgtgctccatcaaccataagtagatctaagaagccctgactgaaaataacacaaatgtaaaaagttgataaatttaaagattataaaattggtttattgtaaaagcaattcaagaatacccagttaaaatcttatcccaatgctacccaatacaaccaagaagcagttaagcacttttacattaggaacaaggacataaaacaagagaccacatcaaggctatgattcaaactcaaaaagggaaaggactcttaggtctccttcaggtcagtacagagggcatcgtaagatcaaagcactgtgccaggtatcacagtactgctacaacactgaggtataactgggcaaattaaagtt

SEQ ID NO: 158721 - DNA, 1000 bp, Homo Sapiens
gtagtaaaaaatctttatttccaaaatgatttgttagccaaaagaactataaaccacctaacaagactttggtaagaaagagacttgatgcttcttataaattccccattgcaaacaaaaaataacaatccaacaagagtcatgttacccattcttagccattaacctggttttaagtctccaaaatcaggattttaaaatgtacccaactgggaccaaatacaaacatgagacactagggtggcttgtccttgattaggaatcaccagcttaaggaactttatcatgggctgagagttagatagatagcttagaacaacattgcaaaagtgggtgcttctacatgaggacttttttccccccaagtagaaaaataattaaatcttgtgtttctttatactgtgctttttttgggagaaagcaattcatttaaggatttaaaacatgttggatacaaaggtagttcagagatgtaataatggtccctccaagaacaagggagcaaaagccctatcttttattgaaaatgatggaggtggaggacaatataaaaaagaaccttctgaacacttacttagcttaaagacatgaaagacccagtgagtttttattgaatagtctctcttgtgttaaaagtacatattcaggactatactatgttgtatttggaaatattctgatgtgtttaatacaaattcgtagtgtattcagagcattgtatgtgtctcaccaatggtacacatttggattaagcagtaataaggcctataaaagaagaaatgaaacaatagttttcaacaataaatgcaggaagaaaaactgctgatggacccaactgagaaaatgtccttttacactatcccttggtggtcagtctccctgaatctggtgtgcttataattgctgggaaggcagtgtaaacctgtggccattcctatgcatgtctgggaggaccacagccctggtgtggagcactgacaggtttgactttccaccagaa

SEQ ID NO: 158722 - DNA, 1000 bp, Homo Sapiens
ttttttttttttttttacacaactaaaggcttttattgggaaagggaaattgactgaaaaatggcctccaatttcctcgctgcctgagacacttggtgcctcctccacaaagtccaggaaagaagggcccaccaaactgggcccccagcaggctcaggtgtagaggtcaaagtcaatgcgtttggagttgtagaactgaccaccaggggggtccagcttccggcaataaacaccgtccgggaagtagccttcactcacccaggtctgcatctgggcgctggtgaagggcccatacagctcggcatcccccgtgttctcccacttatattcccacatcacatccaccagaccatctccccgcgactctgcttctcctctctgggtaggggttggggtctccagttcctcctccgccaactcctcagcgaacatgtccagggagggtgggggtgtgggattgtggggtcctagggtctgacaccccaaacccttcagacgcatagccaaccgttcccttgtttcctggtacacaccaaggttgccccgggccaccatctggtcggccaacccggagagccggtccaggcgctgaggggaactgggttgcccaggcccctttctccctttgcctcctcctcgggcccccagacgcctcagtgccccagccactgtctctctaggcaataggagctccaaaagtccctccaagagggcttgggcactcattgaggtctggcccaagctgtcctcctcctccgagtctgaggcctggcgctggccaggtggccgctcccggatcttcacccagtcaatgttgtccagccagctgtctcggatctgagcatcccggttcaggaagtagttgccatcggcatcaaagtggccttcctccatctcctcctgcaggttaaagggtgtgatccgaacacccccctcgctggggagtgtggctgcctcctgaccttctacatcctctgaggccaagatgtcatatttgctg

SEQ ID NO: 158723 - DNA, 1000 bp, Homo Sapiens
ttttttttttttttttttgaattcttaagcttgttttacaaaactttttattcatcagagctgtagtgaaatatcatcattgtaattgatattctagcactacaaaaggcacaatgaagcttatttagttccagtactggaaatcagaggtaacagcacatccttccttggacatgctttactctgctgtagtggtcatcacagttttgattttctggataagaagttcaccacagcatttgtgcattcatctgatagccatcttccctgaaggacattgcattcttcagcattaacagcgtgtagtttttctctctctcttttcctgattacctcttttgaaattctcaaggcatttgggggaagctttgcaaatgccttcagcctggtccagacttctttctgaaaagtgctatcagggaaaacttcagtaacaagtccttgagcacatgcctctcccgctgttaacttctttccaaaaataagcatctctgttgccttggctgggctcattatcttcggaaaagtgtaagaggagcatccttccggactttggcctaggtgactaaatggtgtatgaaatgttgccctgtcagatgcatacacggcatcgaatagcccaaggagggtgacggagatgcccacagctggaccattgaccactgcaatcagaggcttaggaaaatctataaaacagcccacaaattccctcagtaaaacggcattatttttagctttctcctctactccaccagggggaatatcagtgaagttagtcagatcattcccactactgtaatagtcaccatttcctgttaaaacagtgatgattgagtcatccttgctggcagctttaagtgcacgcataatttcatgatacatctcagtgtttatggcatttttctttttgggccggttgaacatgatctttgtgatgccatcttcggaggtcaccaccagagtttcaaacccagttgatttcctgtctgttccaggctcc

SEQ ID NO: 158724 - DNA, 1000 bp, Homo Sapiens
tttttttttttaagacttccaaagataatatcctttattctgctcattttctaggcgttcacagattcccctcctattgtttgattacaaattctactagcaaatgacacctgccacagtggaactgcttagcatcctttactagtaggattatagctcacatttgtggagctctcgtatataccaggcaccatgctaagcagttcacattgataatcctatttcttctgctatgatataaatggggttccactgtgtggcctaatacgggcagcaacaactctgatgacctggaagaactcagccctctcactcttgtctttaggtggcagcttggcaggccccagtgactttctctaaggaccctgaagcaagcttttctcctaaagtaattgtactcgttgatttttttatgtgctgcaaatattttcttccatatctgtcatttgtgttttaaccttgatgttttccatcacacagagactttcgatattttttggttgcgaaatctgcttatcttttcccttattatatcttttaagtctcatgttaaagtttagaaaagaccgtcccacaccagaggtataaaaatttttgagtaattttgtggtatatcttccctctggaactaatttgtatggacactgtgaggtagagatctaacttagtggttttttttttggctgtgtcacccaggctggagtgcagtggcatggtggcatgatctaagctcactgcaacctccgcctcccaggttgatgtgattctcctgcctcagcctcctaagtaactgggattacaggcgcgcgccaccattcctggctagtttttgtatttttagtagacacagggtttcgccatcttggccaggctggtctcgaactcctgacctcaagtgatccacccaccttggcctcccaaagtgccgggattacaggcgtgagccatcgcacccagctgagatctagctttgatagctagttgtctaaaagtgctgttt

SEQ ID NO: 158725 - DNA, 1000 bp, Homo Sapiens
tttttttttttttttttaagcagtctggattcgtgtttattgaagccagtaattagagacatctttttttcccaggactagaaagcaaggttccacatgactgcatactgcacccggacagagccacacccctggactaaggctggtgggggataatctgcagtcttacttttaagttagaaacaccaataaatttagtatacagacgacagtgaactttcacttacagcattaacattgttaaggtcatgatgtacagagcagtcactttcaactttgttaaattaataaaacatgacaatgtcttcagtttaaataccgattttaaaatgccaatcaaaaaaaagtgcaaacaaaataacaatctagcagcattatctgttgcatttttaggaaagaccaattcttggctgttatcttcagccacgtattcaaaggtgggcttttctctgatttttttttttattttaaagacaaaaagcagatgtaaccattataatgtgcataaatagtcataaaattgtctttaacagtctaccatacaagtgtactctgcaaataaaatgaattttactttaaaaactaaaggctgtttattatttggcctttggttccaatgcttgaaaaccccaaaataacaaaactcatctcccttcctcccacctcccaaaaagaaccctgcagctccccaaagttggtagactttggcaaccactgagcacatgacactatgtatcagcttcttctgatactaggagcttccacttctcatgagtaaataaaagtggtctccaagaaaccttccttcacaagacatgtcttagcatttcatcagttttagtatattttatattgacacaaaaagtgcttatcagttcaaatgataaaaaataaagacaaattaaaattttgcattaaaatttaaaattataccatattcctcttcggcatgtgcctttccaggaattcttgtttctgaggtcactcattttactcccgg

SEQ ID NO: 158726 - DNA, 1000 bp, Homo Sapiens
ttttttttttttttttttgaagatttaaatgattctttatttcaataaactttaacaaacaatatataatatttcttccttaaaaagctcattcaaagatcataggcagacttcttccccattgtattttagttggggagataaaggcaaaaagaggaaatgtaagctatcttacagtcattctgagaacctctggtttcatgctatactttcccagctaaaagttactaatttacgaagttcagatactgaaacttaaaaatcaagatccatatattaggatgtcctgctgtcacactggtggtggcccattgtgtcggagtctggtaaatggccacaagatatgttctagagacgtccatgagtcctcttgctgtgtgggagcggcatccacagacttctggaataattggcctgtgaggaagctcatcaaagctgcaaacagtacaatgaatgcaatagagagccagagggccttattagcctttctgatggaggacttgagatttgttgcccaggaagctattgtgtcataaactgaagagacatcccactttgatggattatttttcttttcagaaagacttggcttccttgtcctttctactgtttcttctccagatggctctgagtcatctttagtttttagttcacatttttcttcttcagcatctgcccaggaataggtgctaataaatcgaggtaatgagggacggtgttcactctgctttgaccccaaaatacgccaactgcttgaccttctactgaatcgatcattattttccatcccagccaccattcctgcatttccaatatttctgggtaaagaggcaatagtcactcttcgtagagaagatggcttggagtttagagaagctgaacgttttttaatttggcagtcatcatcatcttcaagaggattgaaagacctttcattctgcagaagaacctgtttcagttcttctaattcagcgtgctctttggcatacatcctcttcaa

SEQ ID NO: 158727 - DNA, 1000 bp, Homo Sapiens; identical to SEQ ID NO: 158358

SEQ ID NO: 158728 - DNA, 605 bp, Homo Sapiens
gccaggaaatattttattgacaaccagggacacagtcataagagagggaagcacacaggactgcaaactaacacccagtagccagcaaggccctctgggccaggaatactgaatcctgggatcctcacagtctcccaccagtagacatacattactgggcatccaggggagggggcagtggctatggtgtcccagagagtgagaggatatatgatgcctcattatgagcgacagggtaaagaggtaaaatggagggtccatcactgcctaagaccacctcctcctctcagagccaacaccaggtgaaggactgaaccacctaaaatcttgtaatcagctgctgtcttctcatcattcatctgcttgccactgtagatgagcctctgctgttgtggggggattccctctttctcctccacacgctccttgattcgctccaccttgtctgtaggttcaatgtcaatctcaatctcctttccggtcagcgtcttcactttaattagcatcttctttccagtttggggctgcacacggataaattgctgctcctaccgctccggtcgccgctgccgccctccagcactcttgcctgcaagggccacttc

SEQ ID NO: 158729 - DNA, 1000 bp, Homo Sapiens
actttattttcaaaacactcatatgttgcaaaaaacacatagaaaaataaagtttggtgggggtgctgactaaacttcaagtcacagacttttatgtgacagattggagcagggtttgttatgcatgtagagaacccaaactaatttattaaacaggatagaaacaggctgtctgggtgaaatggttctgagaaccatccaattcacctgtcagatgctgatagactagctcttcagatgtttttctaccagttcagagatgggttaatgactagttccaatggggaaagcaagatggattcacaaaccaagtaattttaaacaaagacacttttttttttttgcaacacaatatacatcacagtgaaatgtgtaacccttgcaaattgcaagttgaaagaattaaattcagaggaggggagagaaagagtactcagtagggactgagcactaaatgcttattttaaaagaaatgtaaagagcagaaagcaattcaggctaccctgccttttgtgctggctagtactccggtcggtgtcagcagcacgtggcattgaacattgcaatgtggagcccaaaccacagaaaatggggtgaaattggccaactttctattaacttatgttggcaattttgccaccaacagtagagactgggtcttgctcgttgcccaggctggattgcagtggtttgactcatggctcattttaattttgaagtcgtggagctcaagagactcccaggcctcagcgtacctcattagtaattgttttgttgtttcatttttttctaatgtctcccctctaccagctcacctgagataacagaatgaaaatggaaggacagcccagatttctcctttgctctctgctcattctctctgaagtctaggttacccattttggggaccccattataggcaataaacacagttcccaaagcatttggacagtttcttgttgtgttttagaatggttttcctttttcttagccttttcct

SEQ ID NO: 158730 - DNA, 1000 bp, Homo Sapiens
tttttttttttttttttttttttttttttttttttttttttttttttttttttttgttccagaaagtgtatttggatggaaccggaacatggaacaggacacacagcaggatgcggagcagtgtcagatgaggccagaaaggtgggtgggactggtcttcaggggctccagatgaggctgaggggctgggcctaggtcctggagtggggtcagctctgggacccttctggggctgtgtggggaaggggctgggggccaagaggtccaggaggaggctggcgatgagatggctggaagccaggggttcagggaggcccaggctcctggtatcagggttcaccggctatactgaggatcccctgcccctggcacccagctgtggaggggacactgtctttgaggcatcactggttccacaaaaggtaggggaaggtcttgagggaccaccccatgccctcattaatcaaccagaagcttggcccggagcagcagcggggattccagtagctgtgggcatacaggatgctagggcggccacaacccaggcagctgaggccgagccacctaggaacgcaggctcagagcagaccctcttgggacagacggagaaggggagggggcgggcttctctaagttaagccgatcactgagcacctcactggacacgagagaaggcaagcccctcggaggacagaagggaagagccacagacttggaggctgtgaaagtggagacaggtggacctggggtggcagcaatgcgtgaaatgccaggccgtgcccccgccccaggagcccaacatgacaccggcccccagggaagctgactgtgccacttcatccagcgcccatcagtcgccttggagcatcaggaatcctgagggctggggtcccggaggatcacagatgctggggcacctcaacctcagggagccgctcgagaagtttcttttctgaagtgtccacctccttctggtcaccggctggagctgggacaggta

SEQ ID NO: 158731 - DNA, 1000 bp, Homo Sapiens
cacgggagaaaaatagactttatttacaagtaataacatttagaaaagatccatccccggcccttaaaaaccttcccatcactccaaatcccaccccagtgcaagtctggggaaggtagggtgtgagctgctgctgaaggctgtcccccaaccccactcctgagacatagggcccatccgtcctgggaaagagcatcctctggcaggtgctcccaccaggtcagacccagtcctggacttcaagagtgagggcccctgctgggcccagccaccaggacagcaggaaccagggcctactcctcttatggtcccttctagatccagaggctaagaggaagactggccaggcccaaggacccagccatcaaaaccagcctcaaatctggttgtgatggagaagtgactttgctttaagaaaaaaggaggcaaggtagggagagcgcccacactgtccatgctccaggccccctgggccagctccgagaaggcgccagtgaaggaccagggaccaggccagggtgcgggcaggcatcactgtctctaggggtttggctactgttggcctgggagctgagagaaggcactgagagggacagtaggcggaggaccaggtgaggtcagcatcggggacacaggtggggccactcactggtactggccctttagtgctttgccttgcccttggctcgaggggtggcaccaatggcggcagcagtggcggcgctggctgtggtggtggcaatgcgcggagaacggcgggttccactgcgagtgttgggggaagccttggacagggccttctttgaggctccccgccgcagaaggctgttccctagcttcttgggtgtgttgaggatgctgaaggccatcgactggcgccggtcagcctgtttagtagaagctggagctgctttcttctgggcctcagtagtgctctgtttgcgcccttcatgtcggtctcggggagtcatggggcgtgggaaacagctggtggccttct

SEQ ID NO: 158732 - DNA, 1000 bp, Homo Sapiens
ttttttttttttttttttgacgtagtacgtattttattgcagtgatattttcaggaagaacttcatttccaagtgtcaaatatttcagggggtatgtgatgactgtaagctgacaacagtagccaaggtgagccttttttctttcctaagaaaaaagtctcgcgcaaatattcaggaggtttgaaatcatcactttaaggaaaaaactgaaatatcttacagtgagttttaggtctacttgacagaggaatcaaaattaatttacagccagccattaatatgctactcacctgcatgttgttcaagaaaagaaaaatatgtcaatatacaagaataatgaaatgttttattttttgttgtcttgaaaacaattactaaaatgtaattcaggattttatttctctagcctggcttctcactggtatcatgaaggtcatggcacagacaataactgttccaaatatatgacgtattgttcctgtgctttctaggctgggtagataccctatatactctgtttttcccattatcccaactgaatagtattataatatattccctcccctgcccccaccaagtacatagcctcaatccaaaaggagaaagctggatcactcacctcttcccaatctacaccttttaagttgttttagaaacaataagagatgacctgccctctccattacactcgttggttctgacacacagaatagcaaacaaaaccaatttacgtgatgcccatgtctttatacttccacactctggaacaaacacacttgcaaacaatcagctcggggagtgttaaaaggccctcaaaaaattcagaatatctctaagtataaaataattcaaaaacatccagttccaaatagtccctgagcacactgttcattccagcaagaagtctccagagaggtaatgaatgaaaggcacattttctccaacttgaggaccgctgcatagtactagacggtaccagccaggctgatcaaaaagttct

SEQ ID NO: 158733 - DNA, 1000 bp, Homo Sapiens
tttttttttttttttttttttttttttttttttttttttaatcatgaaagcaaaaagtttattcatgtttgaaactacatataactaccacgaggaagactttttcaatccagggtgtaatccagttagaaaggaacacgaaacgtttttaatacattagaatcaccgccacaaattattttcatgactcaatcagtttcagaatcgcatacaatacaaaaagagagaaaggagagggggccccattacacagggtgaaatatacagtactgaatactgaaatctgaatgcatcacaattagtcgctgctttttttttttttttttgcatggattagtaataagatgaagaacattcaaaatgtttctcagtatttacaacagttttaccgatcctgtgttgaattaagacccaatgtttccacactcggttttttaaaagttgcaagtgcaaccctgatttttcttttaaaagattacaatgtacattacattttatgaagggaaacaaagagttaattacaagatgcaaaaagataagaaagagacaaactacagcgtgagtattgttcagaggtagtaagtgagcactctaagctacagaacatgttgaaattctattggtttgtatgagttcgcatgaggtaataaagctgtgttttgattggtgggatgtataaatactcttttgctacactatatacaacactccagagagcagggccttttgcagatgcccagaggacgtagcaaaccttgacaagtctgtgcagcacccagtgcacaccgtaaaaccccagacggatcaatctcgttttcacctctatcagcagcaagtatcttcgtctctcagaacaatctggatccataattttattaccgagcagactctgggcactggtgctttcagagagagaaacgatgctaccagtctctgatctaattataacataagagatctgaacacaaacgtgacgaggaagattcttaaacacaaccat

SEQ ID NO: 158734 - DNA, 1000 bp, Homo Sapiens
tactttatagataagtccaaactttatttaaaactacattttaaattcgttaccaaacatcacaatggggaaaaaaatgaagacccaaaaaagaagggggaaaaaaaaaaaaacacagtgtgtcaaggcttaaatctgtccagaattcagtttctgatgttttaaactaccatggggagaaatgaccacacctatcaaaaaagcagtgtcaaactaatttacatttttatacagatcagatgtttatttagtattgttttcatatatgcattgagtatgtaaggacagagttagatgagcctctgaagacatctcatatactctgggctcccaccgtttcaggttcttttagtgtctcagaatttccagctaattcttcggtctgcatttcacatatttcaccagataaatggtttttctgttcttcttctaccattttctttcttagatctgcctctgaatatattgtcagtttcagtggtaaatcttcaacttttacaaaatcttcttcatcagacttttgacttatattaccagattctgcttcatagtcattcactaacactggagattcagtatcaggacttccagccagagagctttcaggagtttcctgagcagatttaacttctttgactctaggcactaagggttccatttcaggtaaacgtaacggcaaagggttaggctgttgagttgaatcaacagtaggaggtgactccttatgggcagcactatttaaaggttgctcatcttccaagatattgaggtaacagggtttcacaggacagttattttttttactagtggcttctcgttccaatgggacatttttgctttctgctgtctttttaaagtcacgttgtaggacctgttcatcatgttcattttcttcagtagcttcagtgttagcctggagggaagtctggacatccacagggccttcttcaaattcttccatttcttcatcctcattttcatcttctccacttccataatt

SEQ ID NO: 158735 - DNA, 1000 bp, Homo Sapiens
aaaactgaatgtgtgatttattatgtttaagattggtttataaggcttaaatatatctgtcatagttaacagttaacagcaaataaaggcaactttacaaaatcagtgtttccatacagtacaggactaaatgtggcaactgtgcattggaaaattaatatttcctcaatgcaaatatcaaatctgcagcaccatttagaagcttccactttttctcaagctgcagtatttattacaagctctactcagaacacaaggctacctaaatcaagcattagagaaaaacagtggagtcattcaggcataatatgtcagatttggtacaggattaaaatactaacatttttaatgtcctggtttcaaattaataaatacaaaaacaatataaaaatatacaaccagttgataagactgtactgcagatgctcagaaagttaaatctcgctctcatatgtatgcaggtatgtcttgagtgtcaggatttctgggtagctgcggctggtctttcggaagaagtccaggctggtgagatgttcaatgtcacgcaccctagctgtgtgcatcttcatgagttcttctacccattttgattcgtcctctgagctattgcagctctcctcgttgtcaggccggtgaggcaggatgaaggaggacacagagagagggccgtcacacttgtcggcaggctgagtgaaatccagacagctggtgatgatgctgtagtagtgagttggaacaggaatggaactgccttccacgtactgttttattttgtcttctgtgtcatgtaagccatcatagtcatagtcgaagattggtccacttatcacgttaactccatttctttccgaagcatatttcttcaccaataccctttggaaataattccagacccgtttgaaagcaggatacattggaaccatattggttacaaggaatgcatcatatttagcctctggtgaagagctcagataaggaggaaagaggaatccgtaggaca

SEQ ID NO: 158736 - DNA, 1000 bp, Homo Sapiens
gcaagttagacatggagttagagggtcagataaataacgaagagaattaagttagcgatagaaagatctaaggatactagctcctgggcacctagggtgcaaactgacttgtggcagcataagctgatgctgcacaggggacccaagccatgttgctacttgtcacttaaggcaggaagcgcacaaaggaagtgatgaaaggttattagcctgcaacattatttacagcatgagagcctctcctacggttctcaaccttcattaggcactactgtgatctagtgatggttgtaacccattctttaaaggcaaagatgtaagatttacagggaaaagcttcgggttttatcaattcactatcatcaaacacatattgagttggttaaaaaaaaaaaaaacccagaacacaaatgtgtaatatttttgcatgagaaccacttcaacaaacataacatgtggcaaccaatcaatctgggtcacaaaaagccaatccgtatattgtaaagccttacacagtattaggttccaaagtgttggcgcagatgaaatggctgcagaaagaagctaaagtacttatcttttcaaacagtaaggagtaaaagccatgttatctatcatgcctacagcttcacaagactatttaagggtaagaaacaaaacaattactcaaaaagatattgacagggttcaaataatgcacaataaatctttctcaggatctaagacacttaaaaatataatcaaatttgttgctctcttcctcctccaaaaaaaaaaaaaattcaaagaataccaggtaaggtacctctgcagagtaaactgtaactgtatatcatataaatccaaatatatgtgatcactgttctgtcataatttgctattttatatacacctcatgaaacactatatatacgttacacaagtgtcatttacagttgatttgggcaaactctgtagtctggaatactcatagggttttctcaatctgattacttggaaa

SEQ ID NO: 158737 - DNA, 1000 bp, Homo Sapiens
taggttcaagttactcaacaattttatttacccattctacacacacgcacacaaaaacacatttcaaatacagttatgcacactttaaatggatctgagtggcatactttgttatcagtgtcacccgattaaatcagaatgttgctaaagacttatgttcctatttcaacagagcagtgcctaggaaatctacagtagaactctcttcctaggcttcccaatctgacccattcccattcaacccagaggtgctcagccccacaccatcccccttcccaaagggcaccatgtatgatcagccctttgattttgccatagcaaaaccatcaccataccagcataagttgatcttcttgttaggtcaatataataaaaaacgtacataagcaattcagatacaaaaacattgcgtaggtaaacattggtcacagatatccagtgaaaggcttactggaaaaaatacttttgccaacccttaaaatcaatttttaaatgccaaattttcttctcatttttacttactagattaagtgtaaaatccaaatgcatggctgactaaaaatagcagccctgtccaatggaatacaacatttcagaacagggtaagctggggacacagaagcttcagaaatgaacagtggaactgaagtcctgccctaaagcaggggactggatgagatgacttcaagtaaaggtaacaactccaggctctgaacaggcattcccttagctgagttcacaaaataccataaaagtgatgcataacctttatcttgtacaaaataatgagaatttggccactactatataagaaatatctatttaaaatcatagtgtacagaactcccctataaagaaaacacgtggagtgcttaattccttcctttgttagacacatttaatagacagagaattaccataatgtacatacacttcaatggatacaatcagaaagcaggcagactgtcagcttacagaccctagaccgttagtcaggcaa

SEQ ID NO: 158738 - DNA, 1000 bp, Homo Sapiens
tttttttttttttttgaaacaaatgcatacctaattttacttattcatcaagacagatatctattactacaggcacagtttaaaacagaaaagacataagatatagagcaaatattgtcaagatgacgatattttgccaatcagctatttttgagaaatcatcttttattctgaggctgtgcttttcattcacagtgaatctaaatctcttccttttatctcctgggtgtcaggatttgtcactcttcccataaacagaattgattctgttggattatgcttcataataaacagaaatggatgatttgctataaattggctttgagccagactcatgatcacagggatgtgtatgccagttgatgttgcagcttcactaccatcttcatttatctcaaagaaaactttttgcgtcacttgggaaacatacacttcagatgaatctgttattccagaaaggtcgcagccaccactaaatatctcggttatgttcaaagaatacaaaacgtctttgaagtctactttttgttctactttaaatctagggaggcttatttctacttcctcttcttgcatctcagagagccattttaggatttgttgagcagtaattagtttttccacttcttctatatccataccttctgcaggaagtatgataattaagctaaattcatcacctttgtaagacaattctaaaacttggtagttcagggaagattcagaaaaataaccatattttgttctcagaagagccttcatcattggaattttgacagttgaaccatttttcttagtaaaatttatcagctgtgtgtcctcttttctgaatttctgtttccaatctcctttgaaataaatagcattcaccaggacaagccgagtcagagggccaaattcttcccctgaaaacatgtctttaatttttccatctgtttttctttctacccaggtacttatcatctctgcacaagcctttgcatcttgaaaatccaccagt

SEQ ID NO: 158739 - DNA, 997 bp, Homo Sapiens
agtggttctgggtttaattgggggtgaaagggtgctgcacagttgctcagagggcccatggctgggccgcatgagtgttcacctttgcgactgaacagaggagcgtggcctaactagaaacaattcggccctcgagtctgcctccagcacctggggggacacggggcggctctgctgaccaggccttctctttggaacacccctcccaccacactgccctgggtctgggagcctcccacccctgctgaagtcaattccttaagggagaatctggcggtcgcagccccaactggggatggacagggagtggggaccccagggcccccaatctggaagggccccctcccagccattgtgggaacaataaatactgtgtgacggtggcagggagtggggggttcggccactggctggcgggcaagggggagctggccggcctagccgccctgccctgccccgaggccaggcctgggctccccaccctcactcagtgcggaggatgatgtggatgccggaatccgtgaacacgggcccgctcatctcccccgtccgcagcgcaaacgaggcgtcttcaaatggcttctgcatctgacctctgctgaaggcacccaggtctcccctggccttggctgagctgcagtcgctgaactgtgaggccagagactcaaagtcctcctctcccgacttgatcttctggatgtagccgttgatcagctccagggcctcctccttggtccgggtgatcttctcctgccgccaggacgagggccgccgtgactggctgtgcttcaccagcaggtgcgagcagcggaccctggcaggctccccctgcccgtttttgccaccactgctgctgttgccgctgggccgctcccactggctggcgttagtgatgtggttgaagtagtacactcggcctgagctgcggctcatgcgcttctcccagccgggcggcagcttctcctcgtccgccatcttccctcctgccgcagcgcct

SEQ ID NO: 158740 - DNA, 1000 bp, Homo Sapiens
tttttttttttttttttttctgtctaggattttattagactgctttttttctcaatatacctgtattggaagattgagacaaaaaggcacaaactcacattaaataaacaaggtaatctaatcaattctacaaagtgtagtttgtaaaacaagtagcactaggaaccaaccaaagtaagtcagggagtcccagcagggactgtaaaagaacttgggaagctatacacatgcccacgatactgaccctgtcccggacctctctgcatgagaaggccagagcccagcacccctcctacagaggcactgctgcttctgttggggctgtgaccctggaattctgatggaagcagctggtctgaaggggcatggcacacactcaggtactacccctggagctgaacctttatcataagtccctctgagtgctagtcagtttggaggtgggtgaggaggaaagggggtacttaaaagaagccaacactgttgcccagcagcaacaccatccgtggggatggaacagaccagggacatcctcctttatgtttatgtgggctgcaattccagatccaggctgacctcagctcataatggatgcttttcaactggggcaacaggtggaggtgggaggagcccttgttagggctaaagtgatatgtgtgggtctcaagagccaaaggaaggagactaacagctgctgaccctcagaccacatagacaactgtctgcctagaatgtcagtttgtttctttcaagataacccgcatctggacttcccctagttgatgaatgaaggaacatctttaagcacaaatataatgaatagctaacacagagcttataggaaaacactgacatttttctccagtaggaatgcctcttctccaactttccaagtcagataaatgctaccagcagttgagatgctacccagatgcattactaaagacccctcaaggtgaggagacttacacagaggaaggtgtctgtaacaagacatctg

SEQ ID NO: 158741 - DNA, 1000 bp, Homo Sapiens
tttttataaaaatccttgaccactcgctggccggagggtggagagggctgcattgttattcctaacggaatgaaggacagctccagggactgggctagctcctggtccccagggaggcagcagcagacactatgttagggctgaaggcaatttgggggcctagctctgagcaagaggctgggagcaggcacaccagccctgtccccacatgtggacagagggcccagcccactcaggggggaccccactgggttcctccagcctagtcctggagggagatcttcacaaagagggtggctgatggatgctggtccccgttcttagacatgaggtggacatggcggtatccttgcttgaggctgttcaaggggatggtactctggccaatgaagtcattcttggaggaggcatcataatcttccaccaagaagcggatgagggcaaggtcaggcacaactacctcaaacgcaaactccgtgtcccaccatgggttgaaaccattgttggtgatgacagcagtctggcggctggccacgtcccggctcacgccatggatctccactgtcactttggggtccacaattgaattcttattcttgttgacttttggcagctgctgccccgaaatgaccctgatgttgagccgcttccgtgcccaccagggcccctgagccagggcgcgggggttaaaggtgccgttggggtctcgcaggaaggcgggcttcagcacgtacccacaggccccgttgtcctggaagcggtcctggtacacgtccatctctggcccaggtgtctggaaattcagggccacgatctggcagcccccattccacatctccacggggctgtagttggaggagtctgttctccatccagccgggtatattctgctcaggtgccccacgttgtggcggacaaagccgtttcctgattcttggagcagtcgaagggcacggttctcagagaaggacgccatctcgtagaaggcctgtccaggggt

SEQ ID NO: 158742 - DNA, 1000 bp, Homo Sapiens
tttttttttttttttttttgaaacttcagtatgaaatacaaataaaaacaaagtgtagcagcgatggcctcagacagtagatggcagggacaaactaaggctggctctgggccaaagacacgagcctcctggggagcctgtggggccccctccctcctgtgaggctctcgtctggggtgtctgcatttctgatttacatttcatacttgtttggtgccctgtgaaattggcctttcttctttctgcttccagctggtcctgtgtggaggtgaaggacaagggctgcagtgagccaaaagtgaggtgcacagaggtcttgttttcctgaggctgatagagggttccctctagacccggctccaaataagcagggctcacaagccaaaatccagattctcacgggttagggtctggattcctggggaaaccagcccacaaactgctcctgtgaggctgtggggccagcccatttctccatgcaaacaggtgagactccagccccaccagggccttgggaacccgtctcgtctcagagcccaatctcagggagccagaagcccccaggggcttttcctccctctgggaggcaggacaaagaactaggggcacctagaggacgctcccaccccaccaggtgtggtgcaggaagcaacagaggcctggaaaagcattcactgcgtgagaaacggcgcccagggcactcgcagcctcgctcacggcctgcttcttcaggtgctctggcgaggccagggccacatcctgctcccgctccctcctgtgacgtctgagctccctgaaaatggttttctttggtttcctccccgttccctggcctggggtcacaggtttggacagtcagggtggtcagtggtctggtcactggaagcacggggatgtggccttggcatcaggaggcctggcacggacgcagaggcacccggggcccggggctggctaatggcccagctgtgggttcttctgcagcagccactccagggtc

SEQ ID NO: 158743 - DNA, 885 bp, Homo Sapiens
ttttttttttttttcacgcatggaatctggtgtttattacactcgggggagagaggaggtcactcggtccagcggtggccgcagtgtggggctgtgcacacgtagtaaaggcgcatggcgtcctcggcccgcgcactgtgtgactggaagaacacagcctccttgtggccgcacttttggcacgggtggtcctcggtccgcggcaacgtggggtcctgggacacgtcggcgataatctgggtcagttcgtccacttcgtgcgtgatcttgttgacatagatgcagctgttgtcggcctcctgctggtaatcacagttccggcacgcgtagagcagaatgcggttctccttgtcttccttggggtacagcatgttgttacattcctggcagaagcgaatacccacgaagcccggctcgtaagtcccgtcgggctccatggcgacgcgcagcccgcgcagccctcccagccttccgcgcttgctccgccgcgctacaggtcgcgggaggggccaggcctaggtgcttcgccaaaagagggcggagctgcgcacacgtgctggctccccgccgcctcgggctcggctctctccgcgcagaggtttcatggcttgcttcaatcttttgatatcttagagtaattgcttccaatttttgggcatcgccgcctcagtttacagaatagtatggatctggtgccagagccgggaaaacgatgcgcatcgtaaaccgcaaaacactgagcatccaggacagaagccaaggcgcttggcttggttgaaggccagtgcgcatgcgcgagtttacccttcgcggactgggcgagctcttgccactcctacctccgggcttcagtcttcgccgcctgttctggtcctttcccgggcc

SEQ ID NO: 158744 - DNA, 1000 bp, Homo Sapiens
tttttttttttttttttttttttttttttttttttcatattattgtattttattacagtacgtgtagtgtatactaactgaaagggaaaaatgtaaacaaaaccaaagtcatggggaaaatggcatcttgctttaatcttcaactgaaagttaccttaacaatccatttacaccattatgtcaaattttagtcatctctgcagaattttagacaaatgaaaacagacaaggtaacaccaaatagttaagcacagaaagtgatactgattaaaaagttgaaagtaaaatctaccttggctagaactgaacattcagatctgtctctccagaggaaaatctaacttgaatcataatggttcatattttgactagttcataccctatcaattacctacttatgacttgaacataccttttctcagctgcatgtgacagcctaaaaccccactgagcatgctgcttggcatgccttactcctctgaaatcatcatctactttctaaaaaccagaaaatgagtttgtgatttaaatttcaaaaaatagtttgtagaaaacacaaaaagaatcaactgtttaaagtcttatccttttcttcactctatgacagctacttctacaaaaaaaaaaaaaagagtatgtgggtactttctaagaactcagaaacaagaaaaccaaaatcagagggtgcatgaatatatgtgcacgcacatgtacagacttaatctctacatcccccaagacagatttaaacaggtaatcccaacattttaaattcagaaaccagagacaaacagttttgtttctaaatcagtggtattcctagctgaaatgtttagaatactgcactcacagttcagcagtactttgattatatatctcattcaaaaaatcaaaataatggccacattcttctaacagcaaggaattctcccactttttatttattttcaaatactgctgtttccataaacctgcaagtggaagataagctgttcaataa

SEQ ID NO: 158745 - DNA, 1000 bp, Homo Sapiens
ttttttttttttttttttttttttttctcagagacccactttattcagttctgtacatatggggacatcggtccaagcccaacccaccttagcatgtatcactctgtggagaataaagcaccctatgtacacagccaaaagccgcactgcctgcgcccctggaacctgggtccggccttcctcagcccctggcccctccaaggtacctataagggacaagagaaggcctgcccagcatagcacaaacaaggaaataaataggtgttggcaggagccatgcttggggcaccgctccctgcttccttctttctagttttgggaaccaacagcacagaaaagcagtcagccccagggtggtcccttccatgtctgtgaccccagggctgctgctcaccaaagacagggcacggggtagggtgtttattcatccctccccggccccacttggtccatctgggccctatattcatcagttattgtccacagcctatacttttctccttttgacctcccttggtcaggcatggggtaagaagaaataatacaaccctatctgccagcacacggctgggactggggggcctatttgtgctgcaggggggttggcttcccttcagctactctgggaccaatggggcttgacataactttggtgagaataatctcctgctgttccctacatgcctctgcaggggagagagaggaggggagatacctggcgttcaaatgaggatgaagggaagaatagaggagcgtatgtattcctgtgtgtacttctcagagcagcctcaggtagctgtgggtgaggagcaggtaggggacaggcatccccaggttgtctgagcactaagcatcttagtgctcagcctgtactagccacagggaggcatgaacaccttttggggagaagagggaccattctgtgggtgtccctgcttcaagtgcccacatccccctcccttgagtagctagagaggcgctgccttcccccaagacagcc

SEQ ID NO: 158746 - DNA, 1000 bp, Homo Sapiens
tttttttttttttttttttaagctgtttattttattggtatattaaaggtagagctatgaccaccttcttccaatgtcatggcatttgaatcatttgaatcactgtcatcttcttattcacttcctgtcattgaaccttgattactggggaggctgtccctggggaggtctgtgtggtctgcccccttgaggaggtggaggtggtccctggggctttccagcgggaggtggcagaggctgctggggattgcctcctggtgggggtggtccttgtggccttcctggaggagggggacgttgaggtttgttaccttcttgtgggggtggtccttgtggctttcctggatgaggtgggggaccttgaggtttgttgcctccttgtgaaggtggtccttctggctttcctggacgaggtgggggaccttgggactggtttcctccttgtgggggtggtccttctggctttcctggacgaggtgggggaccttgaggtttgttgcctccttgtgggggtggtccttctggctttcccggacgaggtgggggaccttgggactggtttcctccttgtgggggtggtccttctggctttcccggacgaggtgggggaccttgggactggtttcctccttgtgggggtggtccttctggctttcccggatgaggcgggggaccttgggactggtttcctccttgtgggggtggtccttctggctttcccggacgaggcgggggaccttgggactggtttcctccttgtgggggtggtccttctggctttcccggacgaggcgggggaccttgggactggtttcctccttgtgggggtggtccttctggctttcccggacgaggtgggggaccttgggactggtttcctccttgtgggggttgtccttctggctttcccggacgaggtgggggaccttgggactggtttcctccttgtgggggtggtccttctggctttcctggacgaggtgggggaccttgggactgg

SEQ ID NO: 158747 - DNA, 1000 bp, Homo Sapiens
ttttggctcttaggaattgtcattttatttctgctacaaaatttaccagaaaaaggtactgcaacaatcttgtataaagcaaatctttaacgaaagaacatggtatagactttctaaaaatattcatactttatcacaataactacaaggaaaaattcaatttctatcatcagaaccaagctgcagtttctgaggtagtagagacagatgacagaaaagtttgaaacaaaacccctaaaggaaatagtcaacttgtttaaaatgtaaaaattaatcgaatatctatgaaagggcacaggaagctagatattttaaggaaggaaggtacgctacttacaaagttaacttgtaaccacacaggaggtgtaaagattctagagaagagcactttggttaactctatacgttctgtggctctacccattcataaacgagtctctatgcataaatgagtacaccaatagttaagattaccaaatatatttcaaacctaaaattaaattatccaagttgtggtccctttattcaaatggtaagtatatccatgcaggaagtccaaatatcttaaaaggaattaaaattaaattgcatatatcatattccttcaatagtttgaggtctattgcttttaacaagattagtattattccattttaatacgtcaggagtacataaacacaagtacacctgaaatcaccagtgtttaaacttttatttcacaccatgcaaggtcaattataacacattaaaaagtgacaacagctataagctgcaattttacatttgtaaatcggaaacgtccattttcaaaagctgaacataactatcaaattgtaatagctaagcttcaatccaactgcttatacagatgaaattttctatgaacaacaatgattttatatctgtccacattctgtgatagttattcttcgacaaacagaccctttgggagaaccaaatgattcaatctttttcacagtatccatgccatccttaacaa

SEQ ID NO: 158748 - DNA, 1000 bp, Homo Sapiens
ttttttttttttttttttttttttttttttcgttggcagtgacatttatttttctgggggaggggagttatatacagcagtgacccggagcccctcacccccaccaggcttaggtggggacaggaggcgttggcagaaggcacacagtggcagtagcccagaagaggccaggaagtaagggtgggtatgtgatgtgtcctgggagacccagatgaggaaattgaggctcagtgagggcctcaggtcacacagcaaggtgcgaaggcagctagtcccgagagcttgtggtggttgcttctctcttgcctgggctacaggaggacgcaggggcagcccccgcccttcttcctgggggcactgggagggctcggtgggagctcttgttcctggtatttccggacagcccgcaccagctgctcaaaagcctcgtccacgttgagacgcagtttggccgaggcctcaaagtaggccacgtggtgggaggcgccgaaggcagaggcttctgatcgggggacctggcgctgtgactccagatctgccttgttcccgaccaacacaacggggaagtcgtcgcggtccttgacccgcagaatctgcgtgaagagcttgcccacctcgttgaaactctgccggtcgttaatggcgaacaccagcaggaagccgtggccagcacgcatgtactgctctctcatggccccgaactcttcctggcccgcggtgtccaggatgtccagccgggctgggatgccatccacactgcagatcttcgtgtaggagtcctcaatagtggggtcgtagtcagacacgaagtaggactggatgaactggatggtcagcgcgctcttgcccacgccgccgccgcccacgaccaccagcttgtgtgtctcgctgggcggggggtccccgggcccaggtcccccgccccggggccgcccccgccctgtcccggacgccgccccgctgctcatgtcgccaccgctgctgctgccttcgctaccgc

SEQ ID NO: 158749 - DNA, 1000 bp, Homo Sapiens
ttttttttttttttttcctcagtaagtattttattgagatttaaagcacaaaataggtgaacaaatcgggaggaaggtggtaacacaggaatgggaacgtaaaagtcaaagtaggcaggactcaaactggccataaaggcactacggcatgttcataaacaccatcaagtaaaagaaaggggaatcaagatgttctcacttcttttctgctccaccttaatactccatctagccactggtatggagcatgtcatcaactcattcttctcacaagctagcaagggaattaaacattttatcagtcaaccctatgctcaccaagtgagccaatgttacacagtgattttgtgcatccagtgactgagaactacaggcaaggataggccctgactgttaataaattggtcgtggctattactagaaaattatgggtgcaggcatttacctatacaatgacctgcttactgtggcagctaacaatatagtcaaaccagtctattaccatatgatgtcctattaacaagagagcccagttgaaggatgtttcatacttttagaaagcctaatttcttactgtaatatcctcccatccctcttttaaaaaggctgtagttcaaaaagcttttatgttctttccctgaaaacaagagaactttggtcaaagccaatttttaagagtcatcacttctgctgagtaggcaaaacaatgaactataacaacagacatcattttctttccttaaattctgaggtttatgctggaaaaataaacccatttctttataaacatctaattaaataaagtatcaaagaaaataagataatggaagaagcatccgccttttggggcactatattcctaaggttgggctttaagattttttaacaggaaacccaggaatttctgaaaaacaaggcctttttcacattaccaagaactcacagctactctgtgaatgccctagatatttgactcaaatttttcactcaatcttattag

SEQ ID NO: 158750 - DNA, 1000 bp, Homo Sapiens
tttttttttttttttttttttttaacagtggtaaacagtttttattcaggcaatgaaacatggaaaaaatatattagtaatcattataataatttgtgagtataacttttacaaatagttacttgacatataaaaagggaaattactgtgcatataaaatttatgtagatgaatattccacacaacacaatcctgatagcagtagtcaacgcagcactcatccctccagatgaggggctcctcacacacttcatggcacccgtgggaacacagtggaagcagatgtgcaatgaacatttacttggcacattagtataatgggtatctattggcaaacacacacttgctaacagcaatactgaaaagtttactgctacctctgagatttaaaagaaatgcctggatcctatcccgacggctgagaaggaccgaggctgaggctctggtgtggtcacctacacgctgccctgtatctggactggggatggtttgagttcaaatttgtacatgtccatctgaaaattctttataaatacagaattagcagttaatgatgtgaccaggaaattactgttttgagtatatgtcagataccactaaaaggcagagggggagaaagtgacatcttgacagttctaaattaaaggatcgatacagggaaggttcaggccacatctcagctctgagcctggcctcctccatacaagttaaagcattacacagaccaccacaggccagcattgcacacaacatctccatattagaactataaccagaatatatatttatataatagctgtaaccatattatagttaataaagtcattccttaggaatcttgtttgtccaaatctaactgcatgctaagaggcacagaaatgggattgcatttggacaaaaaactacaaaaaagtgcaatctttagtctccaggatgcaagctctggcactaggggatgggtcttccctggagagatctgccgctgatagtctcttccaga

SEQ ID NO: 158751 - DNA, 1000 bp, Homo Sapiens
ttttttttttttttttttttagattccagaggcttggttttattgtgcagttttctttgtcctcaatgagatgccataagctgtggtggcactatacacagtcacagaacaggaagaaccaccgggtgggggctgggggttgggaaaagccatttcctgagaagtgtccggctcctgggtctcactccatggcttgcctcaggccccgcagaagtccctgagaaggcaggcctgcggggcagggggctgtctgaggggctcaggcaccagccagcaggggctggcactgatgggcgaggggaggaagtgcctcccttagaaacttgggccaaaccctgtgcagctctgggactccaccccacctgacttggaggctgtgggtcagagctctggaagctcttgggagcttgggacagcctgagagggtcttgtcctcctttgtagccctctccactgtgggtggaggcagggaggggcagcagggccatgcttttagcttccttaggcagggagggatgatgaaccctcatccttacctccttctccaaccctccactagcgctgctttcctggtcaaacctgcatcttcactgggtcatgccccaaggcctctgagggacttccacagtggtaaggagggctgccctttttatttttttttggttgtggctgagaatgctggagatgctcagttctctccctcacaaggtaggccacaaattcttggtggtgccctcacatctggggtcttcaggcaccagccatgcctgccgaggagtgctgtcaggacagaccatgtccgtgctaggcccaggcacagcccaaccactcctcatccaagtctctcccaggtttctggtcccgatgggcaaggatgacccctccagtggctggtaccccaccatcccactacccctcacatgctctcactctccatcaggtccccaatcctggcttccctcttcacgaactctcaaagaaaaggaaggataaaacctaa

SEQ ID NO: 158752 - DNA, 1000 bp, Homo Sapiens
tttttttttttttttgttcttaaataatttattttttaatgttgactcttgtgaaaagttacatttatttagaaaaacttgaagaaatccaacaaagaataggtggctttctattagggacaattaaatgtgcaaatttcaaatactttttataataagtataaataattactttttttcacattaagaatggaaataatgatcaacacaaaatattaagatatcaactttaagagaattagatgaaaacactgaagtttatttggtatctttggaaagaaattataaagattcgtctgggaaaaacttagggggctctaaggggaaagtgtgcctaatagtatgagtaaaggctgtgtagagttatggatcacaaatattttcaggccataagtacagacccccaaaatggcagcctttatctctggggaaaatgcatttcccctccttttttttttttcttctagagcaaatatgacagcaaccacaaagcacacagagaaactgtaagccagcaacagaaagagatttcctcatactcatggttactggcttttgctgtcccaataccagggtaccatgggatgcaggggacttcccagcccccccaggacacagtgttaacagaaaataaaaccatcacaaaaggccacatctttccctgtgaccattgccagtctcatccctgctccttccctatctcatctccaaggaggtaggacactcagaggcattaacagaacacagagtatagttttttattacatagctggagtttcataaggagaagcacgaaacatcgatgaatatgtatgtataccttggatgcaattccttctttcctggggaggcaagcaaaagtgtatcaaagaggccaatttactccctgtggtcaggaacttgcccacagcctgactcaaagcaaggatgttctctcaggagaacactgtggcattttccccagagctgaagaaatatcttcacttaaataatcttgaag

SEQ ID NO: 158753 - DNA, 1000 bp, Homo Sapiens
tttttcacttttgaattctgttttatatcaagctataaaaacctggatcctgttcaacatacatacaaaagcagtactctaaaaaataattattattatattaacaatatcaaacacgctaactcctacacacgtacaaagaccttgggcatcctttataccggccacttcctggccacagctttgtaaggcagtacctgggaaaaggggacggacccaagagagccggccccaaatcctgactcagcactgcagaggcatcagccgggctgagtcatgcctgagtccgaagggccccctctcaggctgagaaggaactttcaggcccagggaggagcagagccttagggggagcacatgccgagcaggaaaacgagctcacattttcctggggtagagcgaggtgcccggcagggcaggggatgaacggagggtgcggtgggcagaataacggcctcccaaagatgtccacgtgacagtccccagagcctgtgactatgttaggttacacagccagtgggaactaaagttgcagatggaactaaggtggctaatcagctgacctgaaaatagaaagacgacctgggttctctgggtaggcgcaatgtgatcataagcgtccttaaaagcggtagagcaggccgggtacagtgactcatgcctataatcccagcactttaggaggctaaggctacaagatcccttgagcccaggagttccagacaagcctaggcaacagaatgagaccctgtatccacaaaaaatatgtagctgggcgtgggggattgtctcaggggactgagacaagaggatcacttgaaccaggaggtccaggctgcagtgagccttgatgccatgaccaggccactgcactccagcctgggcaacacagcaagaccctgtctcaaaaaaaaaaaaaaaaaagtggtggagggaggcaggagaggggaggcctcaatgaggtgacgggaaaaagattcaactacccacagctggctct

SEQ ID NO: 158754 - DNA, 1000 bp, Homo Sapiens
ttttgtgggaaaatattttattgctgccatccccatggtgagccgctgggggtgaggggtgaagctgggtggtggatcacagcatcttctggaatagggcgatggcctcatccaccttcctgagctctgcttctgtctgttggagcttggcttcatctgcctcctggacttcgagcggcaccttgacaggatagcccgaggcagcacggcgttcccgcagacgctgggcctgccgctgggcctcaactcgcttggcttgcagcttgcccagctcccgtgcagggtccaccagcccctgaagctgcaggtggatggagcagcgatcagaagccagagccacagcgcaaccctggggggcgggagcccccagggccagaacagccaccacacctgcgctggccagggcctgcacgtagcccgacaccgccgatgccagggcgcccgtggcctcatccgccacttccaggaaacagtcaggccggatccgggtgaggttgtagtcggcccgcagggagcgcacggctcgcgtgatgcttagcgccagctcaagggcggcttctgcctcggggtccttccaggagcactctgagggctccgggtagggggtaacacagaggctagggggagcttgcggcatcctccggggcagcctctggaacagctcctccgtcacgaagggcatgaagggtgagagcagccgcaggccaacgtccaggcaagtgtacagggtctggcgggcacactcagctgccacctggtccaccccattcagtacaggtttcaggcactccaagtagacatcacagagctcatagagccagaagctgtactgggcagtggtgacggccgggaagtcgtaggcctggaagccttgattgctgagcctcacagcctctgtcaggcggctgcggatccagcggtccaccaggctctcatggcctccgggctgggaggtgggtgagggcacaaaacccttcccaaggccacgaagggcaaactt

SEQ ID NO: 158755 - DNA, 1000 bp, Homo Sapiens
ttttttttttttttttttttttttttacactgcaaaaaggtcatctatttacagaagagtgatttaaagacattatggttttctttacagatgtaagaacagcaactgttcactttttaaaaactctacatctcaaccctccactattattatagtccactgaattgcctgtatcaaaggcagttttttgtttgtttttttcccatttgactctccaaatgaacttccatcatttcttcatcatctgtgggctggctctcctgaaaagtctcagggaataagtcacaggagggcaggtttttgacctgctactaaaaattaaaccacaaaaactagagatccctctcctgcaccctgttcccctcactttgtgcagttcagtcatcactatccgacagggtctcgtactgtgctgagagcagtggggcaggctctcgctcccagatcctgttctgttggtgaggagctgcttggttcaccgcagagggagcacatgcaatcggtgttggtggagtactgctgagcatccgcatagtcagagggttataaggaaactgagttgagcctgttgaagagggcctgtcttcccaggcccaccctggcgtctgcctatggtaatccccttctgaatgtacagaggagactgaagagggccgttccgttcctaagtagccttgcccaggtataggagacttagatttcctgctgtttgacttgctgatcagctttggtttgcaaactcctcctgaatgaggtgatgggtccccttcctctcttcgtgtctcaccactggtcacaactgaggtgttggcagtaccaggcactactcccataggctgggacatgacaactccatgatcctcaactttgtcatcaaagcttcccatgagagccttcctgataatgtcttccagcccaagattactggcaggatcagcaaaagaatggcctctagagctaactgagcctgacgtagtaactgctggcagattaaagatct

SEQ ID NO: 158756 - DNA, 1000 bp, Homo Sapiens
tttttttttttttttttttggagtataattcgctttttaattagaacgacgtgtgtaaatgacagaataccaccaccctgcgcagatggcggccacagaatacgcatcgaattcattctgcccaaggaagggagggagggaggacacagcggggcgtgagccagcagtccccgcccccttggtcctgcgagtgatggggtcaccgactgtcggcctgcacacgcctcttgaacggtaagcagagatcaaaagcacagcagcagtaatactgggtaagtccttccttgcgtaaaacatctgaattaattcattgaaggtatcaaaaatataccctgtaaaccaacacatcatttacatctgcctttccttcccaccgctgcggcaacgatgtgtgaaaaaaacagtccagtcctcggagcatccgttccccccaggccgcacctggcccttttgtccgcccacctggcctgacttggtttccagcaatctcgttggctggggcagtctgtggggaccggaacgagcgcactgggggctggacagggcctgcgtccatctgtccagagcgctaagcgggatgggaggcggagggagggcgcgggggctgcgagctcagtttagactttggttccaaatgcattcgggggaggcagtggcgtggaggtgcgtggtcatcctgctttgggtccctggccgccctggccgcctgcgtgtggctgccacacgcctgccgtgccccctccccggccccttcccctcccttcccgagcaccaggtaaacatcccctgagtaaggtctgcacagggccagcccggggcgggagtcttagttaaggctttagacaggcaaggatgccggctctggacggacagatggatggaggcgcaggcggactcaggggctccttccttggttgggggagtcggcagccgccctgctcctgcagggccgttcctgtggctcgctgggacctgacaccgcccgcccccccccgccctg

SEQ ID NO: 158757 - DNA, 1000 bp, Homo Sapiens
tttacttaacctttaaaaactgaaattttggccatagtgctttttttggggaggggcagcaaattgtcgtagggagatggaacattcatttgtcagttgacacacctatgggaatcagtaagttcttttttagccgtattttccttggcataaccagctccaaactgcagcaacctctttctgcaaggagacaaactgagctttacaaagtttgtggcctaaactctggtagcaaatgctggaccaatttaaatgagggtttgcaagcagggtgacagtttacaaatgccgcctgaagcaaatcgggacattggttaacctgggagtggggagggctggggtgaggaagggagccgtgggctggtgtgtggacatatgtgcaggcatgtggtctgagcgtacacatatgtagcatgcatgtgtgtgtgtgcggccaggctgcctgagtggtccatccaatacccacagcattgctcatcccatgagcaagtcatctctcatgctcatacaaatgatttatgtaatacatttccagccagaaacactttcacttaagcttttcttttgcttttattacaagcatataatattaattggcaaaacactgaatacaagcttcactatcataaaatcaaaacatttaagcaatattccaaaaaagatttgacaaaaactagccaccaagagtacaaaaattacacaccaacacaaagcataaaaaatgtaaactttcaaattaaacagtcaaacacatgtatcttcgtgatcacctccacacctcgactgccttcgtctgccgtacgctgctggtaaaggctgggtggctgcactgtcttccccaacccaacattgctttcgtctgggaaaatgcgtctgataggcaattaagccatgggagtggacatttacacggaggctacgcacatctcaggggaacgctcaaactgcagctcgttcctcagacgcactgttgggtgcgaaggacacctggagggtgagg

SEQ ID NO: 158758 - DNA, 1000 bp, Homo Sapiens
tttttttttttttttttttttttttctttttaattgtttaactttattactgttgcaccatttatacaattacatataatttcaatgcatccattgtacatttttttgttttttttttgttttttttttccattttccaatgagtggtgtgttggtgtctgtgacacagaatggaagagaaactggaactgcaatgaacgcagactttttttttttttttttttcatttccactgaccaataaacagaactacaggtgcacccaaccacggacatgcattaactcgtcatgagaaatctaggtaggctaagtaggatgagagaatgtttgtcactcccaaaaatatctggagaggaagaatggaggattggcattgagatccatgtggacaagctaagtgggctctgtctgaaagctggcattcatccacaacattaaaaaaatatcaaaataagaaaggctgtaaattaaaaagaaaacacagaaaatactgctctcataaagatctgattgccttggcacaggccctgtgggcagaatcaaacgcatcactcccaactcccattgcagaagaaaagctattcaactctcagcggtggaggagtgcatgtggcggcagtttcaggtacaaacgatgtactgcactttcagacgcggatcttggaaatccaggacttcttggtaaagttgactgaaggtatattagatatttccccacaaaaatactatttggattctcccaccccctccctcccttgatgggacaacatcctgtatttttccttgggcaatacatatcattacttccaatttgaaacaagttagtataggagagagagagaggagagataggagaggagagagagagaggagatagagagagagatagagagagagagagagagagagagaggagattgttttaagtggtattgtttttcctataggctgtccttgtcactctttcacggttacggtttggtcggaattagctgccggg

SEQ ID NO: 158759 - DNA, 1000 bp, Homo Sapiens
ttttttttttttttttttttttttggtttattgtacatgctttattaaaatggtacttgtatttacagtatctgcagaaagagtcccttccaaggcctcacacattcagacacatccatactgacacccactccacagccccatgcacccacaccagtgagatgtggagggtcagactcctaaaattaggcagctgttggggataagagttgatttgtttttcaatttttttgaaaacagaaaagcatgggggaatgcatttggccattacaatgctaattgagtttgtgtatattacatatatggcagttaacactgtaatattccttttacattctatatacacagaatgatatcaaggttttatggtcaacagaatattccaacttcagtcttaatgctgcttgtagtgatttctgaattcattataggggctttccctaaaaataattcaagtctatgttaagtgaaataaggcacaattaatattgatttgatttagggaaagggaaggaaagagaagggataaaaactggtttcaaatgatctttctgttggggaactagctctgacttaaacccacctgaaattccttctcctaatttccaaagatttctttataaagatatttttcttttccctgacaaagccaaaaagaaaagtttgggaattcacattttaatgtttcagtagcctgaacaactcaaattgatgtgtacccccacctcccctgatcaggtcgcctccctcacccatgttaaaataaaaacacagtatgtgacacaggagtcccttgatgtttcttgaggagatctgtacacttgagtagcaaatacatatctggttgtcttcaatatattttaaaaagaaagaaagagaaagaagaaaggaaagaaggaaaaaaggaaggaaagaagtaatattgtgactttcttgctctttaaaaaaatccctgtctccttcttttcaggatgatgaagccccactagacattacaaac

SEQ ID NO: 158760 - DNA, 1000 bp, Homo Sapiens
ataatcagaaacttacagtttattgtgaataaaccactcaactttgagcagatgacattgcctcaattaactttttcgttgaagaaaaacaaagatatatggtaaattcatgaaaatactgtgtcctttctcttccaccctttgtagggcagaaaaattctgcctgacctttcccatcttcctgatgatgttaacaaacgacagccactgagggcacaggagggggctctacacaggccaagagctacaggctacagtctgagcacagaaaaccctccagctccagcatccagggccacagctggacacaagtacagaacctggcagccctgcagcccagacaatgcccagggtgtgatttagggtgcagagctgcaactcagatcctgtgccatggcagtatcacaggaaggacttgacggagaggtgaaggctccagacgccaggatatttattccctgtgccaatacagcattcacacctgacctccaggtcctgcagcaggtactctcctcattcacagttagctccccactgttccattctgggttcatttgctatactcctaatctgttctcccaatccaccccacagtctctcccttgctggggacaacacaggaagagacaaaacctgaggaaggaaaaagggaacctgcaaccagccatggacctcatgatcccatgagtcacagctatcctctgtctttaagaatgactgttttatagcttacatggtacctgggaaattgctgacttgcagctgaaatgtatgaataccaaagaatttctatcacaatattcacagatctctgtatcagctctacttggaggtcaagcaggcttgggagagtatagactgctctgcctgccctagagtggaagcattgaacaaagccacaaaaaccccagagatcacagatctaacttttcaatggcccacaggaccaggttcaggacaggtaggacaccaggcaaaccacttgttcccttgcgcttca

SEQ ID NO: 158761 - DNA, 1000 bp, Homo Sapiens
ttttttttttttttttggagttataactttggttctgtttttaccctttatttggaatacagtgcaacattacagttttggatcattaaatgaatggacttggtgatatagtactaacaagcacgacctgaattctgggagtaagtggttttctagttcatgggggaggaaaacagatatgtgcaagatctccagaggagaacagaaccatggtactcagtgagtcaccaaagggctttggcttcaactcactaatggctggaacaagtgccagtcttggtcagccatccaggattttcatcacagcaaatcaaaatctccaatttttcaaactaattgtaggtagaagagagagaataactccaaactgtcttataaaaggatctagatgactactgaagtgtcctccattcatgagttggcaaaatcttcagagtgactgttggagcaaggagcctttcatgtgctcccagttattatatagtgcatagaggctggtaagtgttagtcctgtcagaccacctcgtgctatccctcgaagaccacctgtacatttatacaacatgcctgtcatggttccagctgctactgtgttaaggtcatcttctgcacctcgtgttttctcaatgatgacaccaaatgcactatagagcaaagccagagaacctagagtattagcccaaagtgccccttgcctagtcaccatattcaaaatctgtacatttcttggtttggaccaggccatgttctgggtttccttcaatcctagccgaagaccattcattgcaccaaacgcagcccctgtcatgcaacatcctccaatcgtaaagaaggccagctcaaatctgccccgggttttattagctccggtaggtaaaataaactcatctgtatcctgcacgaggtatcgtggatccacatttaaataaggagacagagggttcataccagttagcgggacgccagccaaatccgcgtgcgagtaacctgctccgccggc

SEQ ID NO: 158762 - DNA, 1000 bp, Homo Sapiens
tttttttttttttttttttgcttattaaactagttttactttagcaccattcttagtggagcaggattcttgatcatggggtggaattttgtgtatctgggcttcatgggatgcataaaattttccagttggtaagtagcaggtgccgagggtctggatcagaaaaaaaggcaggcagccgggttcccactcgccttccatgagctctccgcagctcaccggccatcacttgaagcaaacactcctgagggagctggttgaggaagggcagacatccggcttcttgccctggtacaactggcagacaagggtaaggagctgggtctgatcttccaagggtttcccattgacggtgacccagggcacatactcgtgtggtggctggagagcatctgtccgctgggcgttggcgtgcatgagctgcatgccgcggtcccccattgcacactccatgatagtgtctggcgacagccctggggcgtagagctgcaggcatagtggcagacttctctccatgtcctcaaactcttccatgcagacaatggtcaggaaggctagctccatgtcaagttcatccaacacgcaggcctccaccttgttgaatttgcactcctcttctccatgctggcacttgaactcccacctgccactgacattttgttcctgtgcgtttccgtagggcaccagcgtgacattgaggatctccatgaccaacagccatgttgggaagagctcccggatcaggaaggctcggcagccaccgcacagtgcttcatagtagagggtcacattgacaagcggtgcattggacttcttcaggggcccccgcaggtatagattgcctgtcttgtagttaactggtggcccattcccaaagaagtctaacgcttgcagaggggacgcctgcaccgccgccgtggggacgtccagcagcagcagcagcggtggcaggaacagcagaagtggcgacagggtcatcgcagcaggggcaaaggtgtgg

SEQ ID NO: 158763 - DNA, 1000 bp, Homo Sapiens
ttttttttttttttttttaataagtattattttatgtatattttaccacagtcgaaaattcccaaattatccaaacacaatcagtaattaaatgcctaccatatgtatggcattgggccaaaagataaacgtgtgtttacagtacccacatggctttgttctccatttcccacagatgtaggcaaatgtgtaattaactaacatcatgcctcctatagggccacatgtcacttccaatatcaggaaaatgacctgttctgaagtgctcatccattttccaggcccaaccagaccccaaaatacatcgtttatgcagaggacttggaacacattcaaaacagtacatactttattttcaagcatacaagaaacactaaactcttccagtgccagtacactctccatgaattcttcatatagaattgggtatattggaagcaagttgtttctggtgaaatttctgatgatcaggaatcaagactcagtagccctaaaggaagagagttttgtatccaatatcctcaaaaccaagacatagtatattttactttcaaagtaaactataaacattttaccatatccttcaatccataaagcatctcactgtgaaatgatccatgttgactctgcataattctcagaagtcacttcaagtgatgagggactaactataaaacatgcattatttgaagtacatgagcatgaaacatcgaagtctacaacttatcttaaaagaaagagtaagttccaccagctttttattgtttgaataacagaacacacaaaaccaggcagagaagtccgcaagagatgatgatcatatttcactgttttttggccttttggtccttcatctttcaagcacttactgtattttcctttagcgatttaaacatttattttgatcacaaatgcaattcaagtgtgaataaataaacgtattatcttttagcacccttccccgcttgttcctttaaatagaaaaaagtgctaaatgtct

SEQ ID NO: 158764 - DNA, 1000 bp, Homo Sapiens
ttttttttaaattgaaaggaaacttttattgagtcatgttttcaaagcaatctagttttaaaaaaagttgaagacaagacagaaaaaagaacatgacacctaagagaatcagacaggacagacagacgggagcaggggggcggggacagcggctccgtggaggtcagatcttctccatcttggagatgaggtcgtcgcagatcctggtcagctcctcgttctctttagtcttctgctccactgtcttctccagcgactggatgcgcatctgctccttcctcaggctggcctggagggccaacgcttccgcctgggccttgctccggacctgggcgatctcctcgtttgccagctgcagcttctcctccgcgtgggccttcagggcttggtacctctggccctcctgggtgatccttgccaggtaatcctccacgcacttcttcagtgactcttcgttcttgcggtagccctcgatcacctctttctgtttctcaaaacgcttgaagaggtcggagaaggacttctccatggagttcagatctgtggtaagttggtctttttcttttagaactttctggatttcagctttggaaagttccttctgcttctgaacttcctccatggcctggtacacaacctcttcgaacctgtccatgatcttccccagttccaggttcttcccgtggagctcctcacacctgctcctcagctcccggttctcctcctgtgtcgcctttaccactgcatccaggtccttctggctgtactggagcaggtccactataggtccggtggacaggggtgggcccccaggcgcgggaacacctgggggtgggcctggcacaggaatgtccagtgctcccaagaaatcgaactccacaagcttggcttcccgcggacgtcctgagggagtctcatttgcaccgtgcatgctgctggtctcggtggccacgggcactggtctaccaggactgtccctcaggagggggtcgaacttgag

SEQ ID NO: 158765 - DNA, 1000 bp, Homo Sapiens
ttttttttttttcaccattacaaaccctttaaccaaggatttattttttgtttccagcattacaatttgcaataattcatagatttccattccagtaagttttaagacacagatctcacacaggcagttgggtccacatgttaagaactcattaattcagcaaagagatcacccagccgccattctcatatgaacaatgctcactgctacctgaacattttaaagtatgttatgagttgttttgatgatgacagctgcagcttttcaccacattttcaattactgaattgcatgttttttttccaccttgataacttagggtcagtagaaagctatttacttacatgttatagtcaatataactatactaaatgcccatttgtaactgaagaaactcacagacacagtatgaactatattatacaaaatcatgaccatgagtttcagtgagagattctgtctctctcttaaagcaagaaatatcccacagctcagatttacataagtagtgccgccttttaaataaaagtcaaatgctgtcctgcctgtaaaattataaatatttctaacccactttacagaattttaaaatgcttataaatgcattatcttccagtaaataaacattatggtactgaacctcatttaaaaaaaagtcatcacactggcccatggaaatatctaggactatatctcctaacattagaaaaattaaaccaaataaggggaaaaaagcaaagaagaaaaaagaaattttacaaaatggcaactactatgacctaaaagagtgtactgagatgtcttcattcaattcagtaactaaacatttctggaatgaacatttgtagataactaggtaaggagagtgattctcttagcactcaggtcaaaatcacaaggtatggagaaataatttccacattctataaggaaagacagactttgaaacggagtgactgtttaaaaaccacataccaagatttagccagaatattgaaga

SEQ ID NO: 158766 - DNA, 813 bp, Homo Sapiens
ttttttttttttttacgcatacaaaaaaactttatttacagttgaaaacttaaagacaatcttggattctgaatctctgacacttccatggtctcttgatcaaatggggcagcagcaggcagggaagcaaagacgggggccagtccagattatcttactcaagaacaccaccaagaagaagggaaggcctgattcagtctttgtctggactacatctccccacactgcgagatcaccacaggtagcttgggcttattgttggggcctgtgggaacattctcaatctttctcatcactagaagtccatcgatgatttttccaaacaccacatgcttcccatccagccaatcgcacttagagcaggtgataaagaactgacagccatttgtacttggaccactgttcgccatggaaagcaggcctggagctgagtgtctaagtttaaaattttcatctgcaaatggcccccggtaaatactggcgactccagtaccatctccattaacaaaatctccaccctgaatcatgaaatcctttatgaccctgtggaaggtgcttcctttgtatcctattggaaccccatctttcctgaattctccggtgcagaactgcctaaagttctcggccgtcttaggcacaacgtctgcaaagagctcgatcttcatgcggccaacttcctgaccgccaatactgacatcaaagaacaccacggggttaacaggacttgaatttgccaccgccatggctccgacccggaagcagaagtcgggagcgtgggattccggcgaacctaaagcccggtccgcggatttc

SEQ ID NO: 158767 - DNA, 1000 bp, Homo Sapiens
tttttttttttttttttttttttttttttttttttttttttttttttttctcagttcatataatttattgcagttagcacacagtttaaaaattcaccaacacaccaatagtacaaaactaaacagcattataagttattccccctcaggaaaataaaacatactatgattgtcaaagctagatgtcagtctaagttttagaacaaaggaagaatgtgaaactaagaaaaggaaaaagcaatcactcacaatgaccacaaaaagaaaatccaaaagaaagtccgttttctcacagacattgattgtcttctctaaattaataaaaattattttaacataaactgtattttaaaaaaactagaaactcttcaagtaactaaagataatgctccaaggccattttcacagctttttttgtttgtttgtttgctttaaatgccattacagccaaattaacacacatttaaccaaatatttccaaaacagtccagcaacacacaatggagttttccattcagtatcttaagcacaaaaataggctatgtttacagtagttaaggcgatcaaattttaaacaaaagcaattaaaaaaaaaagggaaaaacagcaaacgttttccatgctactcccatagaccttatttgtaagtgcaagacaggaaaacaaacactgtgcaaaatgcttttgccttgcgtgctggtcattaaaaccacacgttaggctgcagcctctgctgccgcaatccacatagtctactaacccccttccccatgtcaatcaaggcagtccagtcctttcagcctggggctttttcagtccatagaatcttttcatgagttgggggtggagggtggtggtggggggggagagtaagggagggagggtaaggaggaaggggagaaaaagaaaaagggagcaaacaaaaaaaaagagagaacgacctattgtcaacttgtgcagtagttattctaagaacgctcaactgggtaaatgtgtacac

SEQ ID NO: 158768 - DNA, 1000 bp, Homo Sapiens
ttttttttttttttatggagaaaattataaactttattgaaagatatttcaaaggcctaagtaaatgaagagctgtaccatattcatgtattggaagacaacattgtaaagatgacatggtttaccagattaatctataaattcaatacaaatccaatcaaaatttcaatgctcttgggtttgtttgatttataaattgttggtctaattctagaagtaatatggaggaacagttggctaagaatagccaagacactccaaggaagaacaattttgtggtgatactggagacagaggtgaaattggttacaattatgacaaaatgtggaggcatcttggtttttatcagaccttttcctaaagttgcaataatcaggactgtactgtactgctacaagattagacaaattgatgtcagtcagaatagaaaccatcaaaagacccacacacatacacaaaaatttaatttatgaaagaggcagtgttacaaatcactggggaaaggatgaacttttcagtaaatagtgcagagacaaccacttcgaatatgaaaaatgttaagttgaatttctaactcataattttcacaaaaatcagttcaggacagactaaagacaaatgtgaaaggcaaaactataaaatttccacaaggcagtaaagaatatatttatgactttgggtaggaaaggatctccccccaaaccaatttgtattcagctttatatgatactttttaaaaacatttactttcagcaggaaataggcaacaatctataacattttacaatttccaaactcccctcctccaaaagtcaccgtaaaagttaacaagatatgtcgttgctgttttgaacaagaaagattttcagagagggtggacacttcacatgaggcatgtatgagcttttctcaggcccactttgacatggagggactaaagtaaaaccagcaggatgaatccacaaactgaaaacaggaatcttggctcttttaagtgaca

SEQ ID NO: 158769 - DNA, 1000 bp, Homo Sapiens
ttttttttttttttttccttcaggagcatgtttattgtgtttgagatgatacatcaggtgctctctgagctacaaagggtaaaaggaaatcctctcattacaaactgacaaaggtaaaaggtaaaacatttttcacaacagcatgaaccacatactcagaaatagatctgggtttaatacaaatgacataattcctagccatctacagctacttttataacttcatacagataatgaattaggctaaaatgcactataatatttggtagacttcaggaccagtatccttagtacatcacaaaatacattttgatatcccaaagaagcaagacttgcaagtaggcgttttaaacataactaatctacagctacaaagttctactcttgatagcatttacctttttggggagtctcccaggctccaaaggataaaagcagagtagaatcagtataacatatacacagaagtccgtattgtaaaggctataaagatttgcagcacagtgagaagatgccttctgctccttcacactgcatacaaattatgtgaattatgttgcgtatctcttggtccactgtctggctatcctgtcgtgttctgctctgttggtcaaatactgagtggctatgcttccaaccagaggatccgcagggttgcagtctgtcaaaagggaacaaatagacagcaaaacctttgaaatagtcaaagcgggactccagttgtctttaaggatgtccagacagatgactccctgactgttgatgttgcagtgatagattctggtgcggaaagtaacctttggtggcttaaatggataatctgatgaaaatgtgatatccagaaaaaacacaccaccttcatatacagaacccggtggaccaagtatagttgatctccattcataaatgttatctcctttaggcccagcactgcaattaggaggaggatcaagggttatttcagctagctccttctgaattcttttagcactagtggata

SEQ ID NO: 158770 - DNA, 1000 bp, Homo Sapiens
ttttttttttttttttttcagaggttgttttaatacattaatctctttcctttgagaaaaatctttatcttgatgtctataatcgaaaccaatcacttcttctcatgggtcaggggtcctatggtctcctgaactttaatgtggctgtgaatcacctgggaatgttaaaatacggaacaggattcagaaactctgggttgcgtgcccagcaagctctcagcttgtggcagtactaccgtctgatggaccacactgagcaacaggactctaaggaaggtttccaaatgaaataacctcaaccagatgtttattttcaaaatatacggcctacaccaagtttataaagggagataatatccagacctcaacaagatatctgctccccttctcatttttgtgatttttcccatctggttgcaaactcaacgtaataccttaataaagagcaattttcaagaatatcttttttgtgctgaccatttattgggacttgactgaccagggcttgtaagaatggacacaaaacttcaagtctttcgtaatgaaaggattgattcaaaataaatattctaaaaattatgtcaaacactaatgaataagtgacatttacaaatagtttataagagaatcatttgggtgaacaattttcatttcacaaaataaatagctcatatccaaaaaagacacctctccttaagcagggaaaaaaaagcccaacaaaaataaagtcatgcccgtggcacagccctaatgttagttttagggaggaaaacaccaacactgagacatacaaaagtatttgaggagaattacatgttattaaatttgtcctagaacctgggggagagttcagggaaagagaacagctggtatatttaagaaagatttaaatagaaaacattacacatgagagcaaaatagtccatttctcttaagaaaaccaataaacactcacaaactttcatttttaggttttcagcaatgtttttttcacattagt

SEQ ID NO: 158771 - DNA, 1000 bp, Homo Sapiens
tttttttttttttttttttttttttttttttttttttttttttttttttaacagtgaaaagtatattttattggcatttaggcctagcgtagttcaattcaaataaaatataacaaagcaacttatttaagctaattgaatataacacataaacaattttttcttaagtttctgctttaccatcatatgattgtgttcatgcaagtacaatcattaaaactgtcctcctaagcatatatcatagcaccaccttttatttgcagtacttgatatgtaaatttcattgtcaaaacatatctggctttatcaatgtaaacatatttgctacaagtaaactttaaaggtaaaagtgaatactaatgaataaatcaaaatagaactgagcatcacatgatataattaagcaaacattatataatactgtttcaataagaaccacaacttaatacatttcacaaaaaggaaggaaaaacaaaaagtaatgtgtaaactgccaaaatagtgttaaaatactgaaggatataatgcaaaatttacctctgaaaaacaaggggaaaacaacaaaaccatgctgtgaaaactaaatttggtttagtagttacaaccgtcattttactgcaaaggcttactaaaatgcactccaacaaaaccatttattttctatctccccttttaaaaaaactactgcgtttagtcacataagttggatattttgtggaaatttcacattttttgtcagctgcgggattgttacccaaaaaaacctttcatctctaaactatctttccaaataaccaaaaacattatcatcatgaaaattaccattataaaatcaaataattcctaaacaaatcataaaaataaatctgccttaacctagtaagtacagaaaaagtgtatacataagtgctgaaaattacagaaaaatattcaatgaataagcaaaaatgttcacatttatcattactattgtttttttgctttctggctaaaattaagg

SEQ ID NO: 158772 - DNA, 1000 bp, Homo Sapiens
tttttttttttttgatgtttgcccaaaatttattttataagaaaaacttttttggttaaaaaaaagaataaaggtatgaaagggtttgaggcctgagagcagtgtggtaagcccagcagggaagaagccccctatacttctctaaagcctgggtgcctgcttgaggagggaaggcaggaacccaggggcaggggaggggatctcttcagcaattatgatgaccactgtaacctcctggcccagggttcccaggatactgagtaaggggcccaaagactataaacccagctgtgagaatgcctgtttgctgggcctcatcaaggcctccaggacctcagtgcaagggaagaaggaaaaaagagaaaaaaggtgacagaaagagaaagatagaactggtggttggggttctgggcagcccatgcttcagcccctgcaagctgatggtaccgagcatgagactgtgaggtacgggccccatcacatggtgctaacataatctgcgaaggcctgggatgagtcccatgagtcgctaaccacatggcaggtagcccggagccgccggatggcttccctggctgtgactgcatcctggtccagccagttttggaagaggcgcaggtgaccaaaggctccacggccccagcgctccagccgcttggcgaactccagaagcccatctggcttgatgcagttggaactgatgtccagctgacagagagaggaggatgaatcctctgagaaaacatctgccaaggccagcaggccagcattccccaggcggttccctggcagccggaggcccttcagtgtggagttgcccttcatagcagcaaccatctcaggcagaaattgggctgggcgcttctcaaacagacggcagaaggagaaggtaatctcttgcagagtcagattctgtagcaaaaagagcacctcgctctgacagtcagcgagattcatgtcatggaagctcagtcttttcagggctaggttgtactctttg

SEQ ID NO: 158773 - DNA, 1000 bp, Homo Sapiens
ttttttttttttttttttttttttttttttttttttttttttttttttttttttttttgtctccaagtcaggtctttattgaaagtggcaggggcctctcaatgttctatgaaaactaacatattaacctcagaatatttcaggaaacaagtaattcaattttcttaaaaaacaaaacattctggatgacacaagtacttatgagcagacacagtacctgatccaacaccacaaggcaaatctatggccatcatgggccccgggaggacagcggccaggacactcctctgggggctgccctgttgcctctccccacctcatgggaggaggaggcagagctgccctgatagttgctctgcgccttggtctgagcggccatagggctgcatgagtctgcagaagacccaggcgtagctcatgagggccacgccggcggctggagcccccgtgagcaatactgctgggccaggagagggaggagggcagtgggcatagagaacagcgtccctgacgtgcacaacagcacactgcaggggtggaaggagacggtgacctggtgacctggcatgtgaggcccacgggatccgacgtgtccctgcaggcacgacatagcacagggcaccttccaagtcagcacagttcttatggagctcagaacaaaaacaaacgaccttccgtcccctatctgaacagcagtgcgcttcagcgggtggatgtcaggtggtttctgttgtgtgaaaacctctgcactcgctccaccaggtgcaccatcagcttgtctgagatgccggggcaggactcctcggccaggctgaaggcgttctccagctcctccagcgcacccacgctcccgccgctctgcttgtgcttctctttgagctctccgaagacgggccggaccagcgtggacaggcactgggacctcggctgcctcttgacgggctccgcaggcttctgtgaactgtgcagggccgtccccttgtgaagcttgctgtgtgga

SEQ ID NO: 158774 - DNA, 1000 bp, Homo Sapiens
ttttttttttttttttggggaattcaacatgttttattttgccaggccaatgatttcatcaatatccaattaaattttagtgtgacaactacatttagtttgttttcttacacagattgaacattcaccattatgacagtttcatcatgctaaaatctattcacaaacttacactttggaaaaaagtgtatttctagaaaattttatgtacaatacaaatggaatagatattaagtcactgaattgtcaagctacataaaataaaaccaatcaaccaccagtagtatacattaacagcatttttgaaaaaaaattttcttttacattcagcagagttatgttcatgaagaatttctacatttttaaaagtaatgaaagtgtacacaatttaataattgtgaaaatagaaagaattaaatagcacaaatatagtataaaactaaacaccgttactgtctatcagtttgggcttatgtgaaataaagggaactgtgactctgaaacaattttacttttaactttgagaatagattggccataaacacagaagatggttttggctttacattgacacatttctgtgtgtcaatgtagaagagaaaagaagtttaattataccttttaagcaggcaaaccattataataaactgctttagaaattactttaaaattatacacatttggaacaacagattttttaaaaaatgaagtttggtgttatgtcagcattttaactatttttgctatagcgaggcctcctcatatattatcataatttatcatagtttaaatagtgaatcatattctgatattctgattaataatcatattaattttgacaatgattttagtttttgaagttttagactgcaatacttaaaaaggccataatctactttaattaccttcatcatagattattaactataaataaaatgtttatatgatatttggattaggtacatggtacaatatctgtttttacctggaagcatgaaaa

SEQ ID NO: 158775 - DNA, 1000 bp, Homo Sapiens
ttattgtcaacagtgtttttatttatacctacaaaaagaaaacaagatgatggtatcaaaaggacaatttacaaactaagaatagtaacatagctttcagcatcctgtgcctgaacatcacacatctacaagtctttcaagtcttaatgcaacaggaatgtgtctggagaccagcaagaacatcaatagagagcactgatcccaagcaaaagccactaaccttttagatgagaagtccacacaacgaattgttagggaggattggggagaagcagcccattgcttaatacattggaaccctttccctaagttgagtttcaaccatgaatgcaataactagcataaaacgattcttctgctcatgttctgaagccaacagcagaacctgaattataagtgacagacatggaggcagaagagttaaactctgctagatttcagctgtgctcaggccataatagtttttgaggtttggaatttactgttattttatgattacaatgtcccaggtggaaaaagggaagcaagcaatccaaataaccacttgcttgcccagagacctttccctcaaacagatgctttcaagagctgcgagagagtagggcatcccttgtggtggtacctctatgtttaaagaaagaagaaaaaaacccagaatttggttgtagaaaacaatgcccacaacagactggccagtgcttagacaaatttggggttggggggaacactttggtttgaaagcacagagcagtttgccatgtttcttctgtgcctaccattctcccttggcctcaacttctgtaagatgggggggggacaaaaagagaagtaaagttaagaagaaagtggaaaattaaaaaaaaagatgtcaaagtttttacatgcatatatttcagcttatgctgaagacctacctgtatgttgcacattgaatcatactttcagaacccctcagaaaccatccctctctccctaaagaattttaaaaggaaaacaaaac

SEQ ID NO: 158776 - DNA, 1000 bp, Homo Sapiens
tttttttttttttttttttttttttttttttctttaaaaaaaggctttatttgaaggcaaaacaatgaaatccacaagaaattactaacagcacgtgtttacgttttatcctgaatcatacattttaacaattcacagctacaggaaatctagaacaaaatcaaatattcatcacgttgggttgaaaagttggaagattttgcatcttattgaaaagaatttttcaaaaatgtttctgtacaaatgaatggaattgcaccaggctgcccatggacaccaggtgtggccgattcccaacggtcacccaccagcttctggcaggagcagctcccctcctggcctcccctcccttcgggggtgtgaaatgaaatgatggagtggaaggcgctggctggggtcgggctccatgctctggatgggactgggccgtcgcacacgccagccggtgcagggttcttccaagtgcaaaactcaagcaggggacgcgacgggcacagactccgaggcagcgctcaacctgaagtgtcttaggctggtttcctgttagaatcttgtttcccagataacagcaaatggctacattccagaaaaaaaatatcaacttatacaactaaaataactgaactaagggccagtacgccttcgaagaattaggtttcagaatctcactgggcctcctctcaggtcagtattcttctttctagacctaaaccaaggagagtaaaaatgaaaaccctgcttcacttcgcaagtcaagtcaaagttttgtgtttctgtttttcaatccgcgggcagtcatggcactgggcttcggctttgtccctacacagccgaggggaagccaggtcagggccggtgggtgcggggagctggaggaaggagctggggtgccggctctggctcaggccaacccttcctgcacatgctcctcctggagcctaggaggaggcttcaatctgacttagggcagatgcacatccatcccttcgtggctgaagaa

SEQ ID NO: 158777 - DNA, 1000 bp, Homo Sapiens
ttttttttttttttttttttttttttttttttttttttttttttttttttttttttcttgtgaatttgtttttattggggaacacggcacagggtgggaaatgtcaccttgggctatggtatgccccacctcccagagaatgtccatttgcattctaatcttcctgggatgctttatggaactttttcttcttcttggagctgctcttgccaaccgcctcttcaggcccactgctgaccggctcctctttggagaatttcctctttttcttggagccacttctgtggcctgcctcctcagggtcattaactgtttcctccttgggtgtagacttcttcctcttgggaatactggtgctgccagcggtctcttcaagatcgctactcatcaactcctccttggaaaaagatttctttttcttgggtttggagaaagagatagatgggtcttccattccattctcctgaggaacctcctggggcttttgctttttcttctttttgggtttttcactcatctcctcacactcctctggagtactactgctgttttctgaagacgcgagggcaagtgcagccagccgtttcttttccttctttaagcgtttcttctcctgtttctccagcttcctagtaatctcagcagccgcttcctctgcctgaaccattgcttccttcatgacatccagattctttcgtggtatctctccagtctcatagaaggacagtcgctcttcaacttgttctcgaagcttctccccgaatacactcgtgggcacctcagagaagcaatcgattcgtgaggcaatactgcatttgtttgccaggtatcgggagatgcggcctttgttcttggcagctgctcggccaatgaaggtggagtggaaaatgagtccatattttggagtgttaccccttgtcttcagggctctgaacagggccttttcagccccaaggatctgcactgtggatgctggatacttggccaggttggtgaggct

SEQ ID NO: 158778 - DNA, 1000 bp, Homo Sapiens
ttttttttttttttttttttcccaggtcaatagcaaggccaaggccaaggttattatttagctctgaactggtggtatcttgaatcccgagcaacgccgaacactggccactcctgggcagcagaggggggaatcccagacctcggggtatggaggaggggcccagaatcaccaggcctggggtcagcagtcctgctctggcgatggagagctcctcagcaggcggccagggagaagtcagccccacagcggggccatctcagatggtctcatcatcgctcatgtcccagatctcagcagcttgggtttcttgatgcagcaatgtaagaccagtcaagtcttctaagaaggaatgtgaagaattaaacaccttggctaggaagttaaatccttctcgttcatattgatcaagaactttggaagaacaagctgtacatttgtcaaatgccaggctgacgggaaggacattatcaaaccgtgaaagaaatccccggatctggtgaggcacaagcccaagagaggttggaggctcattcatccgatcgtcactgctgctggcaatggcatagcccccttctggatgctgcaaaacagataccatcaattccacggccagggctcctgcaatcacggccagtcctggacgactcacagtgcactgctggtccaaggtccggtctctggttgaatctcctggggccaccacatcattgcagaagtagcagccaagcttgtaaccagggatgttggcaaaaagcgatgagcccaggaggtcagcagatgccacagggtggtttggacacaagtccccagctccttgctgctttggtttcttcagaccatgtctcatgacaacaaatgtgtcaaatcccaaagcagcattgatgaccagctttctcttgcttgcagcaatgacggcaggaagccaccggctctccctggtgtccatcaataggaagacgacatcatggctttcgatgagctgctccagttgctccac

SEQ ID NO: 158779 - DNA, 1000 bp, Homo Sapiens
ttttttttttttttttttttttttttcagagtacaacagcatttaatggtcagaaacagttgtacagtattacagtcagccacagaagctgtgttgggggacaagacccaatccttccccacaccaggcaaagcagtattggacatgagttggcatgtggctgggcccacgtccttatcccccaggcctgaggggagaccaccttctgatgataaccaacccctagctaccactctgtattcatcaggggaggggtataaaccccacatgcaagaagaacccttgcccccagtgtcaaatgggatggggatgctagagttatagtaaaggggaaaccctatgtaagctgttaacagagttcacaggggtagggataacccctgttctccagctcccaaatgtgctcactttcccagcttcttcatccgttcatcaatgctggcaaagttcccctcaactgtggccaggttttcacgcatggttgtctgcacctgggtcaagagggtggtattgtccttcaaggaattagcaatcatctgctgggtggtatccaagtgtgtcaggagctgaccaaactgcatggcttgctcgtgcagctgcttgatggtgacaagtctctgcaccagctcagggagggtggaggcaatggggctccagcgctgtatagtttcatatagctggtgcaccttgctttgtgtatctgcatcttctacagaggctttatgcttggcaatctcgttcacctttcccaggacactctgtagccgagcctccacttgatccaaaactgcaaggtctagggcgctcacctttgcttgcaacagctctacagtctccatgagacaggctccctgtagacctgcagaaaggggattctgagcatcctgatcacaacgtacagctgtctccagctctgtcaggcgcttttcaagttctgcgactttggcagcttgagagaacttgtcctgctcaggccgagaatgtagttcataagtgacaa

SEQ ID NO: 158780 - DNA, 1000 bp, Homo Sapiens
tttttttttttttttgaaaacagagatctaaaaatttaatgatttaaaaatagcctctacatacaagacggcaaagagtaatacagattgaacatttggttttaaaaatgtgaaatgtctccacttagcgtagatcaatcaagtcagccatctcctaagaaatacacattatacaatgaaatctacaaagacacactttttaacttcaagcgttgttgattttcagcaaccctcttcccacatgaacatttccttgtaatgtaatgtatgacttttaatcttcttttggcagagtaggactttgagaattataatagcagttgttttgaaaagcaccttctatgatcatttatttccactgatttttttttaatcactctgagatcatgcattcttgttttttaaatccttttctgttccaatgatttggttgtttaaaacaagcaagcttaattcagtcaggcatatattgcaaataaaaacatgtttccaagtaggctggaataaaaatgctaaataagaactgggccaaaagatcatagataatgtgcttcttctcttggtaatatgtgaatacatttacccatggggtagaagtatttcacctgccccatgaagaacctgatggcttgtggtgtctgtgctgtgtcaatactaacagatgtgaggagacagactatggaatggacgctgtgactatctgtgagatagtggaaggggttatacacactggccacaggaagttgcaaaaattagatggactctgtgtagctagccactcttgagtgtcaggtctgcatatgtgagttttaaagaaggtgcaagatagcaataaattcccttagagagcaggatatgtcctggtagctctatagttccatgatcaaggacctggccagtttccctcaggtaatgggggtagtagcaccaaagtgaatattaagagtcagaaaggcctctacttgcaactggcggatcaaaccattcccctattttggtg

SEQ ID NO: 158781 - DNA, 1000 bp, Homo Sapiens
ttttttttttttttttttttttttttttttgcaaataaagtttattgctgaatttccccattaacattatagaaaacactgaaatttcacaaattattgagagcccaacagttaaacatactttatttaaaaaagtacaaaagtgacattagaaatttttttgaagaaatgtgtatcatctaacagcaaagaaatatgaaccagataatgaatggcacaaatatagcactaaaggggtactcactaaaggggtactcagtcaccacccagaaattgtccgagttatgaaatagattcattttgagaagttagttacacattcagtttgtttatgaactagcctgtcttgtttctgcctcttgtaagaaaagagctaggtctttatgctgctaggacaaaatactgtacatgaattggagaataaggaggggtcatccttctccccggtaccggaacaagagaacagttagtacagaaatggctttggcactttaacccttagacattgtcccaaaccttgttacttgagtattgtagcctcaccatgattttttttaacaccgtatcatctccatactttttatttacaaattatatatacacacaataatacaattccttcattctaaaacaatagtagaccccaaacaggtctacattaagtttctgtattagcagttcactcagatagcttcgtttgtttgttgttgtttccacataaccgcactgatcatgccatacagttaatttttatttgtttatgctaccttctgagattgacttaaggctctagtttaatgcaaatggtttagtcttaaaaggagtctcacgtgaggctaaaatcacacaccaataactctctcctttgaagctgtttctccttgttggatggatgtagtgtcttgtctgggtaatccatagagatatatggaaacacatacaagaagagtacccagggcaaaggtgagtgttatctgtaatccaaacagcattactgaag

SEQ ID NO: 158782 - DNA, 770 bp, Homo Sapiens
ttttttttttttttttttttttcctgaatgacacccataacagctttattttcaaaggcgggatccctccccgggcttgtgatgggacggcgctgtgggcccgagcagcagagccgtgcaggacaggcatgggcaggggtggggcagctggcccgggaggccggcaggtcccagaagacacctcacacgggttccatctgcagctcctccccgtccacagcctcaatctggtggaaggcagcgtgggagccgatgaccaccagggtggctcccagcacccagaagacggccgagcccgcaccagccagccagaagaaggggaaggagatgcctccagccagagcatactgatgctctgggctcacctctcggccaaagagcacaagcttggactccaaggtgcgcagatagagaatgtaacaggcgccgaaaaagacagccagagccaccagcaacataggggacgtcaccacacagtacaggatgaggcccaggaacacgaacacatagttgctctggtagtactccacgttgcgtacgaggcgctggcacagctctcccaggttgcggggccgtgagaagcgctgctggtccacgaaggtgctccagggccggatggtcgcgcggcgccgctccagccactcccggcctgcaccggagggaatcagcttcggcagcagggtcgtgccgctcagcccttccgcctcggcatctttctgctggtccttctgcgctgccatgtctgcgtcgtgaggggtagagctgctccg

SEQ ID NO: 158783 - DNA, 1000 bp, Homo Sapiens
tttttttttttaggactgcatcaatttcattcgctaatggggagcaaatctcctcgaggtggtgaaagggtgcagaagtgggagggaggagagcatgcaaaactcaaggaccatccccccatccctgacaatctggggcgtcccctacaaggccgtgcattcggtctttgagtccgaggcagggacctcaccctgagcctctctgctaatggttatgttatcaaaggtctcaggagccttgacagggacatcctgcccctcctgcgcctcctccaagtcctcgcagcacttgctgcagcggcagcacttggggcagccacacagcaagcagcacgcgcggcagcacacgcggcagcagtagcagcagcgcatctggaagcagccggtgaacttggagacgacggcatcccagggcttcagcgagcgcatccacagcggcaggaagttccagttctggagtttcttcggcaggacgcgtgggcagcgagactgcaggagtcggaggcacagtaccaggatgatgatgaagacgacgggaaccccgacaccaaccagcacccgccagccggccagcgagaggccaaacaccgtcagcgggatcaggaagaagaagatgatcaggtagaagacggcgaaccagcgatacttggcagagatgttgcccagccccttggccatgcggatgggcaggcgagtgaacgggatcgggtaccacagcaagatgccggagatgttgaagaaaaagtggcacagggcgatctggagtgaactcctcaatgcattgccagggctggctaaggcggccaggatggcggtggtggtggtgccgatgttggagcccagcgtgagtggataagccctctcaatggttatcacgccgattccaatcaggggggtcaaggccgacgtgaacacagagctgctctgtacgatgaaggtcatgcctgccccgacgaggatggccaggtagccagtcaaccatgcaaagggaaaggggaaa

SEQ ID NO: 158784 - DNA, 1000 bp, Homo Sapiens
ggcttcaaacccagacgtctttaatgggcctgattcacatcagaggcaggatgactgcctgtccaggcggtgggtggcatgcacaggttcctggctacagtgtcctcagtgtacaaagctgctactaagaagcctacggaaatacacaatctgtaataagaggacagtgtcttcctaaaggatcgcaaaacttccctggatgagggctacatggaagcttaggtgtgggccttggggtgcgtaaaagggaccctccacgggcggggctgtgctgcaccaagttctgatgggtccctgaagtctcagcagctgtgtgagcaggagggctctgcgcccactttcctcccaggcctgcgatgggcacaggcctctgaggagcggctgcgggagtgtagggctctgcgaggcagtgactggtggtggggaggcggcagcaaatgcccaccaggcgggactcggcccctcgccggttcaccaagaagcctggtgtccagctgctcccacactgtgagcccggcaggttccctgtccccaggctgggcccagcgggcactggggtgcctgggctcaggctgccggcattgtccctgccatgtggctccacctcaccctggcagtgacatctccccaggttcagcccttctcttgaggggctcttggcagcaggacctgggaccccacaaggagagcctgtggggagggggaaggcaagaccgccaagcaccttcgagaaacttctacaaaagaaaatgctaaggaggggggcgagtgccctggggcccccgcggcctcgggtggggccagcacggctcacagggccggtcctgggcgtctaggagagagaggtgatgttggagcggccgccaggtggtgccatgatcttctgtgctgtgcgtcgggcgatgtggtcatcagcctgagacccagataggctgaaccccgactgatgtaggttgcgcacaggaggcacggagatcttgcctgggcaggacgcgcgggc

SEQ ID NO: 158785 - DNA, 1000 bp, Homo Sapiens
ttttttttttttttttttttttttttttgcctggcccagactttactcgctcccggccccacgggcacaaggaacactgccgcaaacgtcggggcccagcctgagaggagcctctgggcggcccaggcctcctggggatccctgccaagctggccccgggctggaaggtgcatgggcagcacacgaaaccaggatccacccactgcccaccggtggccctcacagctccccgggatctgtgtcctcagtgcaaagggcctggcagggaaagctgggcctgttggtcaggcatggaggagctgtgtggtcactggccactggctctcttctgcaccaccgccggctctgacagtgcctgctgctgcagctgctggatcagctccgccacatagatcttgaacaggggtacagggtccttctcctccaaaagtctctgcttctcaatggcctcctccagcgtgaggcccacccactctgcctcctcctctgggatggcaaattccttgtacttgtcgtagatggctgcccgccgctcggggtcctcggggtgcagctgggggtcctgccgggcaagccgcagcagcatccctcgcttcaggtccatcccaaacttggagcacaggtcctccttcggggtcttgaggatgtaaaagtcgagcccataagcctcatcgatgaggtccagggtccgcatggtcacagtcactgtgaacttcttgtccaggatctcactgtagaactctcgctcaaacagctgtggcttccacactttcttcagcctcttggagagcttgtcgttgttggcatatatttggcccaggatccagccctcgccgccccacaacccccgctgggattcggggggaaagtagatgggaatgggcacgtcctccacacgctcccgctgcccgttcttggggttgatcttgaacttggccccatgaggcctatagtgcacgggagtgggcgtccgctcctcctccagggagcgcaggtagtg

SEQ ID NO: 158786 - DNA, 1000 bp, Homo Sapiens
attttaagtttcattttattattgcttgttagttgattaaagtaattcttcttccacttaatttttaaagacagtaattgctacactgaatgaaaccttaatgaagtttcattataagtatctattatcatttgattattttctacatagaagcatgcaaaaagtttaaaattcagtttcatttgacttagccttgactgtaatggaggactctatgaagaggggacacagtgcttatgggctggagtcccagcaactgcttggtggcagagtcccagtcgttccccagttcaagccgtgggcagatagatgggtactgtccttcagttcttcttacccattcacttgcttgctttattgcctcaaaagcccagggaatattcctggaaatagaagggtcatccattttcatcagtgatttgaacactattccctctttttccaacctggtgcgaataaactgtagtaccagcattgtggcaattaggtccaggagacattctcttccttttacacctagagattgaatgcctttttgtttaagaaagctgtgcaaaccatttgtattaagatttaatataagtcccagttctggtgtaagtttccagaagccatcctctgtctgtagactgaggagttctgtccaaggcacagcatcctgccagtgttgtgtgcacactatttcatcctcttcttttacttccagaaagcacgggatactgtcatcttttgtatcacattttatttgtaaaaagcagctgtcttgaagtacttctgatagctcatcactttctgtgtcagaactttgaaaagcaaagacaggacatcgacttccttcgagactgcctactgattcttctagaagacagagatctactggggtagtccgggactgactgcaaagagcctcaggtaaagcagaggccattggcagcctaaggttggcagtcaaagaggctgcggaaggttgaaaatgaaaaggagagtaagcagagggatg

SEQ ID NO: 158787 - DNA, 1000 bp, Homo Sapiens
cctatttatacaaaatttattattatattttattcaggatgacaagccatcaggaggtcaacaacacaagcacagacagagggaaagaggccaaactgctgaatgtcagcggcctgtctggaggggctgaggcttcggcctcgggaggctgaagcaggaggcagggaaacggtcaggcatacaggtcctcccgatccgcagagtaaacctccccctcctgcaggagagcaaagttgaggaagtgagagggcctgtgcacctcgtggtagaactctttggggttcgccagctgtagctcatatttcatgttggggtcatgccgaacacccatgaagttgtagttccacgaggactgggcagggaccatgaagaagccaaggaaacggtccgacagcagcatctgcaccctctcatagtgtgaaggcaggtagcccttggggttgttgcccttgtctgtgttctggcggccccattcgtagccactgggggtcagcttgtaggccgtcagtgtacaggagcctggcgtgaagctgcatgtgatgataatggtcttctcgccatcccaagatgggttgtcagccatgatcttggcatgggtggtgacatcctggggtgataactgcggggactcattgggctgagtgtggatccaacctaagggttccatctccttgaggtactcatgctggggcagctggccaggcaggtgcacggtctggtgagtgccccactgcggcaccatcacaatgcagcggatctccttcacctgggggttatctggtgggctcaccccatataggtatcctgcaatttgggcccgaaggtcagatatgcagatgaacttcttaagcacattcttgggaaggatgtaggtgtagccagtctccttgatgtcgtcagatgaaacatagatgtgattggtccttaggtgcaggttggcagcagagatggccctgaccctccactcagtcttggatgagaaagtctgggtctcatagtt

SEQ ID NO: 158788 - DNA, 1000 bp, Homo Sapiens
tttttttttttttttttagaggaaacaactatttaagctttattttcaaagtctaattttaattcagactgaacaaacaagcagaaaagtgagaaagctaactgtattagcagacacagatgtaccaaatgtaaaacagtgggttattaacagaactatttacatgcatatttacaagcaatccttttgtacacagtttttagttagctggaaaaagatttgacattaggtaaaaatattatttattagggctgaggtggtaccacattatagtaaaagtattagaaaagtgaccctcaaggtgtatcaattataaagcagatgaaaacttgaatgacaaatatctagtaaaattctctagtaaaaaagtcgatgcaacccatgctacaaaataaaagtgagaaagccatataaataaagcagaataatgttctagcctttaaggtaatgaagttagtcagttgaaaaaataaaaataaaaaagaacaattctagaattggaataaatcttcagtgaagtcttggttgtttagctgggagttcaccaagttgggtttttcccccccatgacatttaaaaagcccttggtatcaaatagcatctgcatatgtaaatcagttgttgatatattccaagactttagtgctaaagattttcaagattatgattcatatttgaaattcaattcattgggacactaaatgtcaaactaaaatgaaagctataatactcctacctaaaaaaggatgctacatttttgcagtaatatgtatttccagaagaagactttttcccctcaagaaaagtagaatttaaaggataagcatctaaccaactagcaaaattttcaacatttcatttatttcaaaatcgattttattgcagccaaaacagtagaattaactgtacataataaactattatatatatatacacattttaagttatagggaataaagtttattttggcagatagtgttaaacaaaattaaagttgcat

SEQ ID NO: 158789 - DNA, 1000 bp, Homo Sapiens
gagatataaaaatctgtatttatattacaatgacataaggacacagcacggcccacacggtggacaggtggccgggggcccctttccccctctagcgcacgcccccctcaccggcaccaggccctcgtgtggcccccgactctggcacggaacctgccctagtgcccaacatggacctggggccaccctgctggccgagggtcagggtcctctgtgcaggcagtggggagggggtcccaggttccctgacagagggaggcagggcacgggggagcctgcctcacccagcggacagcacgggccggggcagacagagcagggaccctagggccacagaccggtacagggttccaccacccggggacacaggcccaagcaccgtgccactaagatggggtctgcagaggcaaagccttgctgcagcctctcccactctgcgaggatggcgggggtctgctatgtggtttgcgggggttatcctggtatgcgggagctgccttccaataaggctggggaacccaagcctgagtctgggtgctcagtggccgagagcactggtgtgggctgggagggcacacgcagaggctcaggagccccgggctctgttctgcttctgtctgctctctatagacacggtgatggcctcttggtccctgcagcctccagtgatggcagcctgggcccctgacagggagcagtgggaggttggagcatgtggtgactcctagcacgggcccccacccagtgggcaacccctcacccacctgctgatggcagggaggggcagctgaacagcaccccgggtggctgagactgcctcccagtccacgtgggaaccacggcctcaagagccacaggctgagctgccgggagggtgggctgaggggccaccactggtcaccgggtggattctgctggtcagagatgagagcagaagcccctagctgcctcaggcactggagggtggggcagggagctggtgcttcaagaattgagggca

SEQ ID NO: 158790 - DNA, 1000 bp, Homo Sapiens
gtgaggatgaaggtttattacctggtgacatcatcctgttggtgacatcatcctgttggtgacaaggtggtgatacatctctaatgggacttccctcagtggcaggcaggctgccaagcaactaacccccatcaagtgccagaccctcccagtgttctgagagtcatctccatgctaaacagcctgcgttttatatgatttctctacccagccaaaaaaaaaaaaaatggtccatcatgtacgcagttatctagtcttaagttatattctggcttttttctcccactttattatggagcagaagtaagcctatcatgttcttagaaaggctcttaagaggtgtcctggagtccttgaatcactttagcatctggggtaggatgtgccaccaggaggatttgggctggagcgtgtgtgtttgcctttgacctggactgctgtctgatcttgctgaacactccaccgacatttcctaaagttgctcagtgccaatccagcaaagcagtccattttcccttggccaagattgagatgtattgttttagatacagaagagttcttggatgagccaaggacaagctggggtgtcctatattgaacagacctcgatgaaaatcttgaattcaccccagtgccctctgttggcaagggaaggtgaagattgaaaagttaaaaaagcttttggccacttgagaggatcagggccgcaactcttgaagaagcaaagcgctcagtgcattggggtcagcgctggtacagctgaaggatgccggccttgtgcaggtccctccacagggcagcttccagggacagatcgtggtttgcataaaatatcaatggcttcatttttcgttcgaaatagtggtcggaaaatttccagtagttgcttgtgatgaatccataggcactgacctggtcacaggtatgcaaagctgtcagcagcatgagagccccggtactaggcatatataggtctccaaaatgtgtgttaatcaacttt

SEQ ID NO: 158791 - DNA, 1000 bp, Homo Sapiens
ttttttttttagtgctgaatcctcaactaaaattttatttccttgtgctgaatagaacacatacagatccatattaaaaacagtcatcatattaggcaaattcaatctgtcaatgtagttttagtccagaaccaaaccagtgatagttaggaattacagagttaccaaccaaactgatttgctttcctggtggttctttgtgtaacagatgagagaaataaagtggcagagtaccagtgaacatttggagaaaatacctaattattttcttcctaacccaagttagccactgaatagtcatctcagaatagtcacctcatcccagttggcccattaggttcctgtgtgcttcatcttctgtgagaaaaaaaaaccttatatcattccttatttcagatgtaagatgccaggtgagttattttccacaaatttcttaagctcattactggaaaaaaaaatttctcaaaacttttagtaatgaatgagtgtacaagcagcaattggatattaatcccatggtgcaaggatttcctgcaaagtacctttaatgtgtttaaatcagcagcaagcattaggacatgctattttggccccataagttaggtgtgtagcactacacattagacaccaagtcatcccaaccaatatttatccatatgaacagataaactgaacaaaaacatagttctgataaaacctgcattcacaacctaatgtagtttaaagtaaattttttcacaattgagggctgctatttaggactgttttgttaataataaaaacaggaattatatagaagataaaacaccattttttactgctatataatgtcttgctatataaaacataccctcaacaagtcaaaatatttaaaaccagtgtttcaaataccaaaaatcacagctatgttactgttcagtaactccactcaaataaatgttagtactgcattcttgaaggaaaaaaactgcagccaaggcaagaactctgaagtttgcac

SEQ ID NO: 158792 - DNA, 1000 bp, Homo Sapiens
gggtacataatacccccacatgaaaccaaccatcttcagcccacactttctggctgtaataactctcagaaaagggtggagctcagtgctctgacacaggacagtgaacaaagtgctatggctgagagtgactgaccaagtgctggcagctgcagtgaggggccaatatccctatctcctaacacagggcaggaagggggttcaaagggcttttatgaacacctgccctctagtttctcatggcagtatttggaggttctgatcacagggttgggcatcttgatcaagagttcctccttgggtttgaagtcacagtgggcaaggctgacagcagcaaccctttcacatgatttaagcgttagaattatataattctgtacattggggcaatctcaaaagtagtaaaattttttttgtcttttggcttaaccctagagacacagtagaccagtttcagcttacatttaagatggcagaaggggagaacaaaaaatttgacaggaattaaagtgctaagaacatcaccttagaatcaattccaaggacttacatgaagagaaaaccatcctcccatatgaaaatatttgcagtaggagaacacagtgcaataggctccaaaaatggcttttaagacctttggtggggcagttactactgctttaaaagccaggttaaagtatactctaagcaaagatgaccgtagagcagctagcttccttttttataatcacagggaaagctctctccattgtccatcaaatcagctctagaaggtttttcttttttttctacaagtgcacaaaggggaaacactgattttaagaacctccttttcccaaagttttggccacaatttcccttttcatcttcctagtttgttaaattggctcttctccacatgatacgtaagttcaaggtccaaagttcctatcacaatttacaaaaagcctccaaaaaaccttgaaaagcttacgccaggaggccatttttacctgacccg

SEQ ID NO: 158793 - DNA, 1000 bp, Homo Sapiens
tttccgggggcgggatttatttacaaggaacgaaggggccactgactcagagcggcaagtacagcgagtagtccgagagcgcccaccggcgggcggggcggctggtacggccgatcatgggcagtttctgcacgtagcgcgaggccgggctaggcccgtacggcgcggggaaggcagtctggaaaaggcgcccgcggcagcgcctcccagcctgccgcccggctatgatgaaacgaaagtgcggggcgccgcgcggggcgaaacggctcttctggaaaacgtcgcgggtgccggtcccggggccctgctgccggggtgccccgcgcgcccgatgcacgcgcggcaagggcctgctctcagaggcggcgggcccagaggccgacgcggggccgcctccgccgctgccccgggggctctcgtcgccgtgcgggctgactatggcgcttgccgtcagctgcggcatcttccgcaccgagtccggggctgccgccggctccttcttgtccccgggcggccgcggagccgtgggtgcaggctggccggtgccaaagcgtgtggccaagctgtcaccgaagaaggcgtagagctcccggtagatgtcggccagggtcaccgaaagagaagggtcctccggccccgcgccccctggcggcagcgggaggccggacccaaagctgggttctgcaccgcccccggaggacgactcttgaaagagaaggctgtcccatggcaggtcgtccaggcgccggcaccccctgccacctgggccacccctgttgggctctgctgcctgggccttcatcttcagcagtcgctctaccgccaccagaatggctccatagactttgtgtccatctgctttgacctgggcattagatactgaataatcatccagcacagcctgcaagtttgtccagtaggtggacaggtgtgggtacaggactcgttctactgccttccagccaagagcatgcagccccaccacggctccatagtggca

SEQ ID NO: 158794 - DNA, 1000 bp, Homo Sapiens
ttttttttttttttttttttttttttttttgatagacaaatgctcactttaatcacaattctaaattaattattttcacattaatatagatatttccataaaccaagaaaaactgagttattatacattttttaacagctaacatgatttgaaaattttttattaaaaattgatcagaagctagttgaaattctcaatgtaaatataaaatattcattacaattgtttttcaaagtaaattcagatctaagcttcctgaaaagctgtactatctcatatcataatagggatgactaagtacttgacaactactttctaaagaacttaacaaaaagtgactacttgaagattacatttacaacagaaaggctaacattctctgcagagctctcattttatcatgaaatgtggacaatcaggaacacgtggatgagtggtatcaagaaaaagggcatttcaaaatatttccacttttattaaaggttttgacaatgaagatttcataaaatgtctttaaatactattttctagagaacaaccatctaaatcggagacatatgccataaaactgcaaccattttagtgtgtaaaataattctaagtttgtactataaaaagatttggctaaaatacaaaacatctttgcgataaaactgacaacgtagcttaagtagcttataagatttcagaaatgtcttctgaaagaaataagaatgtttcctctgccagataaaactgaacagttaaagttaaggtgctataaactagacaaagctagaaaggcacatcatgtaactagaaaagaacagcatgtgatgtggacttcatgtcgaactgatagaaaaacagaatacgctcttcacaaggaaaggtatgagaagataattcttataaacaaacttctcattgaagtcttgaagagttttacagagaacataatcataaaatggctagaggtcatttataggacatggtaatggattcctttatattacaatac

SEQ ID NO: 158795 - DNA, 1000 bp, Homo Sapiens
tttttttttttttggcagaataataataattattataataacagtatcatacatcaaggacaaacccagctgccccaagcctactgcaaaatctgtatgtacagtatagtctatgtgggtggggtacagggctgcctgcctgcaccctcaaggccttactcataccagcttcctgaggaggggccggcccctcctcttgcccctgttgaagcttggcacaggctggggaggctggcactgccaacgccatccctccatgttgggcaagcctgttccaaggggctggactcacctcccccattgtggcctggctgcaagggattgggggtgagcttgttgagggacaaggcggtggcagctgtggggtgtgtctcatctgagtcccctttccacccctaccggctcttcctgcgggcctgcccatggcaggaaggggccagggacactcatggcacagacagggcatgcagagcggacccatggcatgctcggcccgccgggtgccatgcagctgtcctggactgttgggtagctgtcagagggctgagtcggtggtggagttcaaggatcccccgatgggctgggctgctgatttggtctgtggtggggtctcctcggagctgggcccttgggcgggcagctgcagaaattctggaagtaccaggtcctctttcctcagaaggcccctctggtcgtgggccccgctgctctgcacccggttcagcagctccaccaggccttcgatgtcacaggtctgccgctttccagtggcactactgggcaccttcaccagagaactgggggacgctggagggggatgggtggccttatcctgagttctaggtgggcagccctggctgcggcagggagatttgtcacgggctttggagatcttcacacctggaagagtgtccaaaaccagtctctgggccgccaccgagctcactagcttccccagatccagaggctgtttctcgcctggccggtgcagcaccacctc

SEQ ID NO: 158796 - DNA, 1000 bp, Homo Sapiens
tttttttttttttttttttggaggtacaataaataagctttaatgagattctgggtgctggagacagacaaggagcttacgtgccaccaaagcaaccaatgttcctttatctccccaactctgtggggtcccactggcctcctcacccttgagccctttgcccctgccatcctgctggttcctatctcttccccacacttctctgttcccggctcttccatctctgtccagagcaaatcctctgtcctgcttattttctcttgcagagcagctcaagctttgcattcccatttagcatcttggcccaaggtcttctctccctcaacgtattttcccaaacagttttctttataagaggaattctgctgtctgccctcaagatcatagacctttttaacttgtcagttgcactgagcagctgggcctcctgggtcttgggtcgcatccatcttggtcctataggagcgtgtcctgagcaactgcagcgctgcctccccctgcatcccttcccccttgtgttggaaattgcatttgcttcttttgtgggttatttcctgccagtcccagcttgctggctgcagatgctggcagaaagtggctgcagatgctggcagaaagtggctgcagctgacaaccttcttcaagttcacatctagtagttttctctgctccttggacaccccctaggcagctgcttgcggcctgaattgcagcctctggtgaccagggtcagtggctgtttcttgtaaccacagagatctgacggatacagagatttagaagctcaaggccagaggccaaatttttaccaaaattctctggtggcccacacccttctgtgtggtctgctatgcagtaaaggcttaaccttgcccaaagaaagatcgggccctttatcctcagctcctgggcattcatctctaagcccttggaatatcctgcctggtagctgatctgggagtcttgggccactctgggtggttcatgctaatgatgtgat

SEQ ID NO: 158797 - DNA, 1000 bp, Homo Sapiens
ttttttttttttttttttttttttttttttttttttttcaaagttaaaagcgcatcaaacacgcctagcttttattattttaatcacaaacctatagacccctcagtataccctccatggggcctggccccagcaatccaaagctgacaaccttgggtgtaggtatgaggggtgggaatggaggggggagtgtctcttgataactctgaaatggggtgattcctccaaatgaagaactgggtggggaacagaggttggggtggcctagattctcagtatgcggagcaataaaaaaatcagataaacaaatgagggggtacaatatgcttttacaaccctcctccaagcttctgccttgctgggggaaggcttccagtttttcctgggctggggaggtcccaggatagccccttccttcatcctcttgccctacatgttgaaaaagaatactgaggtactggttctggtaacctgaactcagtcccccactaatacccatcaccttcccaaactgcccctcaaggaagaaggcaggactctgcccaagggtgggggcctctcactccagatataggtctggaaaattcatccatgaaatttcataatctgtccccttccccaagagcaaggttggctcagagccctcctaggttaggtcaggttggtcccaggttaaggcaggggagcttaagtaccactcctccctgcagtgtggaatgcttagatgggatgttgctgagggacaagggtggggctgtgatctccacaagcactagcggtggcctggtcctactgattctttcacacctgaaatacctgtgctgggctgttcctatagggaaggggtggggcctggctcctccattcctagaaggccaggagagttcccaggggaaggggctgggtctcatcctcacttctgttccttgcctgggcagagcagggcagggttcatggggaaggggcagagcttaaacccccagggctgggacctccatta

SEQ ID NO: 158798 - DNA, 1000 bp, Homo Sapiens
ttttttttttttttttttttgcaaaacaccaaatctatatttacacttccacatataataacataactttaagctgaaatatatcataaataaaacaagtaatgtctactgttcgacaacttaagtatcaacaattaaaataaatcaaactggaatgaaataaatacataaacaaaaatccaacgaattgtacctctattatatgtactgttgtctcaaagaaaaaaaaatataaaaccagtagtataccaatagttaatactgatggacacaaaaacatattttgaagtacaaagggctgtaggaaaataattggtatttttatacattcagaaatgtggttaaaaagagaaatctgaaagcccaaaaaattccagcataatacaaatcgacttgttttcaaatagatttggtgattcttttttttaaatacaggtttaaattccagccctctattatcacataccccctttaagatttatggttctagtcacagcaagctctctgtaacactcattggattaggcaaagattgagtcaatcatcttgcaaatgtgttaatcttcaaaaataggctataaaagtgcaaaactatgaaaacaaaatctagattatgtacatatggctcagcttgtgaacaggaaaaaaggtcaatagtgtacactttcctgatacaaagcacttcattgcaatgccaacagactgatctcaaatgagttctcccttgtaacacaggagctaagacttctatcaaggaggacatcttacgttgcataatttaaaaaaaaaaaattttttctaggattacccttgctctatggagaacagcgaggccagaaaaatgaacagtgcaaatttatttttgaaacagtttcttaataaaatattttgtggtcactaagcccatgtactaataaactcagccatggacagcatattaaagaacaaaagtttaaaatatctaggaagccagctggtggccatcttctctaaaacccaa

SEQ ID NO: 158799 - DNA, 1000 bp, Homo Sapiens
ttttttttttttttttttgagggttctttcctttttatttttgcaatatcccatacaaaagcaatagaaacgtaacagtcttaacaagaagtttacaattgaatatttgaacagaaaatctgtacacattatcatttacagcaattttacatggtaaattaactgattgttttaaaatgttctttctaaatcgctccactctgctgccctaactcttggagtattctaaagagtctaactagtgctatttacaagtaccaaattaagaccatataacttacataaaactcattagtttaatagctcaatttaacaatgtctgacttcagaatgctgttatgacatattgataaaaggccaaaaattaagtttccataaagatattaaaggtgtctgagaatactttgatgcctataaaagtagctgactctcaattggtcccatggattacatggttaaatccaaaacagtccacctgacaagcaataactgaagatgcctgtggaaaaccagttatgtagacgtgtcagcttaccctggaggacaacagggattacgcaattaagctcgctggaagagagcttcaagtactttcttggacttagctccatttacaatttaaaacatgcaaaatatactcactatacataaaattaatgtttcttaagaaagtaaggcaaaaataattcagcatgagctaatggactgctaacagagaaaccaccaggtacaagtgcacacacatgcttggtgcctggccagccttccacctagtcggggaggagctgtttctcttcctggccgccagggggcagttagctcatggctgagaagtctctcaagggttcagttaaacaagcttccaaatcaaactcatcctccacttgactgtccatgtgtctcaccttggtgggtgtgccagagtacacatcaaagtcatcctgagagctggtctggggctcggagctgctttctgcagattcaaggtctacagggtgta

SEQ ID NO: 158800 - DNA, 1000 bp, Homo Sapiens
tttttttttttttttttttttttttttttttgtgttttatttgctagtcctttttattctcaaatatgttaaaagcacatgattatattgtcttatgttgtttcagttatgatcctcttctgaaatcaggaatacgaccccaagaaatgagtgagtcatatttgcttttatatcttatgcattgcaagaattcagtctcacaaacagttgaaccataaattaaaaatggtagactcacatttgaatagcagctagttatatataaaaaaatccaaatttttgaaaaagtgacttgtattaataaaaactggtgaataaatcaccaatgatttgtttcctcatgctgtcatattattcttcagatacaaccataaaggcaaataagccataaagacaaacaagatgacatattaagaatgtttaaaattgcttcttccgaattttccggattctactggcaaagcgaagctttggcatcttctttttctttttcaaagcttttgcacatgcacgtttgcaatcctccctgctaacaaagttattgtcattccctccacagccagtataggtgaaagcatcacaggttctgtatcttggattaaaataatagcgagtcacattggcagagcacagtccctcatcttttggactgtagcaaaatgatggaattttctttggtgcgcagaagcccatacaagtagcttcatctggaaacctgttctcaatccggttccggtgacacccaccggaaaagaatttttcacatgtcatggaacttagattaaagaaatacttttctgtggacccctcacactggtcgtccacactcacttgcagccggcaaactttgggaactttttctatcctccagcaagcatcgtcgcaagcctcccaggtgtagaaattgttggcgttgccctcgcagcccccgtacaggaactggcggcagctctgcgtgtacctgtcgtagtagtaacggagaagtagggcccggcagggt

SEQ ID NO: 158801 - DNA, 1000 bp, Homo Sapiens
tttttttttttttttttttttttttttttttttttttttttaattaaaaaggcaaatgattttattgttcgataatcttttaaaaaaataagaggaaggagtaaaattaaagatgaaagatgatttttatttccttgtgacctctatatcccccttcccctgcccttggtaagtaactcttgatggagaaaggattaaagactcttatttaaccaaaaaacagagccagctaatcatttccaaaggttagtatctccctgctgacctcttctttggtttaattgaataaaactatatgttcatatatgtattaaaacaaactcagaataacatcttttcttccttagttaaggcattataagggctataactatcatccataataaccaaggcaataacttagaaagctgctttgatgggagtagaaacttacaaacaaataaattcaatagacctttgtcataaaaccggtatgaagagacaaaggtaatacccatattgttaaaggttacctcttacagtgaaaaaagatctctgagcattagcagtgagatttcatctgtaatatatataacaaaatagcaagaggtaaagagctttgcattaggggcttcatatataaaatatagcatgatcttcagttgtaaacaagcaacctgttctgcacagataaggagaaaagaaaaattaatcaaagtaactaaatgattgcttcacacagacagttataatgcagacctaccctccttttctctgcttggggctatttttccacctcaataaaacaaactttccttgacactggtccgactttacccttccctttgcctttaaagacattactttaaagaataatttttattatttgttcatagccaaagtgtaagggttttctaatctacccccaaaaagaatttgttgatctaccatgtaaaaatcttatctgtattgtacaaaaactcaatgcattttaatacagttttgatgttaatttgacttt

SEQ ID NO: 158802 - DNA, 1000 bp, Homo Sapiens
tttttttttttttttttgtatttgcaggacaagtacaactgaaccaacaaatttatttagttagtgctgataaagacagcagccttgagagacaagcagtaattacctggtctacttaatgatgccctttgttatattttacaggcaaaaagaatgattcctcagcagtcattgtgaaattttgtgggccacaagtattgtgcacacatgatccttgatttagagtcaacctgatgtccattatagctgtggaaaggcagcaggcagttgtgtcgctcttcacaataaggaacacatcttgctttcagcatgtgagaggaacaaaagcattgatgtaaatgtgcctcaaagtgagaactgaaaacattaacataaaataaaaaagtcaaataagactaagttcttacaactacctataaaaattgaattattacaactaaagcagcaaatcaaaacatctgctgaggttttctggtagaacaacaacaaaattagttggtgcccatgttcagtaagtcactaccattgacaaaactaaatccaaaataggaaattgaaaagtgcataatgaaattaaatcttgtatcaagtatttgtggaaaactggaaatgtttctctggtatggttggtgaatgatgatttggaggaggtattaaagtttatccgatccagctttggcctggtgttccacgtagaaaaggatgtaggccttcgccttcaccacagtctcctcgtcagtcagtgttacagtactgtcattgaagtggaaccagcggccttcgtgagttgcgtatgctgtgtaatgtccagaaccaaccccggaaccatggtgcaccaccacagcggcgaggtcatacaggcagctctccgggccactgttctcaggctctagtaagtagcatttcatgtctaggcctctcagtggaaattctacgtatgtatcaactttatttcttaaatatgctgtccaatgaaatcttttcaaatgtaagcatagca

SEQ ID NO: 158803 - DNA, 1000 bp, Homo Sapiens
aaaaacaaccataaaagtggcctgcttagtaacatgtagtctttctaaggttcattaagaaagaatataaacatataaaaatcaagaattggttcctacagcggctgcatatcatatagattagataaatgacttataagcagaatcacaaggtttagaaaataaaaagtcttaagtctacaaattaggtctaatcaaggcattgatatcctttacaaaacacctttaggagacattgctatgaagatatctaatttaatactgaagtacctcatttttgagtcaattccacaatatgtatacctcacaaaaattatacaattaaaacacataagttctcaacttaaattattgcttgtttacatataaattggattttatgtaccttacaaaacttcggcttagtcagcactgctaaaaaacaaaataaaaaacacatggcagaggttaaatctgtcgtgatatctgctatcaatttaaacacactggcgttttctcccattttggaggccagagttgctggggaacagaataaacatgcttccaaagcaggtatccttagctcgattggtatcaagccttaactttgctcttctccttgccagtaaatgcattttttttttctgaaattcaatacttagcaattggtaagtggctggcaaaacatttaaggaaataaagggcttacctggtttctgtagcttatattattttttaaaaaaggaatgaaaatagggagtatggggaatgagagaggggaagggaagagtcaggctgacagggaagaagagatgctgattcaagctgtctgatcaaactaaaagggacttaatttagaaatgaaaattatttcttctcaattcatgattcaggtgaaccagtttggttttaacaaagaaaaaacaaggaaaaaatatttgctaatgttaacagccctctcacaggctccttttcatctgttcagtaactggagactctttccaacatggtctttagagct

SEQ ID NO: 158804 - DNA, 1000 bp, Homo Sapiens
ttttttttttgcacctaaatgatgaaaaaatttattctgcgtcaaggtatctggaaaatgaagctgcatttggggcacattatacatgaggaatgatccatatatggtgagtacaaaactcaattatagaattatttcttagctagtaccagatactccaaattacaaatgcttaagtaaaagtaaaatatgatttgccatactaaaaggctagaagtgaaatatgacagaatttaaaccagcagatataaatgcagcacctatgtgtatatttttaaaaaatcaaatattggggaaaaaaatcaaatactgagaaaagctctggccttaaacacatcttacctgaaatccaaccagaaagccagtccatgattttagcaattttaattcattgtatgaaaaaaaaatcatgaatgctaggagaatccagtgacaaaaagggcacttttttggttaaaactacaaaagaaacttgttttcagagaacattaaggaaaacactttaaatcattttcaaaatgtctaattgatcttcagaaaaacatctagtctgtatagaaattcatcttgaaataagaatgaggcagtgattttttttttaaagggttatatatatgtcctttagatcagtgtaacatgactgtgatcatcttacaaacaaaactcaaaaaatcaattcagagagcagcgtggccttggagaccacccacacccaacacaattgtacgtactgggctttgctgtcaaggagtgagcaaatgagttcgttatcaaaggtcatatgttttcacagtcattcaaattatatcccaaaaacttttcttgtattctctatcttttgacttttttttcaaagaactgattgcacagtatacagaaatcctgttatactttactacttaaggtggagtctaattttttttttttaatttatcagtgcttaaaaatcttcaaaatagcttagtgaggctcatgacagtgctggccccatggaaatgta

SEQ ID NO: 158805 - DNA, 1000 bp, Homo Sapiens
ttttttttttttttttttgaaatttcaagacaactttatccagacaggcgcctctcaaatagaacacagggaagttaggcagcagttactaaaatacagtctcgccaaatgatttacaacagaacacaacaggagcaggggatctgtgggtggggctgggctgggccctctatctcacagggcctgagtcaagccagcccgccctgcaaggcaggggctgacctgcaagcggagatctcacttcctcttaccccaaattcatacctccattttccccgcccccatctctccccagggtcctcaagtgggaaagggagaggtagcatccctcggatccaggcccactccactccgtctccggcaccagtgggcaggctgagtctgggcctcaaggggccctgggcttagggtatctatggcagtaggaaaatgacatggacaggctcttcaggggtaggctaaagtcctctggccagcagtacccagagaaaatgggcagcagcaggtaaaccagccaggaggtggagtcctctgaacccacagcagaccccaccctcctgcccagcccctgcccacattgggggtcaggaccactgagactctggtcaggacagtgggtgctctcagcagtgtggcaagctcagagcagagctcccaaggaccataccacactggttcaaaacccataggtgacaccatcccagcagaagcttccatgggtgctggatcccagggctgcatcctgagcacaggtgggcagactggaacataacactaggacccaagggatccagaacattttaggcccatctcctgggctgctccagcctgttgccatgacttgggcagtgagtgggcctcctgccaggtggcagggcacagcttagaccaaacccttggcctcccccctctgcagctacctctgaccaagaaggaactagcaagcctatgctggcaagaccataggtggggtgctgggaatcctcggggccggctggca

SEQ ID NO: 158806 - DNA, 1000 bp, Homo Sapiens
ttttttttttttttttgtttccaaagtcaatttattgaatattaagtcataaagccagtgatataattttaatgaaaaatatcctgtatcactcaagacttaaaagaacaaaaataccccttagaaacactgctttgaaaaataatcacattaactttacacacaacagagtcctttcttaagctttatttaagaaatcgagtactatatagttcaatatatataagacacatccagtattgtgttcctgatagcaagtgcatagattttgttaagatatcattttcactcaatagaaacgtttcatggtcacatgaagataatattcccagtgatttgcccaagcatgagaggagaaaacagaacacagcaaaaatagtgaactacaacagagatgaaaaacaacaacagcaaattagcagaacagtcgattcctgataagtgaataagctgattgtttggtcacaatgttttattcacttatcaggaacgattcacagtacattaatgttcactgtgtgtcctagcctgccagctaagagtccgagcccatcggctgcgtgcgactgctgtgggctgggcagcgtgtgtggcttccatcagcaaggcggatgttgatggtgctgcggtatcccaaggtggtccatgcatggcacacggattcaccttgctcacactgcagtggtgtcataccgactcaaaactatgggtatgaatttaagcagggaccaactttacagtcagtaagtgcttaaaggaactagcattttcatccccttctttggagaattatttgttgctttagaaaagcaacaaaaactggctttgtctttctcttcctttgcttagcatgagtattttgtcttgtgccaaaatggtggaactatgtacttatagatttgaaaaataaacacttgcaccttggaaatgataatttaatcaccccccatgcctcccaacatccccctcccacctccctaataaaaagaaatcacaccct

SEQ ID NO: 158807 - DNA, 1000 bp, Homo Sapiens
tttgggaagaacccgctatataggtttaaatatttatatagaagccatacagaattgcacggcgagggcttccggggcggcggaggccgctggtggcggccggcccggccggccagcctgggtttattgcttcgagagggaagaggcggctgccaggagccgagtccggggccggggacaggggaggaggcgggagttggcagaggaggtcccagctcccctcggcggtccggtccgggaggcgttgggctttcgagcgctaggagcccagggcggcggaagacccggggcgccgctcaatcgtccacgtcgatctcttcgtcttcctcgtcctccgagcagtcctggctgctggccggctggtccgtgagcggagaggcaggcgagagctgcagggcgccagcgcccggggccttcggggcgcctggggggaggaccggagagccgggcctcgacttggccctgccgcagccgccgccaccgccggctgtggcctccgagttctgctcgagttcggccagcgccacgatgtccatctgcccgctggggcccagtttcttggcggactctacgtcggccttcatctcctccaggtcccgcttgagcttagcgcgccgattctggaaccaggtgatgacttgcgcgttggtgaggcccagctgctgcgcgatttggtcgcgatcggcgggggacaggtacttctggtatagaaagcgcttttccaattcatagatctggtggttggtgaaggccgtgcgcgactttcgccgcttcttaggggtctgccgctgcccaaagatggtcataccgtcgcggccttcggctgcctgcagaacgctgacctccagccccttaaacgtcttgctggcgagctcctccagcgcgcacagcggcgaggtctgcgagagcagcgcgcggcccgccaggggcaagccgccctgcgcgtgcttgtccgcggcggccagcaggtgcgccgccccgcacagcgagtaacttctcc

SEQ ID NO: 158808 - DNA, 1000 bp, Homo Sapiens
ttttagcttttcaagagcgatcttttattttctgaaagtcctaaaactgatccatttatcaaaagatgattgatgccccagttcacaaaccatatctttttctctttcagcaaatcctggagccccaagagggctgcagcctgagtgaagtggtgacatcagaacctgccctccacacccaacagctggactgcagcctcctgcaaggcctggtggatgtgcctgacctctctctgggacagagtccgttccatgtggcggtacgtgatgcggtagcagtggctggtcttgtgcgtctttggatgtacaaacttgtctatgagatcaaccttttccaccaggtctcctccaattgttcggactaagtcatagaaatcattttctgcgtaattctcagagggcaaccagaatgaaatatcattgatcacagccggatatttgctaagaggctgaaacttcaccttctgattaatgttggatacacagaactgcttcaggaagcgctcgtcctcacaccagaagagacggatatcagggatgtcgtagaggatcatggctagcctttctaatcctaggccaaaagcccagccgattcggtcttgagcaccagctgaattgaccagttgttgttccatcaccccgcagccaagaacttccagccattctccatgaaagttgatctccatctcaaaggaaggatgtgtaaaagggaagtagcagtctacccatcttatctccagctcatctccaaaaagatgtgccatgagcctggtaagcgtttgcttaagatcaaactctacaagcttcacggcctccatggtgtgtgtctcttgtttatgcgcagagcgagaactttgttcaaagagctgcaggctttctccatcctttataccagcaaataactcatgcttggagaagagccgcacggcctccagctggtggaaaatagggtagtgctgggagtcgatctggtcacgcctgtagacatcacccaccacca

SEQ ID NO: 158809 - DNA, 1000 bp, Homo Sapiens
tttttttttttttttgactttctctaaatttattagggagtttgttacaaatgtttgggctttacaggcatgatttcacggattcaaacaagaaattaacactgatatttagccttctcatgacatacacagaaataacattgctacaaactgcaatggagagaatcttgtttcaaatggcttagtttggggttttgtctaaatgtatcattatataatgaaagcaccaatttgagggtttctcaaatagtgatttgaattttaggacataacagtataacatggtaactttattcttcatatataaataaggcataatcggatgtgtattaatgctgaaaatacattttatcaaaagcataaatacaagtatttgggtacacattgaaagttaggacttaaccaatttcttcttacaaaaaatgataaggacatatggtatttgttgaatctaaatcagcacttctaatcatttctggtattaaggcgatcttatttccttctactttaaaccaaccactgccaccaactgaataaggatttccctaaacagcctcaatttgagagactaaccagaggaccttctctatgcaaattacatgccaatacaccttaaaagaaaataagacaaaagtgaatgagttttttcattccatattgctttctttggttgcagagcaatccagtgccctttccagataataaaattgaaatgaagatttcaatttaatatttggcagacagcaacaatgcaggttattaaaaatattaaaggggcagaggcatgctttgaattactcagattttcagaaaacatttgacaaaaccctttctctataaaagttatggtctaaatttatgttgttttataaggcaactgtatatacatttcttcaaggtcaatgaagacacttgtgtgatatttcctcagaattaaatgagaaggcattcagatttaagaacagaatgtaacacaggattaggcacattttattccaaa

SEQ ID NO: 158810 - DNA, 1000 bp, Homo Sapiens
gggccacaaaacccaaaaactatatggttaacattttaggtatataacaagcaaggaatgcaaggatgagaaaaaatggagaacatgccgtgatttgcagactctattatatctaaattaagtagctgaatgtcaggcagaaattggtggataaattatttcctgatattggcactatctgctcttttctgtggccttgcaataggtataggccttcttgctttagaaaagccccttttctttcttcatttggagctgtttccagccaggcagagctgcaaattgccctcttgtgatgccaaacacagacacaaagtcctgttcagagaggtaattctcctttttggcagggtttacatcctcaggcagctcctgattctggtttttcaacagaactgctatagggtaatattttggctcactgtcattagaattcagggagagggttgcattcttcatgtcagcagtgattcgcatgatagcagcagcatctcccagctcttcttttaattgttcatatgtttttcctgcactccaaatgttagggtcccaggctaggaaccagcctgtgaagatgggaggctcaaacccctgcttaatgatcaggattggtgtgtcgggatctcggccgctggggtgagtgtgcaggtactgctgtgctgtggcaagggcactctccttctccgtggcattggcctcagccccaatccacaagaacacctggtcccaggtatctaggagcatcacgtcagtagggttcaggtcatcctgggtgaagtctgtgatctcagtgacaacgaattggccggtcttattggaacattcaaagagacgagactggacatctaggatttcctgctgaagtcttttatcattggcatagggagttttccctcccagtaggtcccagaactcggctggctcctggccctcggccacagtgttctcgctgccatcacagagaaggctggccagctccttagccattgcccgctcatcc

SEQ ID NO: 158811 - DNA, 1000 bp, Homo Sapiens
ttttttttttttagagtcaagatcttttatttcctgattttaaaaatcgtcaccatcatagacctcctggcttctcttgtatctgtgttctaatggctcccagcagtgccttcacacagcccctttattccccttcttgtgcctgcccatgagcctgagtgtgacagatcaattagctttgtccctccaaactgtgggagcaggactagactcttctggcaggcagagagctcctcctcggccagtgttcgagcctggtccaccactcctcagttcttcttgctcttggcttttgtggccttggcatccagcgtgctctgggcatgagtgaggtgcttcacagcatcaagcacaaggactccaggcagcaccagccacagggcattcatgaagacaaagtaaaaccagaagtagagagggtggcccagctctccgtgctggaatccgtcgcggtgctctgtcaggaagtagagcacatccccatagatctggcccacagagaccacaagctgtagaatgaagcggaggggatgctggcggagaaaggcgatcaccacccacaggctgagtggtccccacaggcaagctgtgatggtttccatgcacactgtgaagttgtcacccaggatgtatcggctgtctcccttggcatactctttccagagttgagataagaaggcttggtctccaagcaggtcttcgtagtagagaacgaaccagccctcgatcaccaggtgaatgaacccacacactgcaaaccagcacagggacagtcgccgccaagtccccaatgggacaaccgcagcacgacctgacaacagccatgtggtcacgactaagacccctgtgacagagaagaggccagccagtatatgccaggtggggcggtcattaggtacaaagttgtccagtcttaggtgctgaggccagtatgggtgcaaggggcccgcgttggtagtcatgtctttgtgggctgatggctgcgtgtgataggcaggaa

SEQ ID NO: 158812 - DNA, 1000 bp, Homo Sapiens
tttgacagtaacaatatgtttattataacatccagccaagaatacaaacacaaaataactcttaatttaaggagaataagaaaacatcaggtgattcttgagtactactacaaatacagccttcacctacagtaaaaattaagccaatttcaatcattttggtcatcatcccagtctttcttcccacttggaggcttgggcccaccagctggttttgccatgatgatctgatccactctaagtacagtgactgcagcattagtagcgagtttgatagcccaatattttcccaggtaagtatctagaataccagcttccagcatgtcctttacagcagggacttcagcctcaatatctaatccaacgtttttatttccttcttgatgtactgcataaagtttagagattacttcattggccttaactccagagttttctgccagtgcgcggggaatagcttcaaatgcctcagcaaacttcttaatagcatactgttcaagtccaggacatgtctctccatatgatgtgatctgtttggctaattcaatttctgttgctccacctccgggtacaagacgtttatcccttgtaagaactttgaaagtattaacaccatcgtctactgccctttctatgtcatccatcagattgtctgtagagcctcgaagtactatggtagaaatggcgccatcttccttttcatgcttaaaaaccaccacctgagtatctccaacttctgagaggtaaacactgtcacagtgtcccatttcttcaaggacaggaggtgtcaatctaggaagagctgtagcaccaacagttttacaaagtcttcggagatcccattttgagtttagcctcactaacatgatattatatttatttgcataatgaagagccatgtctgccactttgccacctgttactacgacatttgcaccagtatcagcaatagctttgacttgtgcatccatgaggttttcttctcccttactaaaattca

SEQ ID NO: 158813 - DNA, 1000 bp, Homo Sapiens
ttttttttttttttttttttttttttggtttaaaaacaggagactatttaatccatctaaaaatacaaatcaggaaatggggggaaccataggaaaatcctccacctctaacagagcgaagttactggctttctgcttgctccaagaatcccaaggcttgatgtttggaaggaattatctgttcttcaactactcccagatactcaagacataagttacacacatctggagaagggttctgccctgctgaagctagatgggagctcaatgcatgggagaaaggagcatcaatctagaaaaaaatgatcaaagaacagctgagtgacagtgtggggccatcccaggcaagtgggctcttggtgctctggtgtagccagaacccatacaagctgggctggcctaggaagcccaccagccagcctgtgttcagctacagcttctgtgttcttatttaccatcatcagccacagcccttgggagcaaagccctagacgcctccttcaagccccctgctggttggtttcatcattatctcgcctcttccaaatctgaatgtaagcctctgacagtgtgatcatctggggaaggatgtcagtcacctggaggtcttgtaattcataccatttgcctgtcccatgatgaagcacgtggatccggtaggagccctcggagggcttgccgtcatgcacgatgttggcaatgaggtcataggtggtattcttgtgtactgcttgtacttcttcagacaagtattctctcagatccacatttgtaatagggaaattgacaatagttggattcttctcaacaaagaagttgttcttagtgaatctcttgatacaaaagattagatatggaggcaacttggtaagctggaagcgcttcagaaagttctccttgtaagtcttatattccttctcagtgatgccattgaacttagccaggatgttgaagagtggcacttggggaatgatgagctgctccttctcgtccttgtaga

SEQ ID NO: 158814 - DNA, 1000 bp, Homo Sapiens
aaaacaacttctcaaatttatttaactcatgtggttaacatggtattgtataaaaagaaaaaaaaaacaccactcaatacttactaagccttgcagacagctcagagttgaggcagcatattgggcatagagatcataggatttgtattatcccttgcaagatggaactccaaccaacaccagaattttccaattcaaattcagttttagtcgagaccccagcataatttttagaaaaaagattggattgttgcttttcttttaattttccattcctatttagacaaatgaccagaggcaatgacaaaagtaactgtttaaaagggatttctctccagaagttttttctaaaggtttaagtccaggctttccatccttctctccatcctttttcattttaaaaagaagggttttggaatatgtcaacctttactcagcttgctatacaaagccactgctttagtcctagacataatgccaggactcatctcccaaacttctggtcttaatcaagttcatgcttggttgctaaagaagctcatgttaatcccaaagtcagcacaatcccaaccttaaaaagcagacagctgattgcatcacttacgacatacaccatcttgaggcaaaagaagccagtcagacaccccttgtctgctacgtgtgagacacatcagcagttgagcctgaccccttccgcagagctcactgtgcaaaatcaccagcacaccactgcaatccactgagctcaccgcctgtccagccataatggaagtcacttgaaggttatcattgtaatagatgattttccataagtaactaataaaaatgttttctttgatgtttagacctactaacaattcagtctctccctctccatcctctcttagggagcctgtacttttaagcaaatagggaagctaaaaatacaaaggagcaacatccatttataaataaatgtgtgccttatcttcctcactaacttcctggaaaagtgctgttt

SEQ ID NO: 158815 - DNA, 1000 bp, Homo Sapiens
cctttaaaggtgtttgggtggattctccttagctatttgtgtgcattagggcacatagtaattatttcatgcaacggattgaggagaagtgggaaacccatcactactgagtatttcatgtttctagagcctcttagaatattatctcacaagaaaattaaaagagagagaagagaaagtatgagaggagagaaagaaaagcaaagaaaggaaaggaaaaaaaggttaagcatgaactggttttgtgccttgacgagaataaaaactagccattcgttacaataaattaacactatgtacaatcatttcacaggctttgttccactaaaattattaacatccctaccatccatccatccatccatccactcggggataagaaaggacgcgctgggtgggtccaggttctagagtcaacatcctatggttaatgtggaggccgagacttggcgggtcggaatcgctgctgcctgacaggactgcccaggtctcctaaaggtgaagagtttcattacaagaaagagaagtaggaggtaagagaaagacgagggggaggggaattgtaggaggataactccacagaagaagagtaagtaggaaaaccaaaaggtttacagcaaagttgaaggtcggtgagctaattgcagagactgctgtgcaaaaaaggttaaaatcacgctcggagacctgcacttattcgctgcagacggccatcgagggtcaaataaaatgagtgggtgcgcaaggaggagtgtggggaggcggagctggggaagagctgtgaggggctggctgggggtccgggccgcggcggggccgggcgggcaggggcggcctagctgtgcgagtagaagccatagtagccgctaatgtccttggcgcagttcttctcgcagtcccgctgggccagcacctcgctcttgagcggggacgaactctcggacacgggcgtgtcggccggcgagatccgcctccgcttggcctgctcgtaaatccccga

SEQ ID NO: 158816 - DNA, 1000 bp, Homo Sapiens
aagactctgttatgattttatttcttcaattgttccaatcacagtttctaatacagaaataaaactattcagcgtctccgttcttgcttcattttgtttcacagagatctgcatttctgagtttccaggctccaatagcagttctgttaagaacagacagccagtatcatcctgagcactgaggtatgctttccatggccgagacccagccctactcattgcgatggtctggatgttcactacttgaagagccatctggagggtgtcaggatggaattctccccgccaaggcaacacttgctgatgagcaactttaaggctaagccaagttttctcaaaataatcagcagtaagctggcgattggggactagcatgagggctccagaatcagggagttcttgtaccctctccttgttctcttcaggaatcaagggtcctgatgcggcaaaggatgaagttttaggaagctctgggtcacaacgctctgccccctggcatttagagatagttgcccagtgggctttgccatacactggcaccagtgtgttgaagtctgaggcccagctattcacaggtctttctgccggatcctccaaaagtccaagagtagggtcagatttagggctacacagaatccgcttaacttcatcaatgccaactaagaggaggcgataatagaagagacctcggtcccgtacagccatatctttttcttcctctatgcagtaatacaacaaacgtcctagcatgtcctggcactcagcaggtcgggagaggaaaaggcgcagcgaagcagtgagcagctccatcttaacagctggaaatgtttccgacttcacattctcaacaaagtcctctaacacataaggagcattaggaattctttccccatggacaccaagtagccaaataagtgcttgcttcccctcactatcttgaatgttctcttcacagccgggcagggcctgacatacagcttcagtacactgaggacacaac

SEQ ID NO: 158817 - DNA, 1000 bp, Homo Sapiens
tttttttttcagatttcataggattttatttttctactaacacagacagacagggaaacctacaaaaggaaacggagtcaattgtaaatggctgtagttactggttacacggagttgacaacacaaaggatgcctggtgcttgcgtgcagaggctgcagcccagggcgggggcagagctgagccctcaggaggtggtttcgtgtgcagaactgagcggccctcagaagcagggctgttttccagccaccaaccaacgttcagagccagcaccatgtggccgctgtgcctctagcctgctctcctccaggtgcaggggacacaggacctgccggccccatccagacatggaggagcgttttgctgcttaactcatgcttagccaaggcaggcagaggctgtgggaactgctgagccccgctgtgatgtctgggacacgctctgggcagcagccgtcactctacagcaatgccagccctaatctggctcctcagaaacatctgggggcacaagtgcagcctctgccccgatttgaactttgttgatggggttgattcccttgggagaccatgcaagccagacgtagcccaaggcctgccatctggggcctctagtatatagaagcaacctctttatggacaaccttgttaccacgtaactccctggggtgtttaaataaataaatatgccacatagaaagggaggcccaagtcggtgccactgcccgcagcctgcaaatgtgaccacaacctacaaagcagaaactcacagccagccgaagtgcaaagtgttgggcccttgaaagctatctcttcagtgccaccgccgcctccatgcaaggcacaggccatggcaggggacgcccgggactcagccagacagacctgacaccaggcgccactgctgcctgaggacctcccacgtcgggtccgtgtcctccttccctggagcaccggggtggggatggcacgtgtgagccagctcagaggctgaactgtgtgc

SEQ ID NO: 158818 - DNA, 1000 bp, Homo Sapiens
ttttttttttttttttttttttttttttttttttttttttttttttttttttttttttttttttttttttagctgggcaaatcgttttaatgtgtaacagtaggccaactggggaggacaaggtcccaagacccagcctttctcctgatgccccgggacctgtgtgcctgggccagtcccatgcctgccccaagccctgaggcccacaagtcccagagaagagtgggaaagaaagttgggtggttgcagctcagccccaagagttcagggaggaaaaaacaggggctagttgaatttagccttggaaaaatccatctccggatgttgatccatgaacttcttcagaatctcctgtttcttctgttcgtctgaagttggcagccccatggacttctgtcgctggtcatacatcatcttttccaccatgctgcgagtctcactgtccaggtctgacagcttggaattctcagggttaatcttcttggtgttgatctcagggtcactggacaccaagcggctccaccactccatcttattgatcttctccagatgcacagtcaccaccttgccgtcctcaatgagccacgagctctcctccaccttcacttcattgtagagctccccatcaatgatcgctggctgccccttgagccccacccggaggtgccgccgctggatgtccaccaccatgtccttccctttcagccggaagttcacacagaaagggaccgccaggtccagctccgacagggtctgggtccagcggtaattgggcaggtctgccccgttgcctaggttgggcttcagttttcctttgtccttctcatcttcctcctcatcttcctcagtatcctgcttccctggggagtcaaggctgccgttcttgagctgggcctcatgattctctgcatcctttttctggtcaatctctagctgcagcctctctgcctcttcatcagttagctccttgatctggggccctgaggtctctgacttggct

SEQ ID NO: 158819 - DNA, 1000 bp, Homo Sapiens
tgtaggtttatttttattcaaaaagttactgtctcaagacataaatacaaatcagaaaacagtacaattaggacaatagaatgtggaggacaacaggttagagtaatatataaaacatttttagctggttgaaaacaaagctgtaagaactgctttcacaaagaagtactcctttcaagagtgagaaaaaaaatcaacttaggtttaaaatcatatatacagtcctctcagcagttctagttaatgcagtggtgtgtaaaacaacataggcaatacttttgcacataacaatatttgttgatggaaaatctgttagacaagtctggattcatttgttattaaccatgacttaataaaataattgtatcatgatctttttagctaacctatggtttttggctaccacagcccaatgcttgatttctgactaaaaactgaaagccttttggtattcacccatctgaagatattcttgtattgcaagcatattaaggcatggaatgattaaaataatatacctcaagaactgagagacgactgacaatagatagatacacatgtaatataagttaatattttgttttaaacgatgtctagctgcctaagcctcgcaaaatgagttgatgtcaaaatggcaagtagccactttctgttttaaactaatttatttgtgaaaggacataaaatgaagtttaaagcttagctttcaaagaatattatgggttatgaattctattatcccatctaatttacatacagaggaaatgtactgtaacctgttagaagtatctttaacctgaagactgcttgcaaagacagatagataaaacaatataaaatacaaatttaaaaatcattttaaagcatgaacactcatgcttttctatttttaaacattgttaaactttcaatatatttctgaaacctcataattttaagttggaatttaaaagtaagaaaaaactaaacaaactgcgcaattataaaatcagcaccaatt

SEQ ID NO: 158820 - DNA, 1000 bp, Homo Sapiens
tttggattacatgaagtagaacttttatttggaaagttgaatttcatgtataatgaaaatattttcaaaccatacatagtcataagcataatacaaacaccacctacaatacaaacacgttttataaagttctactatgaatattaatccaagccaaaagaaaaaggtaatcacgtgaacctgttctacatacctttcatctcttttgatgacgtaatcgaacaatttaaggtacaaaacaaagaaagctttggctgaaccctacttatttcactataggaacactaggatatatactaccacagataacaaacccaatcccattataattaatttaacattgttacatgaatcatatcttaatggtatgtaaacatatttagggtttcaattggcaattatgttttaaatgcttagaaaagcacaccaacatttctcattattgtcccctctttagcttatctcttccatgagtataaaataggaaaaaaatattatttgagacttccagcataattccattgtgctctacatttttacaaacacgggtgcatctaaaatatcaatgcctttataccgatagaataaaaccaccaaattcacatttttcttataaatacgcatgcaaaattagtggaaaacacttttgtatagcaaagaccctgcttaattttcttctgattaataattttcaatggcatgtacaaatcatactgctcactaaacagtagatttattttatgtagatttgtttttctataaaaatatatttatgtgttcacaggaaaaaagttgagttggtatgtgggggtgactttcagatacataattagttaaaggtttgcttatgaagttagaaggcatcttagcttttatcattttcaaatttttcttcataaaaaagaacaccctgtgacaaagataaggtaactgagattattattagcactttagagttgagagagtttgaaataaaaaggttaagcaacctgcctaatgt

SEQ ID NO: 158821 - DNA, 1000 bp, Homo Sapiens
tcagagagtgtagctgagttcatttcattcttcccagatcaagatgaagggagaaggccggacgatgagaggggagtgaaccctgggcgtaatggttccacaccaagagaagttctgaaggtcaaggtccagaagccaagattcagctgggcaggctgcatctctacaaggcagcctcagatgttcattgtcaaatggatgaactcatttatattgagatgaatgaactccttgttctttgtactgagagcctggaacacccggctcgcattctccagccggaccaggcagttgaggaagtcatcgaagtccagctggagctcctcatccgcatacctgagcacaatcagctgcaggaggtggctgctcagctgaaagcctgcagctttcagtgcagtccgtagttcataggtagacatggtgccggacttgtcagcatcaaaccgaaggaaaaggttaatccactgcttcagcttgtcccagaacactttgaattcatcaaactccagcttcccattgccgctggtgtccatcagggaaatgatgtttttacaggagatcaggcttagcttcttgaatttgatgtcctttttcttttgcagcacagcatttaaaacatactcaagttcctctgctgtcacctccatgtcctcaccagcgacttgttcaaacagagcccgaaaccgctgctcctcctctgtctcctggtcaggtggagttggctttggaggctcaggaaggtcaatgtctacatttccatccatatcccgggtaatggcttttttctctgaaaagattctcagacagaaatcagcttcctggtggggctcaaaagtgctgggaatcaggatgtactccccagggggcagcttgaaccggtcggagacttctctcaggttgatgaacgtcttgcttctggcccgagaagcgtggtatctgaagaagtctttgttcaggtgttcgtctttgtcagggcactcataaatggcatagccgattg

SEQ ID NO: 158822 - DNA, 1000 bp, Homo Sapiens
ttttttttttttttttttttggacaacagaaataaatcctagaggacaaaattaaactcaaatagagtgtagtctagttaaaaactcgaaaaatgagcaagtctggtgggagtggaggaagggctatactataaatccaagtgggcctcctgatcttaacaagccatgctcattatacacatctctgaactggacataccacctttacgcaggaaacagggcttggaacttctaagggaaattaacatgcaccacccacatctaacctacctgccgggtaggtaccatccctgcttctctgaagaagtgaaagagcactgatttcagcagctaagaaatgggctcttttaaggcgatttagacattgcagattgttccacagagaaggtaccttagcatttcctgttaataaggtacctaattaagactaaagtccccagaaatggtaaagagaagaatcacctttctgggctgggggagtaaaatccttctttagtgactagagtgagggaccctgaacttctatttcatctaaagagccatgaagcaagttcctgtgtggtctgcagaacttggataatgagatgaaaaaacaagaatgaaattataggaaaaaaatcaagaggaaaggagtaagaagaaaataaaagttatcttaaaaaatatttctttagagtgtgtggttcaggtggactggtccttggtagtatggtccattagtatctgtaataattaggtttgaatggcccatttttgttgagtcccagatattttgcttggtcatctgtcagctctgtaaggtgggcatcaaatgatggcagatgcaagctggcaacgtattcatccattttcttaggaagcaagtacacatcctgcttgtatcgcccctcgggtgcattatagagttctatcagtgccaaagcctgtgttgtggctgtgatggacagaacaaaggtgggaactgtggagcagctcaaattgagtagacgaccctctgcca

SEQ ID NO: 158823 - DNA, 1000 bp, Homo Sapiens
tttttttttttttttttttttttttttttttttttttttttttttttttttttttttgggggtaggctctttattagacggttattgctgtactacagggtcagagtgcagtgtaagcagtgtcagaggcccgcgttcagcccaagaatgtggattttctctccctattgatcacagtgggtgggtttcttcagaaaagccccagaggcagggaccagtgagctccaaggttagaagtggaactggaaggcttcagtcacatgctgcttccacgcttccaggctgggcagcaaggaggagatgcccatgacgtgccaggtctccccatctgacaccagtgaagtctggtaggacagcagccgcacgcctgcctctgccaggaggccaatcatggtaggcagcattgcagggtcagaggtctgagtccggaataggagcaggggcaggtccctgcggagaggcacttctggcctgaagacagctccattgagcccctgcagtacaggtgtagtgccttggaccaagcccacagcctggtaaggggcgcctgccagggccacggccaggaggcattccccgaagccttgctcccctggtgcagcagggctgtgggaggtggtgacattgaggccagcctctttcaccagcagcttagcgttcaccaagttcacatccgcctgcttggaagcctctttcaggaggccgacaatgactgcggggcttaggcagttcccagcattcttcagggatgttccctgtgttatcacctggatggtccctttgggggacccagcccaggctcgcatcagtgtccccagagcttctgccagaccaatccaaggcttggtgtgtggagagaaggcactggtaagggcctgggcattcacaacccccgtgagagatttccccttcaccatgtccacgaactgaacagcaatttcctccccacagcggctctgagcctccttggtgctggcacccaggtggggacagctgatga

SEQ ID NO: 158824 - DNA, 1000 bp, Homo Sapiens
ttttttttttttttttttttagttttttttaaatacatttattaaccaatgttaacacattaaatgaatctatatattgctagtcagagcagcttacaaaatgccagaatgcatcatagaactggacagccacaatgaataattacaatgtgcatagtggctaagctcaacacctcgatatagctttatgatttgcagaaaatttttaataatgattcctaaaacaatcaattgtaattttacctaaaacttttacaaaaccaggccacaatctctttttttaattttgtttttttttaaacacacagttttcacgctgtagtaacttggaaatgtgcaaccgtgtcaacagagacagaaaagccaaagtaacacgaatctcactttcatgcagctatcagttaaatattacatactctggaatgattttacaccaaaaatatttccacaattacttgctctcataggggtggatcgaagtcttaaaacttgaaaaacaatcaaagaaggttaagtgttctcggttctgacatctccatcagcgccacacactgtggcaacactgactaattacacagcaacaaggagggaacgatgatgccaagttactgcataatttaggtacattgtatgaaatggggctactgggtactttttacaaaatattgtgcaccatttggcagtagtttgtcaattaacttgtgtcaccaccatctgcaacagcatcaagattagatggatgatatttcacagaagacttagttacatttttatctttagagtgaccctgacaaacctggagaatactttttaaaaggcttttctcctgattctttcacttccattgtgagtaattgctttaataaatatcaaaggtctaaataaatatgtacaaattattctctaacctcaaaaaataactaaatgataaatgggaatttgacttggtctaagatcagtctttaaaaataccacataaattgtgagatattttaaaaga

SEQ ID NO: 158825 - DNA, 1000 bp, Homo Sapiens
ttttttttttttttttttttttttttgcagcaatacctcctttatttgatccctgtttatgtccacatatgtattgtattatcacagatgcaactgatttatcatagagcactcagaaaacatggaaaagtatttttaaaaatcgaataatcctattcaagtcaaccagtgttaaccccggtgtgcttcctgccagtctgttcctccccatgggagtcacacaaaatgaaaatctcctagaaagagaaattcctctgtcctctgacttcttcacttagtacgctgcgaccttcccatgttgttcaacatcctcaactcggagcgtcactggctggaggtggtctataaatggaattggcttaactatctcttcactgaaaggtggacatttagggagtgtccagttttcagctgtcataaacaactgccttagacggcaaagaattcacaggtcaatcgttcccttcgctttgaacttcttcgcagaccgttcacttgaccgaagctggaatttgctcccgtaaatgtaggaaataaagccatcggtttccacagtgaacacgcagtttagcttggggataactttcaggcggtcttctttggtgataattttgaaaatgtgctttgtttcctgtagaaggattcctgtaatacccacataagaggggcatttggattttgtcactgaaataatagccccgtgaagatctgcctttaagagcttggcctgaatcatctgtggctgcgtgtctggcttgagcccactgcacaggtccctgatgtactgtttccagagttcatggagagggaggaaaaggctgtatctctgctgctctggtttaatgtcaaagagccgcagctccctcctttgcctggcagagaggcctttggctttcttcttcttctccttgcgcttgtggcgggtgaagtactccaggaccaccgccttgcgctgcagctggtcctcgcgggcctgcgggctcatgcggggcgtgctgcg

SEQ ID NO: 158826 - DNA, 1000 bp, Homo Sapiens
caatagaaattaggtagatccatttattttttaaatacaagtataattttggaaggggtatttgacaaattcagcattaactgccaactctatagacatgttttaacaaaaagcaaaacaaaacaaaacaaaaaaacaaaacaaggcatttactcttggccctttcagtacaggcgaagtgttctattgcatcacaagtgctagtgatgcagtaacagatccaagggcataatattaaatatgtttttttccaactgcgatttagttgaaaaataacataatacaaacatatattaatggctatcaagaccagcagtgatctgcagaatacctagaggcctacctaattagaaggttgaaacttagtaaaaccgtattaaagtcagtgtttttattcttagattaacaatgacagagtgagatatctttgattacaattttataaggtgtggtggggaattgagaggagacagatattggggaagactggcagtgtgtgctgagttagagttgggaatgtggctcaaattagtcaatattgattaggatattgttttagaaaattttaaatgtgtcctaaattgtggcatattgaaaacgatattaaggaacaatgactcattagccctaaatacaatttaatgagtgccatcaatgggcttaagaaataagcagggatgggggatagagaggcaaaatgaggtgaaagagaaaatggaaagtggaaaatatgtttgaacattggagaatgtgaaaaggccaccaaactgctttagttatcactcagaagtgctcttcccattggctacctgcttctgatcacccaaacaccaattttagagcagaggagcagtaatcccctttatctgcaatttcactttctgtagtttgttacctgaggcaaccttggtccaaaaatattatgtggaaaattccagaaataaacaattcatgttttaaatcataagccggccgggcatggtggcgcatgcctataatc

SEQ ID NO: 158827 - DNA, 1000 bp, Homo Sapiens
aaatagacagggtcttgctctgttgcccagactggagtgcaatggtggaatcatagctcactgcagcctcaaactcctgggctcaaatgatgcttccacatctgcctcccaaagtgttgggattacaggcgtgagccaccacacgtatccggatccagtgcggttttaatgtagcataagagttgaacactgattaaaacctttttcatactcatcaataatcaacagcattcattagatttttttctggtacagtgtctctggtactgaatagagttggtgtacacactaaaggttttctcacattcatcacattttgactgtcttctccacaatggacttcctcatgaatagtaagttcagagagttggctacaacttctgctgcactgaacacactggtagggtttctcctcagcatgggttttctggtgttcaataagatcagtacatgtgctgaaggctttcccacatgcatcacacttatacggcttttcaccagtgtgtattttttgatggttaatgagatcagaacgccgactaaagcttttgccacactcatcacatggatttggtttcttcccagtgtggattctctggtgtagggtaagagctgagcactgactgaaagccttcctgcactcactgcatttatatggtttttccccagtgtggattctctggtgtttaatgaggtctgagatctgactgaaacttttgctgcactgtgtgcacagataatagtttttctccagtgtgaattctctgatgaagaataaggtcagaactctgactgaaggctttctcacaactattgcaatgataaggcttttcaccagagtgtactctctgatgtttagtgaggtctgagctttgactaaaacttttatcacactgattacatgcatatggtttctctccagtgtgtattctttgatgcttaacaagatctgaacggcgactaaagcttttagtacaatcactacatgcataaggtttct

SEQ ID NO: 158828 - DNA, 1000 bp, Homo Sapiens
tttttttttttttttagaaatgacaccataagatgaactttattttaaagctcataaaagtgttcacaatcagttacaacaggatcgacatttcttccattccacactttcacatgacaatatactgtatagtgagagagaaagtttaaagtttttgttctgcatgctgctaacacatttgactagcttttgttttactcattgaatttttaatatcaaagcaaaaagtcattttctcttggacagaaatggttttagaaagcccttatgaagtcagacttagtcttgtttataaacatccacacccacacacatgctgaatggagagcaaaatgcaagaaaactaccttggcaggaacaaatgcttaaagattttaatcacagccctcttgaacaagcagtacagttttttttctccaaaagacaaaagtcagtttcatcctcagtgatgcaaatggtgagactgcacagaaagcttagtatgaattcacaattccacaggaatctgaaagttaccaaggcaattttcccttttaggatcataaagactacagacttaagctttttttctttttccatataatacacaaaatttctaaatatccttaaaaaagaaaatataaatagtttcagtatgttatgtagagtcacatactatggcaaaaatattttattaattgaaggaataggccaatttaaggttatctagtccaagtccatattaacagaatttttctcattagggtaacattcaccattctgatgtggaggttcagcaccaaaattgtttttgtcttctaaatcttcttcctttttatcaatatttgggccatttggagttctttccagtttgggtgattcaatttttggtttcggttgtgttacaacgggttcacatgtgttgttcaattccttgatttttgttttaatttcctgagcacgtacaactggatcctgatcaagactctttttagcctgagcattcatgacattattcatc

SEQ ID NO: 158829 - DNA, 1000 bp, Homo Sapiens
ttttttttttttttttttttttagattaaaaaatgcctttatttttaaaatgtggcttaactacatgcaatgtactgagccagttttggaatccaccctgtatcagagtaaaactggaccaaaggaagtgaagtcagggctcctggctgtcactcctccagcaactcaatctacagagcatttcttcagctgttttttgtgacgtgtggtgattcgttttggattcctctgtatgacagacaggtccgaccttgaggaagaccggtagcccacgtcttctgcttttatggggttaatgatatggcctggcttggtgacgaccttgggagtagtcagcttttggaaagccctctgggtgttccatgtggatcctatgggggtctggatggtcctttcaaattgccaatggtgggtaaatggatatggaagcactcgtacctgatgagcagctgcgtggatgttgcgcttctcattgataatcacatttggcaaattcttatcttttcttggaggaccctcaggggctttaatgagaaaccggcgtcttttcttggcactgggctttaggcccacaccaccccactcgccccagccaggtagtgtcaggtccacgtcctttggcttactcgcctccacagcttccctcttctctttcaagaaatctctgatgacatcatccccagcaaaagcttcctttatcatctgcctatggtttctctcctcttcatcttccagctcctctattgtgggaactgccaaagacttcacggagggagattgtgtggttaggaggttctgtaggtcgatcatttgctccttctttttcttctccttaggggcatcagggcgattatttggggtcctctctgactgctgcccttctaacacaggtctgggaagctccttattttgaaaacattcttcttttcccagctcttctagctcttccagcgtctgtactctctctggtctctgtagcaacaggggctcctcttcttct

SEQ ID NO: 158830 - DNA, 1000 bp, Homo Sapiens
tttttttttttttttttttttttttttttttttttttttttttttttttttttttttttttgaaatcactggtgtttattggctgtgattccatccggagagaacacacgcaggggccccgacatgcaggaggaggcgcaggcgcaggacagacggacagaggacaccacggtctaagctaagctcgcggcccggggcgccatgcgctgggaacggggtgcgcaggttctacgagaggacgccctgtctgctcagagctggctttgtaaggtgtgaaaacaggagtttttaaaagacacgacccgggagaagtcagtgagagggcacagggcgagcaggacggacagcgacgtccccgcgggccgcgtcgctggggcgcagaggggcgcggtggtctctgcccggaggggcgtcggtcgttagtattgcagtctaacgttatggcttctctaaagctatgtaaggtcatgaaggtcaatgccaagccacgccctggcccgaaacacgtggagacttgatgcatttttgatgtggacgaaagggcccgggggcgaggcggcgcctgtcaagataaaactcattaaatgcaaagacctcatttacctgagattcaacaaattgtgatgcaaattaaacatgaatggaggagaaacaggggctcggatgccgccccgcagggccaccaggtggattaggccacacacgcgccagctgcgcgcagggaaccccgcaggccccacccgaggagctgcccacggaggaggtgctgggcaggggcgcagggtctccagcgtccggtgcctcgggcctctgcggctcctgtggagggtgcagtgttcaatggccgagggcaggggtcctccccagggagaagcagcagccgcgtgggcggagaggctaggaggccgggcggggggcgaggacttgggaagagcggggtgacgggggtgggggctgggcgtcccccaaacctattgctttgtttcctttagtttagaag

SEQ ID NO: 158831 - DNA, 1000 bp, Homo Sapiens
tcacgtcttggccttgcggcctctgtgactaacagcagggccagccagggagggaggggcgctgctgcgcaggatgcgctggtccccttggttggtggtcccaacaagccggcgggggccaggacgtcggcgtggggtcccatccccttcctcctcctcacctgaggcttcagcctcagactcctctactgaaccctcaggccccaggggacttgggggctgtaggcggccccgctttgccagcccaggactcccaccaactggggcccctgctcgtttgcgaggcaacttctcagtctctagtggggggactagagaccctggacgcagccgggtcgagcgcagttttggggttagtgagaccacaggtggtgtcaattccaacccgcctggcccgctatctgctaagtccaggtcatcctgaattacagccaccaccatggaccctccactcttccgtcctcgcattccttctgcttcaagccgaaggcgggccaggcgggtgagggggcggcttccatcctcatcagaggaactaccctcactctccccttggccctggggttgccgtcgcctccccaatccacagctctcgagaacagaagtgctgtcacggtccaagacggggagctggctgggccgaggtgatggaggattcttgggaggtcggcccctcttccgtttgggtggggacgttgaaatggtgacagtggtgacagtgttggcaacagtagcagtgggacaaactagcagtggtgggagtggggttaggggtgatgggtgtgggggtggctgtgtccgactttcggagttgccatcccctgcagaggaaatggtcccagggatgggcaaatctcgtgctttagggggtcgtcctcgccttcttttctccacaggtgacaggaggggattgggtctgtgaactggctggggtccaagaggctggggcccaggaataagctgtggttccaggacaggatctgcaacaattagggtctca

SEQ ID NO: 158832 - DNA, 1000 bp, Homo Sapiens
tttttttttttttagtgggtaaaaccatttttattaactgaccaaagcacatcattttgttttctgatttgaggtaaaatcataaaacacagttcacaagaaaatacaatgactatttaaccacaattacaagtttgaaatctcactaggtgttcatatacttttacaaattcatacaactgtatagtctacttaagcttagtgttaaccaaaagagcaatatcaaagacctagacacttgactactacttttgcagtgggtatagttttataacaacagaataactgttaccttatgaatatactttactttaaaaaccacttgactagcgactgtactgtttcctcgtggttcaggggtgtgcatgaaggctcttaggagagcaaacacctgttcctattctgtatgtccctccctcatttcaaatgagagtaaccaattgagtaaaataaccaaataaccattgccccaccatgaacatggggcttgggaagacagtcctacaatcttcatcatatatttaggtttttaggccagccagctctttttttccaaagctttcttttgaatgttcagatcctattttaatcctaactatagactactgtgtttgtgagggtgtctgagtgtctatgtgagggcaaggacaacagtgcagtccagaaacacagaaaatatgcttttttgcagctgagctctgttttgagatttcattttgttactggacagcgcttaatccataccaaagtctttggaacactgcagatttgctttagaggtagataaaacagaaatcatgcagttaagtcaattgagaaaaaaaaagggatttgttgtctttacagaacatcatgactaaaagttgatcctttgctcttggtgcacatttaagatttttacctgttttgggaaatacccaagtcttccttgtctctcaggaaaaacacatttaaattcatcctgtactaactacagatagaagaaaaacagtattaacat

SEQ ID NO: 158833 - DNA, 1000 bp, Homo Sapiens
tttttttttttttttttaacaattcagtcggttggatctcgatgcagtttattaaaaaaaaatcagtacattttcatataaactgcaatcaaaaaagtaatttactttgtcaaagaagttatgaagttgcaagttattttttgtaatatgcagaacagtaaaatgtaagcatgctcttggatgcaggtgctcctgtgcaccatggagttattttgaagagcctgctaacgtctgcaggcagtttataggatgcaattattttctccacaacttaggtacatgagaataaaactgatatttatgaataaagtatttttctcgaaaaagttgaggcagcttttgttgaatgctatctgtgtgggtacacttgctacaccttgaactgtactgagagagagacagacagcaagaagcccatgttcatgctgaaacctgaaaaatccctccatacgtgttgaggagttccaagaaaaagaagagggtaaaacactatacacaactgttcatcgtcttacattaacagaacacaccgagaaactttacataacaaggaagcaaatccccttcactgcttttagtcaaagtccgttgtatctatagtggaggatgaaagtggagcaagcctagtagggataaagcttaagtctacatctcatgcagagttgtccttggtctgtcctctaatatttctcagacatccgagttagaactgaggttcgttaatctggggtccgcattgatttcatatctgtaatgatacccttccatgtgatccctgcaggcatctctgatgttatgcatccacttttttatccccttgcggttcaaatacaaaaccaggaggaaaatagcgcctatcagggctaaaacaatacccaggaagacataagaggtttgcagggatgggggaagaatcgggtcacagtccaggtcagcactgttgagttccaagaggacccgattcctcattttttccggatatgcacaggtgagccggtct

SEQ ID NO: 158834 - DNA, 1000 bp, Homo Sapiens
tttttttttttttttttttactatagaatattaaattcctttatttcattgacaacatcatgttgactgggatggatgagtaagaggaggaaggtacactagaggctttggtaaaacatcttctctccagagggtgaagataaataaaccttacagagattcagaagtggccactgcagtgaagttttacaggtctagtggttaggggcatccaggggtgtcccttccaatgtgaaagacaaactgttgcatcttgcatcctcatgcaaggaaggaagcacactgcctggtgagcctgtttgagttctgacatcacattctacatgtaggtgtattgctttgacccacactctaggtgacataggaggatgccagctttgagtggagcctccacaggaaaggacactgcagcagatccaggccatggcgcagtcaccatccttcagaccccctggtgctgaaagtgccagtggtggggtaagatttggggtggagctgaaccaagcaccagtaggagagtcacagtggagggcctgggattctggagtaaggccatgtcatccacagcacagaaatatgccccatccaaagcagagaaatatgttggaagcaacttttggcatgttactgtaggccctgataagatagaatgcttgaccatgggacacaaaacaaccatgtgattccaagtgcccctacgaattagcatctgtgtaactcatgaagtcatacattggacatgcccaacagcatccatcatgagatggaaaagtttcttgtgagttgagcctgaatcccatgttaacatccccagaaaacacccaaacctgaaatggccctgaacaaccaagcagaagcactgaaattagccagccttccccatgggtcagcccaggccgggtaggatgggtacataaatggagcaaacacagtggcagggatgaggctacctatgggtccaacagtactgactccctcctaccaaggtagatccagacac

SEQ ID NO: 158835 - DNA, 1000 bp, Homo Sapiens
ttttttttttttttttttttttttgctgtgcttttgacactttatccgtttttatttaaaaacatgctaaaaacatggtgttccataaagccaggaccaggatgaaggaacgcacagatacggcaatgcaagcagaaagtgcatctgaaaccaacaagcgtgctcaccctgctctccctcccgtgctgcccgggggcaggcaggtgggcaaggagggggcaggaagccccccaggcctcacctcctgagtccccaatcagggcagggaggccaggccccaccctggactattgactcactgcagtggggaggaggaaagtgtggggcacgggaacacaagggctggccggactctgagaagctgagggacaaagaatggaccccaagcacctcacgcccagctcccatcctatgccacgtccctgctagttagcacctccaccagtgggtgggcaggggctggagaggaggggacagccacttccatccacccagactgctcttgggccaccaaagcctggaaagatggccatctagttccaagtcaaaccaggacacctgcaagagggtccggggcagggccaccttccagagagcctgagacacaggcccatgctggagggagaggggggtgacacggctcaagctgggggaggggtgcagggggagacttgcaccgtgacacctgcttccaccacccaagagcagttctcagcctgtgcccgctcacccccactgcaggatggctgcagagaaaggctgagtctgcagcggatgcccccctgcagtcctctacaaaccctgagggactttctgagacaagtgtgtaaattgctcacatcagacctgattgaactgactctggcaaagggagccgtgagtgagggaattctctcaggggaattctaccccagtgagatcacagtcaggagaaactgaagagaggctgtgccaccttcactggcatcgctgggtgtggccctctgagtggaaggggctc

SEQ ID NO: 158836 - DNA, 1000 bp, Homo Sapiens
tttttttttttcactctgtatttctgttttatttagaaatgatttaaaaaacattatacaaaggctgatcagtttaaaatgtgactgacactgaaatgctgtgatgtcccccaggctgaggggaagctaggctctggggcccccagtgctttgcccctctgtctgccctgtcctggggtgatggacaaacagatgaccacaggcaggagaatctgagattggaagcctctaggctgagccctctgggcctggccccacatccctcacctctgcagcctgggctgcctgcctccatctcctgttcattctcagctggcctgccaggagccaatggggagcctggcgggaggcgggggtgcctagagctttcaagaagtgagagcaccaacctgaggagtggacagggaccaggaagtgggggaagggaggccaggaagaggtggatacaggagacacttctcatctcatctcagaccctagaggggtccacagatggggacacaagacccagccagcccactggatggcccgggcaagtaacaacctctctgtgcttcatctgagggcacggtgagagttaccgtcggcctcccagggcctaacacgagtttcatgtgagtggacaggtgtgagctaataaagtgctttgcaaagtataaaacactgtacaaacctatgaatcactaatatctccgcagttgttccctgcctgtcccagggagcctgcccttggccaaaatgagaaaaaacaaggatgatgacaggggacacagcggacccacatgggcacctctgggacaagagattttgcttgagacagctcccagggcagcaggagtccctgtctgtgctacagggtaagccgaccccaatcccagagaccacagggtcgggggcaaggcccatgcaggctcagtgagcaggggtggcatccgagacccggccagcacgctggagactgcctgacacctttttggctttggcagagagccagtgggca

SEQ ID NO: 158837 - DNA, 1000 bp, Homo Sapiens
ttttttttttttttttttttttgagggtcatcctctctctttgtccatttattaaatacacagtgagcactcgctctgttccaagcactggggatacagagaacggacaagacacggtccctgccctcatggagctcacagtctggtgggggagacagacacacagacaatcacaaacacagtgtgatggggctacatggccacagcctgccttgtctcaaagaagatctagggtcatccaatacagtgtggttgcttataaaaaagaaaagacaggatattcaggcatagggagaactaggatgggaaaaaccaaggtgaagccagggatgaggtcaacacaaagtgcatgcgttgaagtcctgggcattcgctcgaagggagccactaatttggctctgagcttccgatgggaccccagggctcctcgtcccgcgtgccctctcccaggcgctgggagtccgagctcagactggcttcagctgacagcggctccgtgctcatgaagctgtgtctccggtagagcttggagttgctggcgccctcggccccattaagcgttcccagtgagggccattgattgaccaggggtgtagtgagctccttggaaccctgggccagaggggcgtggtcactggggatcagacctgtcagctgctcctgcagctccaggatcacgccttccagctcccgtttctcgcgctggttctgcgccgccgcctcctccagctgcagctgaagccgccggttctccgcctccaggtccttcagctgcgactcgcgcagacgcaccagctcctccaggtagcccttctgcgcgtagacgatgcggaacttctgctccatcttgtgccacttgctgtaccagctgtcctcgtcggtgacgagcgggaggtacgggtgctcgggcgagttgtcctcgctcgtgctgctctcggcgctgtgccgctcctcctcgtccgtcaggtagtcgtagctctgcgtgaactttaggtagggc

SEQ ID NO: 158838 - DNA, 1000 bp, Homo Sapiens
gtgtataaatactatgctttaatgagccccttaaatagaaattccactacaaaaatacagaggagatagggtgtttcctgtatccgcctcattcccatagaaaactataagggaagaaatagaacttggaattaaagcagcagcaaggcgaggtgagaatgcgatttctaggccatcttgttgggactgatgaacagcatctctgatctcatgatttaacatctggttatccagaagggatgggattggcctaaaaaaaccgatcaatttctggattgtttttgtttcttaatccttcaaatgacaagaagcaaaaatatttgtagaaactaagcaagacaagagttggagcagttaacaccactatctgcagcagaaactcagaccttcttagtgaacttaagggctgaagtatgaaagctgaggctgcaagtgcagatacaaaagaaaaaaaaaagattagacagaaccctccctctaccccagatccccctctgccctgcctttgagaatgccagcaatttcagtgggattgagaatggtatgtggatctcttttcttggagtgatcctcaggagatattcttggtgtcctttccgtaataactcctgaagatgggatagctcatcctggaggccagagattgtgggagatgagaggcccatctggggaggaggcaaagaggaacagagaagaatactgttgtagctctggccccctgcttctctgctacttctggtgtctttaattctgtttcccctttcagctatgccctaaattccacttaatctaagccacaagcactttcccgcacctcctacactcccaaaccttgtttgatgccaagaggagtagaacttcacttcccagactcccagaggcttcagctccttgcctttccagctcctgttcatctggttcagcagagtcaagtcccttgtcccactcccagtctattttcccttcttacctggacctcaggccttcccctcaggtagca

SEQ ID NO: 158839 - DNA, 1000 bp, Homo Sapiens
agagaaataaatgtagaaggaagaacagtgttcaaaattcctatttttttcgattatgcaccaactgatgtatctattctgcacatttgtgccaaaggcacaaggtaaggtgtcagctctttgaagaggcacctgaaaaggaccatttctgggctttttgcagaagatcttataaatgcaatgaatatttaacctgagtattaaggtctacaaaatgcaaagagctgtaaaagacagaagaaagtaaagaatattcttggaagctaagcattatatgggataagaattgatcttgaaggaaataatttaaaaatctataacaaaaataaaacatgacactggcaagtcatttgtagctgactttaattgcctttggtattcaggagaataaaaaaatggaagtacttttataagctctagtctttccatcacatagaaggtaaggagtggtgaagaagacccttccattgtccctgtcaaattctttgtttgtaccagaactggctctgcttgtatacttccctgccttctcttaagcttcagtcatctgggtaatacaaatagagcacttggaagtaggggttctgtctcctcatcccttgagaagttcctgcagaaccaagaaggtccctttactctgcattcttctaaataaggtaaaagagaattcagagagttcattgccatctgcactgctgctctgcatctttgccaactcaagtttttcactttttctcagtgattcataagtgggcttgtgctacttttacgaggaaggctaacattttttagaaccaaatactttcccttttcccttctacagttacagtaatatatatacctttctcatttagaaatttaaatgttcaagtagtaaaagatattacaatgtcaaaacatgtgctataatttaactctcttaaggactattgtaactggccctgcatccttattttctactgaaatttttttgcagtgaaaaattttatactgaaaaaat

SEQ ID NO: 158840 - DNA, 1000 bp, Homo Sapiens
ttttttttttttttttttttttttttttttccttacagggaaggctataaacaatattttattgtactgtttttataaccagagtaaacctttggattctgtcatggattgaattgtgtaaccgcaaaatttatatattgaagtcctaacccccagcacctcagactgtgacttttgtggacataagatccttgcaaatgtaattagttaagattaggccatgctggagcagggtgggccccaatccaacacagctggtgtcactacgaaaaggggaaattttggacaccagcacccacacagggaggacacaggtgaaggcagagatggggcgaagtatccacacaccaaggaactgaaaataccaccagcagcccccagaagccagggacaggcctgagcagattcccctcacggcctcagcagtgaccccccacccgcgacaccctgatctcagacccccgcctgcaaagctgtgagagcacacatctctgttaaagcccagctcgcggcatatgctgtcaccgcagccccagcaaaccaacccagtatgcaaaacgcacaggctcacaggataaacaccttcgttttactccaagggtaagaattaactttgactaggaaaatcagtaatctattcattaagtttcctgagaacaaacaagtaggcctgctcctctcaccacgtgcttgtttatttcggtgagttaagaccatgttatcaattccatctcagaggtgctccagccctggagcttcctgtattttccaaaggctttaaatagcttaaaacgtttccatacaaaaagggctccacgacatttatccgcgcagactgagggcgcctcagtagcggtacttggtggagtagtccttgggggacaccaccaggccgcggcctttgcgggccccgcggtacaccgtctcgatgatgtccaccatctcctgcttgtcctccatggcccagttaatcttgttgttgttgccagtccccaagtca

SEQ ID NO: 158841 - DNA, 1000 bp, Homo Sapiens
ttttttttttttttttttttttttttttttttttttttttttccaagaggcgagtttattgggggaggggctggtcaagtcatcagtgcaacactgcatccccgctcagggcaggtcagtccagtgtgtgggccgcgggggtcacaggcatagcagcaggagggggagtgagctacccccacggggccacccccagcccagtccaggggtgggagggagggggtgacccctgtcgaggtcctcaggcatctgtggctgagccgggcggctcctggggcagacagcgtcgttgccggagaatcgacttctcctcctccatctcggaggcagtgctggggcttgcgccctcgggggaccccccttcatccctcgagcagtcgggtccggcgtcctcctcatactctgtcagacaatctgactcctctccgtcagcacagccatcagagacatagctcgtggggggctcaatccgggacacaatctctgccaagtcagtgaagccagagcttgggaaggcaagcacgtctgcacggcggctctcattaaggtctgtagaccgccggtctgtgagcattttctcaatgacgttgccacggctccagcctccaaacaccgccttcccgtactggtagcccacatcatagatctggtcgaacttcccaaagtccatggtcttgaagcagtcgatgggcgggcgcaggtactcgcagtaggagctggacttgacaacctctagctgccgcacacaggacacgtaggccaggcgggactggatttcagccatgtctggaacctttaccttgtcagcccagggattcagccgcttccacagcagccaccagccggacaggctgtccccgtaggtgctgaggtccgtctcatcctggctccccacgtcaatggcgatgaccgttttggcacccatgctgcgggcgatgtccgctggcagattgttgatgtagccgccatccatgagtaggtgcccgtccttggggtcgca

SEQ ID NO: 158842 - DNA, 1000 bp, Homo Sapiens
tttttttttttttttacatcttcatagaaaaattgtatttacaactccattcaaaagcagtttttaaaagcaaacacaatgtaacactgaaggtgaaaaatctaagctcacccaaagctgccaggtctaataaattactgacagaatactgtatcaaaaataaggcaataaccgaaaatataccattaaagatttctccatccccacaactagatagaatgaatctatctaggagcaaatgacatgctttattcagtttcaccatgtctgaaatctttaaggacagaagtgataaaatgttatcttcattcttcattagacttgaacacttgaaggaaaataatttctaaagcacaaagaggtaaagaagtataatctttcaaaaagatattcagtgttcaaaattcaagaatgcaatatcaatacacaatgggcattaggtgaatatacacaatacgatgagagcaaattaatttatttagtactttttccattccatatcatcaggaggattgatttcaactttccttttacctacatcagaccagttggtactcaaaactgtaccacccgactccataaaggatttgttcatggcacgtttcacttcatcagaaccatctgaatagatctgctgaaataatctgtttaaagctgcatctccctccaacttttcattcttttcttcttctttgatctcaccaaccaatttatcccaatttcttgtataaggagatgatgatggatataggttctttacatctgctacgaattgttttggcgtaggcacatctccttgcccctctagcttttcccatctcacagcctctggctttttcagtttaatttcaatctttgttgaaagtactttaaacgtgctctgttctggtattataggatgaagaagttccagtttcaaattgtaatcctctccagaaggaagtttaaccaaagcagacaactctttttctgaaaattccacatttacatcattcttctg

SEQ ID NO: 158843 - DNA, 1000 bp, Homo Sapiens
tttttttttttttttttttttttttttttattaccaaacccaacatttattgagaacaaaaggaaccagttggcatagaggcccgacttcaattcatcaaacttcaactgaggatggggaacacggggggtggccagccctgaagttgccctcccagggaggaaccagctctgggagggaggggctgtcagacctccagggcctggctgggatctctggtcaggaatgtgtgaaagggtggtggggagagaagatggcagcacccccaggcatgggctgcgagcagctggtggcagaggaggcggctgagctgtggccatccatgctggggagagagggtgtggtccgttctcatgtgttgacagggggcagggagccgagctcgggcagcagctcagggtgtgggtccaggcgggccagacggctctgctccagggcaatggcttcggctgagtgcttgcacttctcagagccacattggcaggtgaaatatttgcttttgatgtcccagaagcggtcgccatagtcaaaccctagctcctccccagtccggatgtctcgggaactgaagaaggcgatgcgtggaaatcgcaggtcttggtgcagcatgaagacccggacgggaatgatgttggggtcacacaggtggttgatgaagcggctgatgttgccatagtaacgggcatctatgcagtacacctctccatccttgttgtctaagtcgaagaggtaagaatcatcctctctcacatcagcctcagcatcagagatcagctccccgacatactcgcagatgaaggtcccctgtgggatggtctgcagggcgcggaccccccagcccatcttggctgttcggtagagctgtagccgcaccttgatgccactctgtacgacccggttcttgcagtttctccagcatgagcacgcctggttacactcgaaaatcagcggaggctcaatcttgttaaattcctggagcaatcgcccatccttgtcatac

SEQ ID NO: 158844 - DNA, 1000 bp, Homo Sapiens
ttttttttttttttttttttttttttttgcattccgatcttgggtttattcaacacaattcttccactctacacaacaaagtacaaacacaatgtcatctaaaatgctacaaaggtataaaactcaaaagagaaattttatagtactgactgtacaatgaaagcaaaaaagaaaaaaaataaaagcaatgtacatgttgccaagataacctgaaagaccaccatgaacggcaggcacaaccatggctgcgtgatgactccgcagagctggctctccactcactcgccaatttcagagtacagtggtggggtgcggtgtgtgcatcggtgcacggacagacagaaccacgagcagcaactaccatgggtgagaggatctttgagggggtgtgacccttgaggtcagaagaggcctcgagaggccaggcctaacagggttggcagctgcactaaagcctggggcagctccctttccaaaaggacactgcccagcaacagcaagggcacggcctggccaccatcccaggtcatcggggaagggaaaagtgtgctcccaggtaagcagggtcaaaccacccccaagagcctcacttttccctggtggctctgccactgaactgactcttagaaaccggaaacggatgagctttctagccagaaaaccggagggaatcttgacaggcacacagcatccaaaccaacagcacttctgcagccggggcccggctggcagaggggtgctgcctgctgcctgcaaatcctgccagagtcaagggtttgctttcctactggtcttcctttggctagaaaagtgacaaaactgagctgggtggggtataagttacaggggcgagagcttcagtggcctgtttatcgggaggagttggagctggagcggctcctgtggcggcggcggcccggggaccgtgatctccggcgcacgggggacctgcgcctcggggagcgggaccttctcctcatccgtgggggagacctgcgcc

SEQ ID NO: 158845 - DNA, 1000 bp, Homo Sapiens
tttttttttttttttttttttagagataaagaattcgctttattgtataaatgacaatttcaacaagggtacaaattagatataattatataaactgaatatttacatccaatttacatccatcattctattaatgagcactttaaatatataatacaattcagaatgataaagatatctacattaaggcatcaaaaagaaaaaaaaaagaaagcaaagacaggaagtctacttgcccactcagtaattaacaaagatttatgtaaaattcccacaaattgatctcagaatcagaatcagcattttctattagcaaaaactgtgaaatactagtaattgtgctttatataaagctgtttgaggcaatctgcataggaaatattatcaagattcataattgcacaaatctgaaaggccttacatgtcttatcacatgttacactgctgtcataactcacaaagaagtaattgtagtattttataaactgcttactgtctaggattgtaaattgtttagctaatccatataaactttccggctgcaaatcttcaatgtcgtaggtctgggtcaggatatactccagcttccagatggactctccctttagattcgcctctgtcagattcaagtaatactgcaacatatccaataatttataatcacgaggatcatactgaaacagtctgataccaggattgttggtctgtttttctaaaacactcttcactggtgtaacagcaggagccacaaacaaagaatttactggacttccttttttatctgaaagaaccataatgctgtctctgtgagtgtgtccataaaattgtcctgcaatgacatcactgtatttttgaaaaatatctatcaatttctcattatagtattctctcattgctgtgatgttctgtgaagatggcagataccccactggaacatgtgctatgatatacaccttctccttattctgctgagagttgttcaatgtactttctagccatt

SEQ ID NO: 158846 - DNA, 1000 bp, Homo Sapiens
ttcccgatccaaggatttattccacaagaaaagactgatccctgctttaggctggggaagcagaaattaggagtccccagagccttctacaaacaaaaccccagccccagggactcagtgtggcggaggctgaagcacgagcaacagggacagcacttggaagggagaaaaggtgagcttcaggcggttgtcccgaagggtcaagtggccagcagggtctggtcgctccaagagatcgcagaggatggcctcctgaaccggcagcgacaagtgcagccagcagtccacgtggctgccgtgggcctcatacagcctcaggaccagcgagcggcgctgggggctgctctccgcctgcttgacggtctccaatacgaccgcgggtgaagacacggaaaacgcactccaggaggtggcgggcgctgggctgggggctggcagagccaacagggggaagtttaggctgtaggcagcttggataacgccagcatcctggaaagagcccttgtgcggcatcagtgcataggtgaactcgtggcgccccgtgtcagcagtagcgtccggggctttaggcgcccgcaagagcgagaggctgaggatgctgcctcgcactgacgcgccatacttgcagtcgttgagcagggccagcccaaagccgtgttctgacagatccatccagcgatgggcccacacctcaaatcgagcccagtcccaagaggtattgtagtgggtaggtcgctgcaggtgcccaaactggatctcataggtggcctgggaactccgcacgcgagcagggaactccaccttcaggaacttgtgggcctcatgccagtgtacctcggtgtggaagcggacataggggcagccaacgtccagcacaacctcctggctaagccgactgttggggctgatctgtagcaagaaccaggcgctgccccgcaggccgccctcggtgcccactgccagggtccctgcctggcccagcacaggcttccgtgtctcc

SEQ ID NO: 158847 - DNA, 1000 bp, Homo Sapiens
aaccccgcacccccatcctaatccacaaagctgccagtggggtgtgtgtggtgtgtggtgtgtgtgtgtacacttgtatctgtgtgtatatattatatatgtatacacacatatagatataggtagatacagatacatacatctcaaaaaaggcaataacgaaaacatcaaactatgcttgcattgtggcggcagaataagagagttagggtgagggggaaaatggttaagatctattacaattttaaatgactatgatactagcttaacttttaccaaacttgcctgtaactcccctcgaaatagacagacttcttttaaaagaaaggggttctccttacacaaaatgctttgtgttcacatcaatctgtactattcagaacaaaaccagttctgctggcagagattgtgggttcgcagggacatttaagctttcattaaactggaaagcaatcaagtctttatgtctacaaataatacatttcatagttccacaaatttggcagagtttgtgatgacatctaggatgttttcaccaaatcgtagacataaatatggaaatcatcatcaaacttgatgaaatagacggagggcttggcttctacttgatgaatgaccatgccagtccttttcgagccatcttctttggcatattccacttgtttgcctaccaggctgtccacaacttctcctggttccctttctgctggaggtgaatcattggaatcaggcataatgcgaaggtcgccttctttgtaatcatctaagagttggtacatgtacaagacagggtctttctcataggtaatgtaaaaccatgtgttcatgacaggtgcacgtgctaagaccattcccctccactcatctttagaaccatcctctgtctcaaacatatgttccactgctttgccaatcattgtgtctgccaagtgtgcatcgctgattcgagatgtcgcaactctatcagggaggacttcaagcgcagaaactctttcatctt

SEQ ID NO: 158848 - DNA, 1000 bp, Homo Sapiens
acgtatatcttaactttattgaataagtaagtagccattacatatagattgcaagtcattcttggtcctgcttagagataggtgtttattccaaggtgaaatgacagcacaaatccacagttctactgcaagtgaaatacttcttcagggtggcttggtatggacacaatctccctcaatacccattcaaagcagtctttgctttcacctctccctttaggtgagggattcacggtatgtaaaataagcttgtaaagaacccttctgtatcagaggtagttttgtgcctgcactgtgaaccatagaaggcatttggtcaaaggtgtcataaaaggggcagaagaggtacatcagagcacagagttgggatcgattatttttttcaagttaattgcccatagtagcaaaagtatcaaccaaaatttagaatagcctgtccatccatttaacaacagagcatgcagcagcctgtgcagacaatagcttttagagacaaacttcgatctggtttgagcaccaagaatgcatcttaaaaagtgaaaaattcatttgtgtgcaatgaatagtgtagtgagctgcatggtgccccctccccaaaaaagatattcaatatcctactccctggaacctgtgatagtaccttatttggaaaaaaggtcctttcagatataattaagaatcttggaataagggaattatcatgggtaatctggatgggccctaagtcccgtcacaagtgtccttataagagagaggcagaggtagattatatatacagaggggaagtgatgtgaagacagaggagagggagatgcagtcacaaaccaaggaatgatggcagccacaagaaactggaagacacgggaagagtgtttcccttagagtctccagaagacgttcagccctgccaacccctcaattttggacttttggcctccaaaacaacaagataataaatttctattgttttaagccactgggctagagggtaatttgttac

SEQ ID NO: 158849 - DNA, 1000 bp, Homo Sapiens
gcgtttttaagagctttttattggcaacagtgcagaaccaaggggagaggggacggcccattgccaatctgtcccagccccccggggtcagatgcaaaatacaaaaagagaaccacaagtacagcatggggtaggggggtcggggattcattgaattgtggttggcaggagcaagccctgctcacactctcacactcgcacccagaattgtcaaagatacagattgtaaaaatctacgatccctcagtctcactcacaaaaaataaaatctcatgtccccaacgaacccagagtcagacgacagctggagcattggcagggacagtcagaaaggagacaagtgaaaacggtcagatggacacaggcggaggagaaaagacagagggagagagaccatcgggaacaatcagaggggccgagacgatcagaaaagggtcagcccgagacaggctgagccagagtttctagaagcagtttccaattcaacggctcgctttgagggccaacgtgacctaggccgaggctgcagaagcgctcacacactcacgcgcacgcacacacacacatccatatataatatatttacttatacataatagatataattgcctttcggaaaccaggaaagggataaatagctaaggaatgggtctgggatcaggatgggagacgcgcgacaaggggcacgtggaatgtttttcatgcagcacggatggagggcggcgtggtccaccccccgatattaaaaaatataaatttgcctcataaagaaatcctcatgagatgaagcgcagggaacggcggggtgggagagccaaaaccatggtcagggatgggcggactcgggcatggaatcatgagattccagccccttgagtctgccagtccaaaaatattgggggtttgggggtaccaaagcctcagctctgaaatcttctccggaaaaatgtcacagcccctcactgccttcctggagaggatgtgaggggccaaggggtgg

SEQ ID NO: 158850 - DNA, 1000 bp, Homo Sapiens
ttttttttttcagtttatgtcaacattcatttaatattgattgttgcagtttatgccctctgctctgggaatggaagaatgatgaacactacttcttataaaaagtttcaagccttgtaacccctgtgaaaataaatagtccaaataccagctccatttctttccccgaatagagctcacatttactgtcctttcttctgggctttcctgtagcaaaaaggaaacagcgtaactcaagaaagaaggatgatggactacatttaaactgtttttatattcagccactccagttttttctaggatttcagggtcaatatatattcctttcccaaagggtttggacgtccacaggcaaccaaccattgatgtcaaatagtgattaaattcttgataagtcttgctgctgaaattgaactctgattttgtcttttgtaccaactcatttttctttgcggcagtcaaatttttacgatatctgtgcataataaaacacagctggttcaggatgctggtatccaggctgaggagtgcagaatagaagatcccaggaggaaacaataccactaatggaaggttataatttatatatatgtcacacaccttctcatagaaatccaaaataaagtgcagcaagaaagtattgttgctctccaagcgcattgcagtagtggatagccaccctacatagtggatcagtttagacacagagttcatggatccacccaaagttgtctctagaggactgtttgtaacaggtttcatgtgaatgtccatagaaagccacaacagccaattctgcaatagctctttcagactctgaagcacactacacttgaaataaatggttgatgtaaagaagagctgcgctagatggtcaaaaagaagtggtttcacctcagagaagctactaaaaggaatccagctcacaagctgaaggaactgtgaccgacaacaaaggccatcccagagaggaaggctcttatacaggaatgcttcacag

SEQ ID NO: 158851 - DNA, 1000 bp, Homo Sapiens
ttttttttttttttacttatagcaaaggagaatttattctacaaaaaatatgcatgacaatgcatcccaatgtaatacaaaaataaaaagaaagtgaagatacaattatatgatcactttcttgcaggcctcatactgctctcaggaatcacataaagggttgttgagttaggtttaaaacaactaaaactccaaaataatctgtaaaagatggctctgtttgaaactgggtcagggaatcactaaacagaaaatcctcaacacttaaaggagggaaggggtaggtcaagaagaaaataaaaaataaactcccaaataaaagaaggcaaaaccacctggtcaaaggagtttttgtttggtgatgctttgttttgctttaatgtttttagtaattcagatgctgcaagtcgattgtggtgagtgtgtctgtaaaaaagtctaagctgtcagctgaaatatctacgggactgtcgagggaacctggcaaactgggtgaaactgcatctgaaagctgcaggcaggaatctgtggagaaaacgctaaagtcctgcaaagaggggacctcaagggcctcaggactgtcattgtttaggccagctccacagttctggcccattgttgacaagcagttgggaacagtgggtgactggtgctgaaaatgtttcagatttttctcattgctggttaaaggcgagactgggaaactttgggagtcgccattgtgtccattgggagcctgctgctgagagagggcattttgctgaaaagtgtagccttccctctccagaagggccccagagacgctaagggcttgctcaaagagcgtcttctcttcctcgtcctcctctactttctcggagtcctcaaggcttttacatttcccttcgctgttttggttttccttgcactgggtctgcctcttgtgcttcatcctccggttctgaaaccacactttcacttgtctctcagtcaaatccagcagcgctgcaatctccaccct

SEQ ID NO: 158852 - DNA, 1000 bp, Homo Sapiens
ttttttttttttttttttttttttttttttttttttttttttttttttcaagctctcaaaactcagttttattgacttccagcatttccccctggatctgagctcagcccagctggttttggttcgtctctgaggctcagtgttacagcgactggctccaccactcccctccctggccactgggctccccaggcagggaggaggagaggcagttcatctgtgatgttggaaagaatgggcagcagggtcagaggccaaagaaagccatacaagcagcggcatgcctggagctgccatcacatgccaagccccaccacacacacgcccccgcgggtggccttgccctcgaagctctctgccagcccacactcctcagctttctggggccacaccctgctcaggcagacatgccactcgccctggcttgttcctgggaccccaggctgcccaagggaaaggtaccgctcccaggtgctgcgcggctctgccctgcccactctaaccctggggctaaatcaaaagacaaaatctccccatctcacagcgagtgacaagccgacctgggctactacatgtcccaagatgcacagctccgtaaccatacaccacctcccccaagcgggatctatcagaaatgaggccgggcacaccgcactctgggatttgtagtccccaggagccagcaccaaacacccaaggaagagagtgcacaggctaagactactgccacctcccacccggcccccacccgccacccaggccccggctctacactcagcatgggtgagggggagaaatggagggtcccctcccagcgcatgggggaaggcgctgtcctgttggaactgtgcagcgattctggaacccggcatccagctcagaacacatctggggagagagcaggggcggggtgacaggagagagcgtcagcggcaagctgtggaggatggggctcagcatgcagacctgggctggccgcatggcctctccctgagccctg

SEQ ID NO: 158853 - DNA, 1000 bp, Homo Sapiens
tttttttttttttttacctgaacacaccgtggctttattattaacggatgccaaaagcacacttcccagaaccgcgctagaggcgggcgcccagaggcagcaggacactacagctccttcctctggggcagaaaggagggtgcctgggaagttcgagggctgcagtggggaggcagaggtcccagcaacattgtcaatggcaggcagcggcaggaggggcgaggcgtgggcgagtccatgagtccagtgaggcggcgcgactcacttgaggcggtagagaaccttgcgctgcatgcgatgctggatctcgccgcgccgcagcatgagctgcagcaccttgtggatggcgtgctccgggtatttctgcttggtgaagtccttgatgatgctgtgctcagacacctgggagccaatggcaaagcggcgcttgagctgcttctcgatgcggctcagcatctcctggtcctcctggctggtgaagccctccacccctgacagggtaccggacaaggcagcatccaacgtggacacttggaagagccgcagggcctcctccacatctgcctctgtggcgaagggctgcagcttcatcttgctgagggcttccgcgatgcgcacaatggcctccagctgccgcacagtgatggggatgctggagcggcggtcactgtccctctcgtgctgacgggccccgctccgcatgatgatgtagcggttcttcagtttctctgcagcctctgctgacagccgggggccacacttcactcggcagtaggcaataaacttcttcagcttggccaggtcaatctcgccctccacagcctgtgtctgtgtcagtgcgctcacgtgcagagtgatgacatgcttggccagcatcacatccctctcctcattgtgctcatccttgacgatgaagatcatgtcgaagcgcgacaagatggtgggcatgaagtcaatgttgtcctcccccttcgtctcatcccagcggccgaacactgag

SEQ ID NO: 158854 - DNA, 1000 bp, Homo Sapiens
ttttttttttttttttgtgtgttcactgggtacaagttgaccaagcatcttcacatacatacactctttccagcatgataaaatctgggtgaggcgttctccctcatatatatatatatatatttaggtatgtatctgggcaagctgaggcccaggaggaggccccgagggctcatagtagctgcatggcagaagtgggacctgacgcttctcaggctctgctcttgcctctgtaccacatgcttcagcagggagggggaaagaatcttgccttccctcctttcctctctcccactacctgggaaaatcaaaaacagcagcaggagagaggcctggccgtgagatctgagacagtttcttctcttatgcttggttttggtcttatctgggcccctcaatgtctaggacaagggaacccttccagtctccagcatgggcctcttcattaatagccactgtgttctctatccattgttgctaacgggttgaaataagggacagcggtcccacagctggaagagggaacacatcctgaagcttgggaatccaaaaggaaggcagctggggcttggagggcaggcgaggaggtattggcacaccaccacaccctctttcccatgggccaagtgccatggtgcagttccccttttgtccagcagatggagcccaccgcacagtcacagctggacacggcacaggccttagagcgccgagtcttccagctgcagggcaggcctgtgaggtggtcggatcgttcctcaataagaaaagagaacctggggcttttcttccttcttggcaccctggaagttagtcctcccacctatctgaccctcatctctcttcccacagcaagtaaagtcagggctaagggaagaactcttccctgctcaaggcttctgcctagctcctgtttcttccttcccagaggcagcttggcaggagggtgggggctacagagagggcagggcaagaaggcagggagaaaggattctcccag

SEQ ID NO: 158855 - DNA, 1000 bp, Homo Sapiens
tttttttttttttttttttttttttgttggaatgaatggcagccctccctggagaggcagcctgtttactgaatacagaggatacgtttacaaactgaatacgcataataaataactgcacattctccatccacaggccatggcatgaaggcccaagtgggtctatcaaaggcccacatctccaaacccctgtcctgccctcaggaccaggcccaccctgggcaagagagaacgtaagccccagggcttcaggtccccagagacacttggggaactggggggaaattctgaggccatggggcttggttctccactgcctcctgcccagggggatttggggacggtaggaggatgtgtctaaggcatagtcgacttggcacagagtggtctctttagttttgtttcccactggaggtggcacatgcaggaaaagggcctggcccaggctgccgaccggcagaagctgagtgggaaccaaaccctcctgcaattggcagggccctgccgtcaagctaaggccaaagctgggccctgggcccattctacccactgaaggcagctgtggaggaaggggcttgggttccagcctggtttgtggtagggggagataccacaaaagaaatggggatggttctggctcaggcctctgggaaagcagccacccaaccccacccacctcccgcaggggctccttccagcttgaggctcagtgggacccagactggaaggttaatgctgtgaagggaagcagcacagggtggacggggcaaggccagctgtgagaaggcagtgcccctggcaccctggtttcagaggcaggtcacacagtatggctaagttccagggaggggtgcgcagaagctcagcagaaggggagaggtgagcagcccgggaccctcccccagggcggcaactcctaccttcccatgtcctcatggaggactacaggtgtgcaccatgggtgggtgtgcacgatgggcaggtgtgcacgatgggcgtg

SEQ ID NO: 158856 - DNA, 1000 bp, Homo Sapiens
ttttttttttttttttgaactattgtgatttaactttattaatattttaaaatatgaaaactgtaaaacatagtatttatgtaaacacctgaggactgttcaagtgggtacagcatcttcatacaaacaatttgaaagaagaccaagtttaagtaagaatcttatgacatgtaaggaataacattgatgaagctattctttaaatagttgcattcatgtctaaagtacatttggctttctaaaaagaaaaggtacattcttgcatctggtgaacattttcttgacattacagcaaatagctaatggtgatagcaccaattctcatagctcgtaaaccttatatttgttacacaatgtaataacaaagttataaatttataacaaaataatagtgttgaacatgtttcccttgaaagttctaacttacaaaataaagcccccaaagattagtctgaattaatgtatcattcaaagtgtagcaggattaatggctcagaattaagcaaattaattagaaacattgcataggacggagaacttccctgtatggaaaccaatctacagattgtttcttgtcctctaaaaagtaagttgagaggtactaatgatggcaaataatccatttatattttacaaaataaaacatttcactaatatatggctcatcctacctctgtggcaatacaaaatgccatttcaaattttttttaaaaagattgtgtgaatacttcgggtgagaataaaatataaaatactatctatataaagaataaacacataaaatacagttatgccttttaaaagtttggacagacgtatcttcatagagagatgcaaacaatgaaagtgtagttataggtccaaacttagccaaaatatgacagttttaatataatagtttgtttgaaaaaaagtagtcagacttcatccaaaccacccttgcggtacaatatttcttgcataaaataaccattctatctatcctatagtttatcttaaa

SEQ ID NO: 158857 - DNA, 1000 bp, Homo Sapiens
gccaagggttaaatatttattaggtttgttttaatcaggaataaatacatgatttagcaaagtgtaatgcttcccactgaaaaatccctctgggtgctccccaaatgttccaatcacattcgtcacaacggaaaacaacacataagatactgtgcaaacatctggagttcagggggtcaccctgccttatgcgggaagtcaatgtccacagtgttacattcatttctcatacgtgggctggttcctttgaaatagccttttggaacggttggggaaaccacagatgtctccttgtataaacacactaggatttatgatacaggaaactgtgtaactgcacatacacataccagtagcacgatgagcttagatggacggaatgcttatgtgagcagacagacagggagagatactgcaagcatgttcccctccttccccaggatccctttgaaacagggaaacatgagtcacagattcatctgcagcccactctcttcctagtaggatttggatgggagcttctccttctctggctatacattgtgttttctcccttgtctcttaaaattatgcatgacatcattaatccacttggactccccatctttcctggagctgagcatttttcctcatatggatgccagacccttcttagaataaagtaccgggtgagttaattctttagactgtatccatttcttttctaaaaaatccagctattcttacctacccgatccagccagcccttccactctgaagagcagctggaaaatgagctcctgagtgtccctcacctgtctctaattccatcctaagccatgagctgatttctctttttacacatttgtttatacattttttcccgtctacactgtgaacacttctgttgggggttaggacttagcatcttttttttttttttggcttgcctgacacctaacagaggacttaatgcaatgcctattcgggcaataaatgaatacttgatgcattcatacag

SEQ ID NO: 158858 - DNA, 1000 bp, Homo Sapiens
tttttttttttttttttttttttttttttttttttttttttttttttttttttttttttttttttttttttttttttgaaacagcacaggaaaagtgactgctttaatgtattaggcaaaattttacataaaatcagaaatctatgatctgtccctgctccaatttgtaaaaaacgcaagattcatcagaagccacgtgcagtcagatcccagctggccggcggtgcagatctggagtccagcctcagggatgcgctactttccattctctgcattgaacattcgttctgtcagcatccgctccagcttcactgcatcagcggcaaacttgcggatcccgtcagagagcttctccacagccatctggtcctcgttgtgcaaccaacggaaagacttctcatccaggtggattttttccaggtcactggcttgggccgccttggctgagagcacaggcaccagcttggcgttgtcctgcagcagctctcccaggagcttgggtgagatggtgaggaagtcacagccggccagtgctttgatctcgcccgtgttgcggaaggaggcgcccatgacaatggttttgtagctaaacttcttgtagtagttgtagattttagtgacactctttaccccagggtcttccaggggctcataggatttcttgtcggtgtttgccacatgccaatcaaggatgcgcccaacaaatggggagatgagggtcacacccgcctcggcacaggccacagcctgggcgaaggagaagagtaacgtcatgttgcagtggatgccgtgctgctcctcgagctcctttccagcctgaattccttcccaggttgatgacagctttataagaattcggtccttgctgatcccagcttccttgtagagctcgatgagccgcctggctctggccaccatcgcatctttatcaaaggagagccttgcgtctacttctgtggatactcggcccggaatcttctttagtatttctgctccaaac

SEQ ID NO: 158859 - DNA, 1000 bp, Homo Sapiens
ttttttttatgtttaacaacaaaaaaaactttattgaattacaaattttaaaatggatcacttaaaagtgagattattttattctgaaacattatttcaaaaatgtactttgtttttgaaataaaacaaaatcttcaactatgaactgacaaaatagaggtgagttggtaccagtgggccaattcttaacacggacatttaaaaatgctgctttctgtattacaacaaaatgatatgcaataagaaattggaaaaagggagcaaaggagagtgcaaagcatgtactgaggtctttctacgggtgcctgacagaatgcagattcagcataaaatgtagactttgcaacagtggcctttaaagtatgctagagcaagtgtaccctagggaacctatgtcaaaacaatttttgtcttactccaaacagaaaaaatggtacacactttaacaaaagcaaaacttaattgtaagatctgtactgtaaagctacttgctatagcccatatattcagtttgttcaacaatctcactcatgacagaaaaagtcagcaaataagacttgggacaaaattattttctatcagtctccacatggaaagaccacagctttaatgaattatacaatccttaagattaatccttggtcagtatagatttccgaatcaaaatctagtcatgaactgtttacaatagctatactacactaagatgctaaacattttctttccagtatgtcttcctaagaggggaaaaaaatagtgggaagttttcatctttgcctatgaggggatttatgaaaagccttctaaactacaacagtgttcttctgcaaaactaaaacacattataaagtcaaacaggtaaattaacaggaaaaccaaactgatctcaataaagtcttgtttccaaaaatctattaagaacaagtaatatacatgtacaagaaattacaagaaatgatgatcacggttagttacagatgcaaaataatatctaatattc

SEQ ID NO: 158860 - DNA, 1000 bp, Homo Sapiens
ttttttttttttttttttttttttttttcataattacattgtcatttatttcaatcctgtggcacacactgaatataacaggcttgaaaaacactttgatatttcctttgtagattactaaatgctaccattgatttctgtaaattaaatttactaggaaaacccacagtttaaaaaaagtacacaagaataagctagctgatcacaatgaaatgaatgaattcaaaatagtataaagtcaggaacagtttatcttcatggtaaacattcactttatgcaaatcccacttggcttcatttaattaaaaagctgaggttatagagtttttaagtgccatggtccaaatcacatcttctcactcaaagtccagatcactataaggatagccgtggtacttggaacgaaatattgaaagtagaaaactgaagaagaagaccaccaggcccaatcccactaggcaaattatccgtctttttccaacatcgcctttcgaagttgctgcttcatttagaagaaccatccccatggtgatagcggcattcagtaccagaataatgtgtgattctgccacaaactgagcctggctgctcccatgaatgtagctcacttgtccattgtgtgggttcttatgagcatatggaggtccacggatatggttccacatctggccagaagtcatagcaaagactatacacagagacaccatggcccaaccagtcttgttatagatgaactccaagttgttccttctcaaataaagcaaacctccaacaagcgacactaacagggccaaagcaatggtaccagagtagttgggtggtctgaaaacccgaatatgaacatccgttctgtcagcaatccactttgctagttgctcagctgcaaatccaattctttggaggtcaaaagtatcagctctcttaggtctgccttttggaggaaaatgcatgaatgtaggagcagagttcatgttgagctgctgaaaaacgtctgtcccct

SEQ ID NO: 158861 - DNA, 1000 bp, Homo Sapiens
ttttttttttttttttttgccaatgatgttgagctttattaatggcccctctccagaggctgctcagttgtccccagggaactcctcagagatcctctgccttcccacatatgagcccgaggacacctcgggagcagagaagtgaaagggtttccgggtcagacgctgcactccacgcctgcgtcctcctcgtggctgcagtcatgatggccccagctattcttggtgcagctccacagggtactctccgtgccccgacactgaacattatccagccagatctgcccagtgccagctcccactttgtacagggcccttcctttggagtaacccagcatgcggcagaagacaatggcatcagaattttgccactcgtcatcgcaaattgtcccccaggtaccactgtagtaaacttcagcccggcctcggttactactgccgacaatcctgacggacactgagttttcacctctttcacctttttctccctttactccttgctccccagaagatcctttcactccctggtctcccttctggccagcttgtccaggggctcccttgggacctgccagccctgggctcccctgttctcccttcacacctgcagggcctggaactcctgattctccttttcttccttgctgtccttgaagtcctgtgtcccctttgcttcctttcaggcctgtggctcctggactcccggggctccctggaagtcctgctcgcccaggggagccagcactgccaggctcacccttggcacctgggtgtcccactgcaccaggagggcccggaacaccctgcagtccaggttgtccttgatctcctttagctccaggaaaaccagccaaacctggtgggcctggcctcccgaagtcacctttactcccctgggctccaggaggccccatgacccctgcatctcctttcatgcccctgtcccctttgcttcctgggagacccaggtctcctttctctcccttagttccagtttccc

SEQ ID NO: 158862 - DNA, 1000 bp, Homo Sapiens
taaaagaacaatctccgtttattaaacatgtttttttctgtttcaccacacactccagaaaaaaaggaaatggggctgggagtggagaaaaggggacagtgaggggggatagataaggctgggagtggggtggggagggagaacgagaaaacaaaataaaacaggtaggaagagcaactccctacccttgaggtggtgggtggggagggaagcagaggggcggggggggagggggccaggaagctctgtacagaagggttgcccccagcccacacacacacaccccggatatgtacagtacaaaccccagataattacaacagccaaagaagagagaaggaaggttggggagggtccaggggtagggcctgaggtggggaaagggcacagggataaaatttcacatatttacaacttttatataagtataaatttggccccggctgggtgtatgtgtagggggatgggactgaaggggaactgtccatacaaaagaaagaggagtagagtctaggagagtctcaataccaaacgcaaaaggatgaagggggcaaggctgggtaggggacagcagtcagggaagagggggtgccaaggaggggcttctcccctcccatggcctacccaccccaaaccccatccatcctacctcccctatcccgccagaaaactatgtacagagaaacaccgaaaaatcgtggagctggcgggagggagggaggtggaaggagattgggagggggaggatgagagggaagcccagccctgtcctacctcccccaggggacagagtcatggaagggggccccccaacacccctcctccaacacaggtccccccaccctgggggagagagacatggcttttcctagagtaagttcccccctccccctgggagtagagaccaagaagagagaaggaaggggcagaggggactgtgtgtcagagtaggacagatcaactagcctgtcctcccaacatacacaccctcctaaaccct

SEQ ID NO: 158863 - DNA, 1000 bp, Homo Sapiens
ttttttttttttttttttttttttttttttttttttttttttttttttttttttttttttttttttttttttttttttttggcaggtgaatatggttttattcagcaacagctctcatcaacagcttacactagctctctcacactgtccgccctgccttggctgcttgagcccgtggcttccacacacagctgtgcagcctgctctcccttgccttcagggtcagcagcttaactttttctctctctgggcgtgagcaagctgagctgtgtcctggctccttcctgtccatctgcaaaacggacagctttggctctctctctctcttactgggcgccagtgtgcccaccatgtcaagccatgttgagctgagccgaaccccaagagcccctgtacagcattagcaggacaattaccttttacagacaacagtggctcagaccaagtatgaacttacacaaacaggttatataacaagtggaggtgtgtgcctgtgcaccaaacccactgagtcatgcaggcatggatctctgccttggcctattccttgaccaaagcacatccatgtaccttacacctgggtctgaagtagggttgccagatgaaatacaggacacccagctaaatttgaatttcaggtgaacaacaaatcattgtttagattaagcatgttccatgcagttctggggacatacttaaccttatagatttatttcatttatctaaaattcaatgaactggggcagtctgtatttgctaaatctgctgaccttagtctagaggcagtggtatgttccagctgactccaatcagctcatgagagtcaactgtaaaatatttaggagatttatgagctggttattaaaccactggtggcttgaaatcaaccatggtgggagtatttacaccacagaaattggtgactaccacacatcagtgcttttcctttacagagctggttatagaacattccccctggctgggtgcggtggctcacgcc

SEQ ID NO: 158864 - DNA, 1000 bp, Homo Sapiens
ttttgtctttatttgtttattttaattaaacatataaaggttaataaacagacaaagtccagagttagtaggttggtattataacatttattaaaataatgctgtgggttaatagaaacagcaaagaaccaaagaattaaaatgcaagctatgtaaaatcccaactaaaacccaaaagtgtctaatgtattcattcattagctaactaaaagcccaaaaaagacaagacacccaatataataaagtactgcaaaacaattggcaattttcagttatcaaaattgtggattttgcattttgtatccttttctcaatcaagaaaaaaattctttttgaatgttatataacatacatataaaacaagatagaaaaatacattataaacttgtaacaatggctgtaaatacattatcttacatgtttctcataggcaataggttggttatggtacatacatagcatgaaactaagataataaagaatagacaaaaatacatgtcagctgtacgataacatacaagcgacactcccatctacccacgctaaaaaattacataatactgtcagaaaaaaagtcttaaaaactacatattttaataagaaataaattcaataaagaatgataatactgagaaccaaggcattcagagatttcaaaagtcatgcttttttcagttgatccaaaattttgtcaaccaagttttcaaaagtttgttcagagccaacattccctataaatgtcacacatttattatttcatacatttactttcttccccataaaagacctttgataaacatctaaaatgtccaggtataacatagttgagatgaaactggatcaaatactggtattgtttttaacaactatcacctcaagtgtttgagtgtcgcaaatttattcaaccaaccaaacaatataaaaatcaaaatggcacagcatatattgtaaataaatcaaaactgtatgtgtaacagaaagacaaagcagtggcatatta

SEQ ID NO: 158865 - DNA, 1000 bp, Homo Sapiens
tttttttttttttttaagctttcaatgacagatattttaattgtggaatttttaaagcaaacaaagcaatggaaacttcatttttattctagaccagtctatcccagacatgctgattatggttggctgtgctgagtcctcatttaccgtatgaaatgcaaatgtctgtcaattgcaatgcctggggccaagccaggccagtggacttgtgtgcagttcccaccggagccaggagctgctcagacagcagacccagcccagtccactgggttttgcaaacacaggctccctctgcagcagcatgggcttgtggaagggaggcatgccgccgccagcatgcatgccaggggtccggggttctccccgtgtctgcagaggtgaggggtacaaagtgagctggaaacaaaacactgtgttcccccttggccttgaagaagtgcctcaaccaactcctcgccagctgcagagtactcaatctcctcacagaaagaatgtgtacaaaaaaactagaagcttttctttttcccaaatggctgttgaatttatttgcttgatcaataatggtcctggcaaaaattagttaaccaatgctgagacatttgtaatgaaatactaattttaaaaatccatgacaccttgatagaaattagagtttacacaaacaaaaaaggaaccttcgatattgccagcagctataaagtgaacgtactgagaccgacaggacagcaagaaggcatttgcacatttatatctgacacccgaccatactttcagtcaccagaatatcttctctccagatttaaaaaaatagtatgctgatttctataacaaagctttttttcgtacaaaaatcaaataatggccaacgagtcacaacagtgcaataggtagaggattaaaaactgcatcaaacaggtgctgaaaataaatactacctaggagaaggaggtgagagccctcgtgtggggtttgttttcgaccccttgagtgtgtgtggggt

SEQ ID NO: 158866 - DNA, 1000 bp, Homo Sapiens
tttttttttttttttttttttttttcacagttcagactttttaatgcaaggagaaagtcttcacttctcttcccacaggtgtgaacaagccactgcaacttcaacagtgacttcccggcaaggacagcgcccgcatccatcctcacctaatactgtatggagtgacgggctaaggagaacaaggccagttcctgcagactccgagcagcgctggggagaagctccctgagacccccgcgggaaagcctggtgggaagcccagctgtgtggtacctggtgctccacctgccttggtgccatcacagcccggacagtggccactggcctgcaaacgcgcccgggccctggaggctgggctcaatggccccaggcagaggagggggaggcggcctgaactggcccgggccactgggccgcaaggttctggtttcttattgctcaacctgggggccaggggcgttgtaaggacatccaagtgagctgccctcctttgctaaacagaggaggaaggaaggtaggaaatgaagggggattacagaaggggctgggttttcccctggtccccgctgtctggacatgagagcctagccagaaccacgggcttcctcttaccagcaccaagctgtcgtgaggccccgccaccgccacccaccaccacctcccactgtggagggtgcgtcccaaagctccagttaagtgagagggtagggcaggagctgggatgaccacccttcctcagccaggaaatgcaacactggggtccaggaacggggtgctccccgggtacccacacctaatgccccctgggcagggctgctccttggctggagggtgggaaggggagacaaaaatcacagcttttgaacagtggttgggaagttattgggaactttggtcaagtatgaaagatatcactttacagaacagaaactagcttatgtatttttctggaagacattctcctactcccctgaactcccaaaaaaagaccaaggtggct

SEQ ID NO: 158867 - DNA, 1000 bp, Homo Sapiens
tttttttttttttttttttttaaaaagtagatttattaaaaaacagttgaaggtctgagtgttgagaggcaaatggggtctctgggggatcctgtcctgcagcaggcctgactttcagatgactgtgcttataaggcagatcagtgccttcctggttgccttagttctttccatttcagacaccacatttggatcctggggcagctgctcaactctacccaactctaccatggctacctgggattggagaacatgtgagtattagctacttttacagtcaaatagggatcttgtagaagaaacaggtagacagacccaccagtctctcattctgacctagcaagctggtgaagtcactgtcggtcctagttcccttgtttgttgggctgcaggcccattccaacacagcccaactcccccccccccccctttttttttttttgagatggggcctcactatatcgcccaggctggtctcaaactcctaggttcaaaggatcttctagcctcagtctcctgagtagctgggactacagtgcgtgccaccatgccttttttttttttttaatgagacagggtctcactatgttacctaggctagtctcaagcaaccctcctgcctcagcctcccaagtagctgggactacaggcacaagccactgcacccagctccaactcctttctttatgcaaatacaaaaggcaaaccttggtgcgacacttagtccttagtagcaaccctggctcatcctcctagtctttccctagtatttgcatcaatggctaactaagctgatggcagacctcatcctggggtaatactcattcagggaagcagcaacaaaggagggtggggaaagaggtcaggtcagatttacctaacatgatatgtagcataataggtgcccattaaatctcagctactagtaaagttggtgaggaagaggtatggaggcgttaagacctgaagcactgagttggtccataaccctgggctttag

SEQ ID NO: 158868 - DNA, 1000 bp, Homo Sapiens
gaattcgggggaaattcagaaacaacaaaacaggtatcattcacagtgtaatggaaaagctttttctgaggcaggaattataactcttccttctttttccctagtctttcatggtctccctcccggagggctcgaatataattggtaaatcccaattctgtgcggtcgctgtcatacttttctgcgaacttcccatagtggtagtagtggaaagtggggtagcccttgaccgcctcctgctggcacaggtcttggttcttgtctttgacacagtcaacagcggcacaggcaatctttcggtcatctttgaaggcatcagcagtagcagtaaagtgcggaatgaccttcttacagtgtgggcaccaaggggcgtagaacatgaccaaggtgtgtttcttcttcttcagggtctcccggaagttgtcccccaccaggtgcaacacgcttgtctgctgctcttcccacgtgggctctgggggcgggggggcctcagggttttgcatccactcgagaaacttcttctttgtcctgagcacaggcactgcgtatttctctccattcttaaaatacttcaacgtaggaaactctgagatgtggaatctttctgccagggccttgttgacagtggcatcgacagctgcaaggacaccagagctatccgcttctccatggagggcttctgctgccttctcaaactccggcttcattttcttacagtggccacaccatggggcgtggaacatgacgaggacagaggagtgttccttcacaaactggtcaaagtcttcatcggtcaggtgataaacggagccgccctcatctgcccagggagtctcagggacctggggctgtggcggctgcggattcttcagccactccacaatgtcctcagctgtggacccatagttgtcatactggaacaagaaccgtcctttctcaaaatagcagatggtggggaagccgcgcacgctgtactcctccttgatgttttcaaattcag

SEQ ID NO: 158869 - DNA, 1000 bp, Homo Sapiens
ggttcttgacaatgccttccgtctctcatctaccaagtgtcttacctagagaaggtatttaggacttttgaataaattcaagactttgctcactagtcagaccgtaatttttagaaggaataggagcatcctgactagaagcgtgataaaacctggctatccagaaaataaagaatggctgctaactataaaagctgttggaagaaagggccttaaaatcttaaaagtctttgtattttaaccaaataccttcatagtgcaaatatgataaattcacatgcattttacttttacatactcataacaagatagtaacacagactaaagctgcagtgttttcccaagtgaatcttcattttaaccaaactcacaaagcatttatggaaattaatacatctggcaaagcaccagacttgaatcaagcagtctcaatgctacagtgtaaaaaaagtaaattaaaaaactcaagatgtagaagcagtagccatatcagcaaccattcttctagggaagggacccacatatacgatccttccccaagaactttgatgctaccccgctgaagagtttaagcacaaaacacagtgcttgtatcatataagtaaggactttcatagaggaaaactgtaatataaatgcatttttttttttttgcttttaaaggatactgcaatataaatatattaagcatggcctcaaatatccaacattttcctatcttacattttaaaccaaagttaaaagaacctacaggctttataaagaactctcttcacagcacagctgtagttcactttaaacaaaaaatgttccctttgtgctatatccttagaagtaaacataatatacagataaatgagaagtttcgattctgcatcaagcattattcaatctcaccttctgatataaacctgcatacagtcaaacttgcaaagcattcacttaatattttagttgaaacaaacttaaaaggtatatgggttttcggtgaaggagacct

SEQ ID NO: 158870 - DNA, 1000 bp, Homo Sapiens
ttttttaacaggtcacttagtgctgatgtttattgttaaggctccaatcttttgggttctacaaaatatacacctgaaacactccaacttgctccttgatgattactcatgactggaaggagggaagtggcccagatcaaaataagcaccataagcttgaccaggaagttcctaaaggctctattcacttcctcccatagaacacctaagacaatgactgtgtttctcagtgtccttgatgcaaggaaactcacaaaaaaaatggccaattctgaaggtgaatcacaattttgttttcagaaaacagaattttgtatataactatcttttcggactttgctgctagaaaatctaagtggcaaatttattgtttaaattttatcttttcctcacatcaaggtcctaaaagttatctaccttccctgcttctatctgatggtctctatcatcctttaaatacttccttttataataaaggatgtctttatgagcaaactgctctaagtccttttggttgcaagaatggtccaattccaaaacaaagactaacactcctcccatttgccagctctcaaaggttatgagtaatgattgaatctgcacctctgcctgatctctgggtctttctccaaagcagagatgttctaaaggtttcaaggtggttggcttccctgactctggggtgttttactaaatcactgcttgccatggggactgacagaaatacccagggagccacgcatgctagcctccccacccaggcccagcttccatctgagactgaccctgggcctaggcatcagtttagttttcatctacctgttctcaggctaagcagataggcaatctgaggctacagaaaacagcctggcagatacctcagaagagctacagtagcttgcttacctacaggtaaataataggtcctaatttaggggaaggaatccagggagctgagaaatgaaaggatccacatatggttgaaatgctagctgcagag

SEQ ID NO: 158871 - DNA, 1000 bp, Homo Sapiens
gtcctcaggagcccaccccagtgtggtccgggggaccctccagtgttcaacagctgcctgcaggggccacagcccatctgtagacacagacccctgctcctgagacaccagccccaggagagcctccgtctccagctgtggggggtgccagaccctaagcctcggctctgccacctgtccctgctgggcaagaagcaaaatgtatgaaaatactttaatcatttatttgaaacagttaagaaataaggtcatcttgttgttcttttataatcccggtaaaaaaaaaagttcacattggctcctgggcccagggacaggccccgccggaggcgccactcagtagaagcgcttgttccgctcctgccgcttctggaacaccacggcccccaccacggcgcagacaacgatgcccaggagagcgcacagcagcagcaggaacacccgccaccccgtcaggggcccgctgcggaagttccccgtggggtcgtccacgttgtctttgggcgacttgaggaagttgacgctgggctcgatcttggtccagtcgatgctctcctcgtcgggcgtgtgctccaccatcagctggaacagcttcatggagatgatgtcatgattgtcagacaggtcgccggtgccggcggaggccccgaagtagtagccggtgggcaggcgcactcccgtgatgtcaatgcagttcttccactcgttcttgtcctccaggtcggtcatcaccgtcagacggccccgggagtagcgcacagccaggaaggtgtcgtgatcgcggttgcggaagtcagccgtgcagcccgccagctcggtccagcgcccatccttgctgtggtcgtaggacagggagccattgttcaccatcaccgagatgtacgggaacacgcgctcagtggtctcatcattggggtaggtgtccaggaagatggctaagccgtggaagttatctttgcttccaaacacaggccctggcacgaggcggtcccgggtgtac

SEQ ID NO: 158872 - DNA, 1000 bp, Homo Sapiens
tttttttttttttttttttttttcctgggattgaatgtctttattaaataaacgagtaaatggtagcacaaatcaccatcaatatttttggaaggattggggacaagatgtcgagtcagaatataattgttcatttcagggtctcaatgtagctgaagaactgtgcccactgatcagtattacgtattgcaaatgcaggaggtaaggctaaaataggacttatgccgttcagaagattgaattgaaaccttaaaaactatcataatagtaggaatgcatgttaagatttgataactttctttagctagagttttcaacccacagttaggagcaaagttgtaaagtgagtaggtgtgaagaagggacactcttttgagaaaagaaattagctacttctaaaatgattcaattattttccctattttcattttccataatatttcctcctgttttatacctctaactaccctcctgatttctctgaggaaaaaaaagaatataagagcaggatcaaaaaaaagcaagagacttatcactttagccttttagaaatactgtttcgtagcagataacctcaaattaaaacttccgaggttttcatcaccccttgaagaaatatttgtgtttactgccctggagcaggaaattaggaaggtttaaggaatctctgaagctgattataatagagtcaaaaatcagtcttccattttgcactactatactactctcaggtgtccccagtcaggcctagtttctggagttaatatttgggggggaaaggaggaatccctgtgacccagtactccattgcttgaaccatttactttgtgacttgagggcttttgagagaaatggagtagacagatagataaataaatacatagaactcaactctggcagattcatcagcaccaccaacacagtagggagagaacaagattaaaatgggaaaggagtggaaaggaaggggcttgagagggaagacaatgagggcaaggtg

SEQ ID NO: 158873 - DNA, 1000 bp, Homo Sapiens
gagagaaacaactatacattttattgttgagaaacattttcctaaataagtgttttcacttcattctttactgaaacagctcttccttgacctgtcgaaactgtgctggctgtgttcaacataactagaggtatctttggcattttcttcccttagcttcataacttgtagaatatcttgtacaaaaaactgtagatttacagaaaaatatgcatataaatcacttattaatcccaaaatgtagtaaataactagcaaaaactttatcaaatccatttcatacacaaactggacagatcagttgcacataacctctacatctgcagcgttttataaattggtgctttgacattgaaaaggaggtttacaaaaagacccctctcgtaatatcagtgactctaaattatcccgctgccattgcttctcaaattccattgaatttatactaatcactccaatatcaccgttcttacaaaagcagttattttaaggaaaaaagttgcagtgcaatcatgataaagtaacattcagaatttcatgttaccaagagtcgagcagagtactaattttccctttacaaacacacatcgaaaacaagagcttcatgcacatccacgtagaaattcgaagtccgacggggtagtgtgtttccatcacacggaaggcgtcgcacacattcgcaagcagcattcgccgagaggaaccgggatctgagatgcatccaccagctgccgggggtaacgccgagcttctcctggagagattccgccgtgtttctttcagtgccttccttaagaaattttgcagctgtttctggtgcagtttttgggggggctctggggggggcggacgagcttcactttgcggaggctgctccttttgtgggtggagctggtggtgagggagtaggaaccgccgtgcatcatcctggcattcaggccgttggccatcgagaaggacttgaggtggcttcttaaggcaatggggagcgggagcttgt

SEQ ID NO: 158874 - DNA, 1000 bp, Homo Sapiens
ttttcagttaaatcattatttatcataaaatgaaggcaatttgaactcaatgtctaaattatcaatagatagcaatggaaagtaacttctcaatcttttagtctagactatttaaccaaaggtatgtgttcctttaataatttttctttagtttattgaaagaaatgtttacaacatgacaccaacagaagggatcaaagtgtgtcgtgaaattgcgagtcttcattcctttttcttggttctttgtattcaaagatgctatttagtgtgttctgttcttcatcttctctcttgttcgttttccaggtctcttatttgaccctttcttgccaggcctcttgaggcctctgccatgagctgtcttggcccggaagctagatacatcatcatagctctcccgagtgttccactttgagcctttcttctttccaccaaaaccaaacttctggtttttataccgtcgtttagcactgggccccttcctcatctgctggcctttggctcctgccttcttgcgctgtgccagaggtttctgatctccctcaaggaaatccagtttatcagagaagcctttctgatatttcttaatagcattcatcatatgggctttctcctgctgcctcttctgaagaacctccgtttgcaccttcttcccgtatttcctaagtgctcgcagttgcttagctttttcagacctctccatggcagcctgtttagtctgcagcttctgtcgaatcttctgcacctgcagatcagatttggccatttccgcaaaataatcagtgggtcgcttcgtagggactttgagctgatggaggcggggtaagactgcaagcactgcggcctgggcttggcgatagaaactcatctctcgctggaagtcgtcttctggatcaacagctttctggtccttgttctgaggtgctggcgcctcagatccaccgatctccggtaccggacccagtgtcacatcgagcctttcaacccattccagatcccg

SEQ ID NO: 158875 - DNA, 1000 bp, Homo Sapiens
ttttttttttttttttttttcggtttctgctagcctttatttgagaaaatttacacaaaaatccccaatccaacatttacaagtgaatctgtataaatcccatatgcctctttcccaaacaaaccaagaaatggctttatgacaggggtccatgacaatggtataacaaggcttacttaaactgcatcattctcatttatattatacagaccattttggataatatgctcaaaaatggaggaaagcacataacacccgattttaaagcttatttgctcttgtgtcagtcttttgtcaaaggcaaatacatttactttttagataaaaccaaagtataatatcaattaacttttaaaccaaaagcacaaaatgtcccagttgatagtttcggcatgagtaaagggaagggacatgaaagaatgtcaactcctacaaagcttaagtttagggtcacacttgggaacaaaagcatcaacgaaataaaatattctcttctcctatcttcttgacattttgtcacatcacaagaacataactaagagagtagctttcgttgctcctaaaaaggggaaaggcaccagtcagaaataggaaagaaaatcttgttaggctaacggtacatgatagaaattccacatttaaaagtttaaagatggaggctgggtgtggtggctcacgcgtgtaatcccagcactttgggaggctgaggcaggcagatcacttgaggtcaggagttcgagaccaacctggccaatatggtgaaactctgcttctactgaaaatacaaaaattagccaggcatggtggtgtgcacctatattcccagctactcaggaggctgaggcaggagaattgcttgaacccaggaggtgaaggttgcagcgagctgagatagtgccattgcactccagcctgggcgttgcagcaagactccgtcccccccccccccaaaaaaaaaaaagtttaaggatgtatcttaacccacatattattttctcta

SEQ ID NO: 158876 - DNA, 1000 bp, Homo Sapiens
ttttttttttttttttttttttttttttttttttttttttctttttatacctgttcatttttattttttcattttttttctttttatcagagacaggggcctctttgttgcccaggttagtactgaactcctggttcaagtgatgccccttcctcagcctcccaaagtgttgggattgtaggctgagccaccactcccagcctgttcatttttgtatccctaatgtgacagtttgaaatgtctaccaattctgatattcttcccttcaaaacacagaacctcattctcctccctctgcacgtgggctgggcctggggggcttgcttttgataaacaggctgtggcggaagtgatcacgtgagacttctcagggtggctcatagaagcactgtggcttgctccttcctctcccttggttcacctgctctggggaaggcagaggccatgccgtgaggatgctcaagcagcttcgtgtaggggcccccatgggaaggaactgtggctgtcaccgacagccacgtgagggcactggcttggaagtggctccagccccagttgagccttcctcagacgaagtggccttggctgatgtcttaactgcaacctcatgagagactctgggccacaaccacccagatacatcactcccaaatccccgactgacacagactgtgagagagtgaatgttcgttgctttaagccactacgtgtgggtgacttgttaaggcagcaacggatgaacacactgcagatactacttatgagccatttcaaataggcagtttctgtcagccattggaacactctcctagacttgcaacattctggagctgaaaggacgcctgggtcacctgtgccactccagctacagtcacagtaaccaagccaccagcatgatcaacatccgggcacggagcaggtttcagtgaggtttaatgcaacgtgcattaaaatatccaagctgttttcagaaacataagaagcctgaagctgagctgtg

SEQ ID NO: 158877 - DNA, 1000 bp, Homo Sapiens
ttttttttatgatatggcaaaaatatttattaaaatgattttttttcagtttgaactttattggaaggagtccctctaattcacactttcatccatgataaatgggtaagaaccacatatggaatataaagcattgattttttaaaaaccacatagtagcacagtgaaagaaatgcaattctccagggtcttagagaattcaaagtggcatcttaggtggtctaagaaaccaattacagtctcatggttttccttttggttcaagattagaagagtcaggttaccactacctgtttttagaggtagaatatgaactttctactagtccacagtttactggtcaggtggccccaacagtcttttatctcagcccatctgcctctaggggtggccagatgatctctatgtcccaggcagcaaggcttcctgctgatctctacttcagatccatgaaccggatatccatgatgagaaggaagttcttaggcagtgggcgaggggctggagacagaacagtaaacacctgatgctccaggtccacactggtcaccacaatgaagccagctacacttgtctcggacaggttctcctctgtaccctcggcagtgctaacactcagtaggtggtgcaccatatctcgcccaggagtgacaggtactagcttgagctgattatcctcttgagacatgcccaaaggtaaacaggagtctgggatggtgggtgccccaactttgtagattttcacatctgaaaatttgacattgaaggcatggggatagaaacagcctcggaatccataaaaatactcacggatacgctcatccctacattcccgccggaagtccttggagcgctccaccacacccccagatttagggagcagcacagtgcgtacaaagtgggggaggtcccgtttcagttcattgtacagtcgttcttgatccagaacaacaacgacatccacctcaaaagctgaggctgcatgcaccagagcctggta

SEQ ID NO: 158878 - DNA, 1000 bp, Homo Sapiens
aaataaaagttttgcttttatttaaaataaaatgcatttatacagtctttgaaccatggattattgaacaatactggtaatccacctctccctcgcacccttttgggctatgtgagctaggaattttctgactagcaccaatacagattgtaacagcgcaacagactagaacatggccagtccaggcattagagttaaggacattgtggcaaatcatgatcataatgaagtcattcttaatttagtagatattaaaactgcacgttaattatatctcttaaaggcatttaattaacgcagagattgctacatttaagccatctgctagttgtgagtagtttttaaaaaactgtacaattttataaaatttgtgtttttacattagttacacaaaatgcatacttcatagaactttacttcatattgtaatgcaaagagttgcatattttaggcagacagtgattatgctggtgaatactaaaagtgtaatacaatatggtgtaaaaataaaaacacgagacaatatacataacatgcttattcaaggacaaaaacaaatcaagcacgacggactaatagcattttccttcaaggtcaaacacaatgacattactaaatatcaggcctcctgcatgcctgatttatttgggggtagggggaggaattaaatggctaccagaagtaggatattttaaaacatgatatcaaattaaacatacattaaatcacatgcattagacatgataaatagagttcatataggttaagccctggatagctttaaaatagatggcttgtttcttacagtttggctagcttaaatcagtaaatcagtgatggtttgttcctgatttgcccactatttcagttttcaattcatggccctaaggaatgtgtgccaaattcaagtttattatatcataacatgatagattaatagtcgtgcttgtttagtgcacatattaactggtctggtaaggcaaagaagttttcatgataa

SEQ ID NO: 158879 - DNA, 1000 bp, Homo Sapiens
tttttttttttttttttttttttttttttgcaggtaacattttattaccaccccagcacttacactaaaagctacaacttggaagccttaccaaatcctgaggaattgtcatataaaaatgtttaaaaggatgtaaacattatcttccatatgatggcaacaatgacaaaagcctaattgtcatctgttaagttacagagccactagcagggatacttctcccaaagttccattttcaaataagtgcaggcgcccagtggtgctgccttttgaagtgccacatgtgggaagactcccagctaacatgacatctgtaacccattctcaggaacttcttcagagctgaggcacacacaagagaagcagaagccatatatcagcaacactgggatttgttctctgctctcaaggtctcttgatctagcttaattttgtccacatcgttttcttcattaggaaagctttggtggtttacaagaatcttctccactaggaaccgggcagcttcctctatgtttatgttatcctttgcagaggtttcaaaccatccggcaaagccatgttctttgcagaattggtccacctgggaaggactctggctactgtccttgttctggtcacatttgttagccaagaggacagcagggatagggctgccatttggaagatgaactttactatccagatcacttttccattttaagactgcctcaaatgtggaacttcttgatatatcaaagactacaaaagcaccaacagcttccttgtagtatactcgggtcatgttgccaaatcgctcctgccccgcgatgtcccacagctgcaggcgcaccagagtcctgctgtcccagttgaggaccttgagggcgaagtccaccccgatggtggcccggtagtgctgggagaagagctggtggacgtagcgcttgatgatgctggtcttgcccacgccaagctcgccgatcaccagcaccttgaagaggtgctcgcgggtctcggg

SEQ ID NO: 158880 - DNA, 1000 bp, Homo Sapiens
tttttttttttttttttttggtctttatgtgcttaaataacgctgaattataattagccacacaaataatgagagttttattttttttttctggctcactccaaatcagcctgttaaggtatatttccttctacagcctttcctgattttgcatgttctcattcccaaagtagtctaccttagtttacactcaaaggtagcacttgttgaaactacatgacagaaacaggctgcaaaggtggacaaggggaagcatgtccctcttgtcttgataaatcagtgccacacacagaacccacattttctgagacattatcttcattatagagccgtttgattccatcatagaagtcatccacttccatttcctctactttgcgtttagtagaggtctgcttgcacccactggcagctgggagatgatggtaaaaggctgctgtacctctgactggcacttctggcttgctgttgtccttggagaagtctgggcctgggacagaggagggatgtaatctgaacactcctttgtcacaggtcaccagggtgtgcttgaggggacggtagacataaacggaattcagaggcagggaagactgcagagtagaaaggtgatgtgccacaagctcccgacaatggatcaactgggagctatccatctgtgctttctgaagcagttcaattgtaagagaaagccaatcaggaatgagtttctccatttccagactaaccatggccagagcaagcatggatcctctgaattgcagaagttggttgcaggccatacagtgaagtagttgcttggtaaggactgccaaatgttgagatgggctcaatttgggcaaactgaaaagtaactgaggcctagttgacactgcaatggcatggaaaatatgaagaaaatccaatggtgtggctgtgtgaagatcccaattcaacttatccagaataattctctccattctcaaaatttcagatgaggaacatccacagaaactgtctc

SEQ ID NO: 158881 - DNA, 1000 bp, Homo Sapiens
catcttgttgctttattcagtttgctccgagggcaaaatcaacagtagtagagatcacaaacattattttgattggcctcacaagcctcatcagtaaaacctgaaaaaacagaaaatgttacacaagttgcaaagaaagcactcctggcgttcactgacatgatagcaaatggaaagaatataaatgcaacaggtgttaacatttagaacagtacttgtaaacctgctcatttctagacaagtccgggactctcgctgcgaacccttcatctatcactgctgatttcctttgacatgaaatatgactttatgaaaatcttcctaaacctcactctggctgcacctgagtggttcctattcctacggcgctggcatatgctgtcaggatttccactatctgtttcgtttctagggtcattcgggcttccttcagccagtcctgtgccactcgtctggattcccccttcagctgattgacaaactttgctgctagctccagatcaccatgctcaatgcaataggaagcatatgacagtaatttaaatgtgtttatatcctcagggcagagctctgggggcggcttcagttgctgaggtgggaataggagcagggactgtaggtaggagaggaagtactggtacaagctatttctggtttcatcaatcattgctacccttcgggccagtttttgaacagcatagaaacgggctctaagggtctcttcactgtacaccccacgggtcagggactctggagggatagctgcggttaaagcttgggtgaattcattatcagaacagttggctttgatggcctcaactgcactacccagcgggatagtaggtgtttctgcagatgaggtcttcatgctgtactttaatgcctccactgaaagccagagttggtgggcttttctggcttcctcttcagcaactgcatggctctgaacagcctgttcgattcctctgagtctggcataggcagtatttatatccagagt

SEQ ID NO: 158882 - DNA, 1000 bp, Homo Sapiens
ttttttttttttttttttgtttcataaatatattttatttttcaatgaaaaagtttgcacattagaaaaattagtaagggtcaggggtgggcttcctgggaggatggctgagatggttcctcaaccctggttggtggccctgttgaccttcactgggaacaagttcaggggcgaggtcacagctttgaggaattcctcactgctgtgattcaggtctctcctgtccaccctgctctgggtacctggtgtgttacttgtgggcacttgtcacgccagcaagttggctaaggatgggcacagagcagtcacacagataccaaaaaggtccaattcatagcctcgctggctgccgacctttggcctctgcatagtgggctcctgataacaagaagttaacctgcacccaggccacaggtgctcagccaaacatacgacgaggcgctggataaaactccagcccctccaggggtctcttgggctaggagagcacagatcggtaaggggtccgtcctcacttgggcaacctatttgtcatgcccagctgttccttgagcgcccgcagctgggccaggctgatgttgctgcccccgcagacgatgaccacgagggatggcagcggggttcggagattcccctccagttggagcttctggatcacgtggctatagacagcggccagggctgccccgcaggcgggctccaccaggatcttctcatcatccacgaacttctcaatggcggccacagcctcctggtccgagataacttcagagaaaatggggtgttcctgaaacagcttcagggcctgagcccccacagtcttcacgcccagggccttggcaacactggtgatcttgggcagggagacaagtttgcctgcggtggtggcagcgtggaagctgtgggcaccaaaagtctccatggcgatgacaggcacgtccccccagcccacctcctgcagcccctggaccactccacacagcaggcccccgccgcccac

SEQ ID NO: 158883 - DNA, 1000 bp, Homo Sapiens
ttttttttttttttttttttttttttttttttctgagactgagtacttgggcctacatgggccagaggtggtttattcagtctccataagagaggggacaaacggcacagttgggtccgtgaagaggagggtccaagagctcacaagagagcctctctgagatttgacccctccatcccctcctcagggaggttgtggagtcactgggcctcatgggataggcccagggcaagcaatgatgagactccaaaccagctggacacagtccaggggcaggaaggcagccaagcgtcctgacccacaaggccctatacagcaatggagccatcgcggaagtccgtcctcccaatgaggatgttgaccacaaccgggtggccgtctcggcactgctgctgggcatcgtgcagcaccttgaccacctgatcctcgttctcccgtgagagcagcaagccccgggcccccagacccatggctgccttgtgataatcagtgtaggccaggccacaggccacgttgctgcccagagagggcacctgctcccgagaaatctgtgtccagccagcatcattccctaccaaggccatcactgggatcttgtgtctgacgaatgtatcaaattcgatgaggctgtagccaaaagctccgtccccaaacaggcaccagacctcagcatctggccggcacagcttggccccaagtgcaaatcctgcaccaactcccagagtcccaaaggccccaggatcgagccagcgcagggggccgcggggctgtaccagatgggcagcagtgcccacgaagtccccgccatccaccaccagaattgagttgtcaggtagcgtttcctccaccagctgcagcacctgcactgggttcaggtgctgggccacaggcatcgctgccttctcccgaaaggtctgctccttctgccggtcggcttcccgcagctcctccacccagtctggggcccaggtctggccctgaaggccctccactaacttca

SEQ ID NO: 158884 - DNA, 1000 bp, Homo Sapiens
ttttttttttttttttttttttttttttttttttttttttttttttccgcttccgtccgggtttattacccccaatccaacccccagcaagtccctccgctccagccttcagtccccctgctgccctgccagcaagagcgaggggcccttcttggtgtcaggatttcttagtccatgccagcggcccctcctgcgcagccaggacggcgtccaggtcccgaggtccacagcggtcccggggctcggggagcaatccgggcgggcgtcggcgtggaggaagcagtgccttcaatcatcgggggaacaggccaggggcaactgatccggactgcccacgctgccagtgctggagcttccatcgcctaggtcgcggggcccgcacgggggcaaggcaagctcgggtgctggcccggctcctgatcccccggcgccgctggggccgccgcgggggccccattcttcgcccagcgccaggcagagctccttaagcgctaggttctcccgcagcagctcctcctggcggccctccagctcggccagcttctgccaacagccgcccaggtcctcgcgcacggcccgggatgcttgggtcccgaagagctgccactggcgtgcggcgcgccgcccgcgctggcgctccgagtccaggaagcagcagaggtcgcgcagctcacggttctctgcctgcagacgccggttgagctgcttgagctcgcggatctcgcccaggtggccctgcagctgccgattcacctcctgcatgaggcggccgcgctgcaccagtgccgccaggcgcgccgcctcctcccgccgcaggcgccgcactagctcttccttgcctagcgccgccatctcctcgtccgtcagctcctccaggccgcctgcctcggcctccatggctggtcaggcctctggagcatcgcccgcccgccgccgcggcccaggagccccacgtcgggcccggcgccactcaggctcgggctccggctccgcacgcggc

SEQ ID NO: 158885 - DNA, 1000 bp, Homo Sapiens
tttttttttttttttttttttttaaaactgaaaatatttattagtatgaatcagtgtgtgttaaaccaaaaataacagatacaattaggcattgttgatggaaatgctttactacagaatagaatacatggcggaaaggtcctagctgactgcagcggtgtcttgtatgtgcaagaactgggtccagcccagatggaagctctttacaaaaacacgagaaaaaggagcagtttgcacaacagggcagcaccactggactacagggtctggtttcaacaatgatgttaaaacagtaagctagatacccagtcggtctgaatacagttcagagctctttaatttataagctagctcaccattcaacttgccatgagcattgcagaacagtgagaactggagcccacacaaaaaagctcagtttcagccaccgcatgccaaagtccttgactgtagaggaaatatttcagtcatccaaacctttctcagaaaatgaactcagtttccattggggcacagcccttattgttagctaaaagttagtttcgggccttcaaccttttagtctgcaaggtaacgtcatattcaactgcctaatgtgcccgtttttaaccataaaatggcaagtcaattatgtggcaatgtaaaatgcttgcacaactccactgtcattctcagagatttccattgggaagcccatgccctactttatattaacacatggctaggggccaaactcagccagtgaaatggattacatatcggagtaacacatatacaatcatatttacacagatacacactcatgccacacacgaaagaaaaaaaaaagggagaaggaacaaattttggaaaacgatgccaaggatgctacactacatgaaactacatgactttttttagcaacagtaatttccaggcctttacataatattacatggttatggttcaattattagacagccaggaagtaatcccgagccaaacaaggaaggttgtaaag

SEQ ID NO: 158886 - DNA, 1000 bp, Homo Sapiens
tttttttttttttttttttttttttttttttttttttttttttttttttttttttaaccatgccagagccacattttattccaggatgcgacacggggcggcggatgcctggcctcggaaaccccctccctgcctatgagggcttgtccagggctcccctggaacacagctcagccaggcaaggctgggagagggctgggccccccaggtgacctgcagacgcctcccccacctacatgccccacgcaaggggagccctggagcccggcctgccttgacaggaaggagataggtgaaaaataaatacacggctgggccgcctgcagcaagcgcgacagtgcccgggacccccagggccactcctgcctctggtggcctcaccgcggcccaggccctcgtccccaagggttcagacaccactgtcggcgagcaccgtgctgggcgcagaggccacgtgtggtgggacggcagcctgctggcccctccaggtgaggaccaggagcacaggctgtggcaactccagcccgggcaggggccgggacctgtgtggataatccacccaaacaccccacggccctcatagccccgtgacacacaacaggcgctcaataaatagtcgtggaggtggggggagggcggggcggcatgcgagcagggcccagtccccagcggccggcagctgcccaccgtgctggccccaagcagggctctgcgctgaggcctggaagttcccacagccgtggtgggcggctcctgggggctgtgtctgagctcgggagccagactgggccctggaggaaagggggccccgggtcagggaggggcaggttggctgggtgtggtcagcagcagcatgacggggttagagatcaggcccagggcctgggctgcctgccttgaggttccagagaagcatcctggaagctgaagctcgggccctacctggccgcgccgggctgccctgaggagcaggtggggccaggtggcctcaggacgccag

SEQ ID NO: 158887 - DNA, 1000 bp, Homo Sapiens
ttttttttttttttttgctacagaagtgtttaataaacatcataatagatttggagaaagaacacacactccacccatgccactaccttcttactccaagggatacagacagcaaagaatttctgtctcctacaggacaacttcaggggattaaaaaaacagtaactgccagctggagggatagattaagacacattagtggaaatctagtcactgccaaaggagaaatatatttaggatatacaataaataattcaaatgcttaaaataattgaatgaacggaagagtagacttgaccaaatttacattcgttgttcaggaagagattcccagtatgctgaggggttcgtggtaagctattcctctgacgagacacagcagcgctgggcctactgcacagccgttcattacaatattgttacaagtacaatcagacatgcatttataaagagaatataaaaatatgtacaatagctcattttcaatgtgtgtaagttgccgaaagacaccaatgaaagtgtgcaaaaattcatttgtcaaaaaatcagaaaaagccttccttggcaacagtgcatcaaaagcccatctgaaatatcgagatccatttgcctcgctcaacacctaccccaaacagatggagaacaaaactatgaaagggtttgccaagtactcagcagtttcttatggcaagtctcaggctaaagcaggatgccagttcaactaatcactttatatataaatatatgtatatatttatagagtagttagaagtaggggcaagagtttacaggaaggtcctaaccaacttcaagggcactgccaggacacccagttatttcctctcacaaactcatgcagactaacacccaacgcctgggctggtcatccccccaaataccagggcggaaggctacagtggattctgcctcacctctgctcaaaactggaactcagcattccctggagggggagggtgtagggtttctggttcccagacac

SEQ ID NO: 158888 - DNA, 1000 bp, Homo Sapiens
tttttttttttttttttttttagattagaataaaaatttatttttgtaaagaattatattttgtatttgcaaaagctgaaaatgctcataaaaattaccagcccagagcttggatttccaccggatccaccacgtgagacaaaagagtctgtcacttcttcttgccaggtttgagggccttttctagaccttggatgtgttttcgagggagctgatactcttcaagcaatagccagccgaggtggtggacctggtttccctggatctgcacctgaaggctgtccttggccccaggggcaggattgacggtggtgctagcctggcatcgctgctgaaggatggcagccactgagtatgggtccagaccataggcctccaagttccggaccacggtcacctttttattagacgctctttgtgctagggtgatgtcaattggacagattctccctttcttcacaatgggctcttgtccgggaagggtcacttgataggcaggctgtaatttttccaaacacctggtcagaagactgtcccatggaagcttcatgactgtatgctgttcatttttctctaagatgcagtcacataggatgggatccaatctcacaagatttttgttgtctgcatcaaccaggtcatttttcttggcgtagttaatgacgatcgttcggacctcactgccctccagaaagctccccttcttgtggccagactcctggaagagcagggtcatgctggctgggacacagtagaggggttttatatctggagggtgatagggctgttccctgctaccctcctggatagtctgggaggtcggggagggctcgggtatgacgaaagatgtaatcctcgggtgtttccagtccacagccacaatgctctccacccctttgctcagctccttcacctgtataatctgctcctgctgcatttgctgcaggaacttagagagctttttgtagcttgacttctttatgtccagttgtcgtccttc

SEQ ID NO: 158889 - DNA, 1000 bp, Homo Sapiens
tttttaatttaaaattcttactgtttatttatatattgcatagctcaaaaagtttgaaaaaatgaagttttaacaggaagtcagtaaatgctcatagacccccttgtctctagcacttggagtccttagagatgggaatcttgacagcagaatttcagatgtttcaatcacttgccaaggaagtgccacacttgctcttcttcattactttctttatttggtgaagatgataccgattcaactaatgatcttgcttcctcttgagtgcaacggaaagggctatcagatatctgcacgtttgtgcaatttatagctcctccattacacttcttcataagcaatgctttccaacattgatgagtggatttaataacttcaagagcaaaagccttgtttttgaattctccattaaaagcaaactggttttctggttttccatctggtaccttatataatctaaaccaattaagagtagcttccaggtaacccggtttgaacttcttaacatcatcaatatcatgaaactttgaggcttcaggatcattcgcattgatagcaattaatttccaatctgtttcaccttcatcaataagagccaaaattccaaggatcttcacatgaataacttctccacaagaaagaatctgagggagggtaccataattccatatataacccttgtaagggaagatattcgccacatagcgtagctttccatcctttacatattgtttaatgggattcattggctccttggtggcaatctccattttagcatttgtccaccgaggtatttctacaatcatattaaacagattctcatattcatcatttcgtgctttcttcataggaatgccattttcctctttagagttcaccttcagaggaatatcatgaaagggggaaatgtagtgaccagttacattcttaaagaagaggcggtaattctgcgagcagggctggccgcgctcctcagtgtggtacagggccatagcacggc

SEQ ID NO: 158890 - DNA, 1000 bp, Homo Sapiens
tttttttttttttttttttttttttttttccaccttatataatttattatgggagaattatgaaatacatatttagatccaaattgtctttaaaaatatgcattacaactggagttttccactgagaataagagtttggttttgacctcacataaatccaagggttcttgaaaaaaaagttaatataaattctcaataactatatcattaataccttatgtatacataggagtttatataatgcatttaagtaacaaagaatgtaacatttattagccaccaagtaattaggagatagcatcaattatattgaaagaagatgagtttagatgcttatagccaagggagttaattgaaattgaaagctattgtaggtggttactactattattatcaaacctgaaagttggaacatgtgaacttgatcctttgcacacataaaagttcacaaagctgcttttaatttgcctttgttctgtagtactgcttggtgaatcatgcactagtttgttgtaaaattcatgtaaacttttatgtatacaaatgtcagatcaagcacaggttttattaattatatatattttaaactgccaacagcaaaaaacaaaaacaaaaaaccccagagcccaataagtgaaatgcaataaaaaatgaaatttattcttttggctcaataatgacgtagctcaccattctttttagcaatagcaattccctgcatgcagttcttcaatacactacagtaaatagttttgtaaaaagaattaacattaaacttttggtttgtgcaaaaaacaaaaatttatatcatgttaggtaattgcacaactttgccactttgttcatggctaaaaagaacaaagtccatgttatatttgtaatagctttagtgcagcaggaattaaaaaaataagactagtctgcatacgtaaatactacaaaagttgaataaaaaaaaacatctatgaataaaaggttatattgaggcaaccatagttgg

SEQ ID NO: 158891 - DNA, 1000 bp, Homo Sapiens
tcataataaaattattgtttttatcattttggagagagaaaatagggggaaaatcacatacattaacagtccatgatgccaagctcctgaagagtaaaagtttcccagctaagagggatgtttccctcagtttgttttatcagtactaataaaaagcatctgcccctttaccagcaagtcctctactcagaaagaactgacccacgcaagtctgggagagtgactagttcaaatgtgcagggctgaagcttccaaacacagccactattttctgttgtatatcttcatctcaatggtgacatggccactgcccaaggaacttgtggcagggatcccaaggtgaggcagcaacagatgtctgtgaacattgtgcgttaacagtggctcagagcctctagattcacagctctgcatggtgggcttctgccttcaacaactcactgggcttcatgaagatgccttccatggctttccagtagttgttctgacttggctgggccatgccatgcacctctttttgcccactgataggtcgaccatattgttctcctgtgacagacagcagtacctcagtggaagagtgtttgaaccgcacctcaccatctctcacccagtagggtccattacagagcactgtccagtcatccagataatcaccttcaccttcctcaccaaaagcactcacttcctggtttccagaaagaggtgaagtgaagtggtgactatggaggtttcggccagtgttgacatgtgtcagccggatgggctggccacacttgatgggggttcccctctcacacactgtggcactcttcccccgtatcctccagtaactgttgctgtcatccacagaggttacacctgtcactgactgctgcccactacctgacccatagcgcacgtcgtgtgagtgcagtcggacgttgtggcgcgtattgagtagcttcaccacggagccgcaagtaacgacacccaggctggacgctcccacagcgctcca

SEQ ID NO: 158892 - DNA, 1000 bp, Homo Sapiens
tcattttaaacaagaagtttatttaaacaacaagacgcttgacttgaagggaaaactatctaggattcttttttgttttagagtaatttatccctacttaaagacagattgccctacatgtaacagctacgtacaaaaaagttataaaattgtccttggttttacaatgataaatgaaaaacattaaaattctccaattgaacaaggtatgcaaggatttttatgttgttgttttttttttttgttaaaacagtgagagcaaaataacttactggaatataaagataagagctgaatgagcatgccactaatggagaaagggggtattttcacagaatcagtatttttccccatcccgtctccacttgatgtcaatcaaaacataccattggctgtttagttaaaaaaaaaaaaaatgcaatatgcttgtgcacatataccagttactttatgtacaataaaggaatggggaagggggaaatgaaagaatagagaaaactatacggtagtagtcaggatgtggtggaaccaaattgcagttttctaattgagaatgtaatcttggtctttaaagaacagagttctggagtaaagaagcaggttcccttttcagtagacacctcccgtctgctgttggaacacatcaattgtatcttcatcctccatttccaactgtgcaggtgtgtctgtttcattgattggttgcccgtcaaatcggaatctgatctgcctcattgacaatccctgtcgttcacaataggctttcattagtttactaagtggtgtatgcctcttaatcttaaactgcaccacagaaccatcctgccccgccaccttcaaattaatatgatcgttgttctcagtcttgactccttccttgggcttttcgtcggccatggcgagcgccggagtctcctcagctgccgcttcacaaaagaggtaccaggtccgcaccaaacgagcacacaagcagcaccaggagcggcagaagaaggaggcg

SEQ ID NO: 158893 - DNA, 1000 bp, Homo Sapiens
tcattggggagtttctgcattttctagcaaaggcagtctgtacaatggggggtgcgaaagctcccgtttgtaagtctttggtggcagttttggcagatgagggcttgaattctgccttggtggaacagggggagctggaggatgagcaagattattctgactagaactgagcacatagcatcgacgcggtacccttggagagggtgtgctaggaggagtgcttggcgaatttggacacgtactaatgtctctgagccagtctgaatctctgtgaagatgccccagtggaggtggctgaagattaaatggacagtttataaagtgttctggaggccgaaggggaactggtggaggggtatcaggaagaggatctcttggtggtggcggaggtggactatgcagaggcccatcaaatgcaccagtaggaacaggaactctgggttttacctttggaggaggaggctgtctcggtggaatagcaggaggatcatcatcagatttcatatttcccttggaatttgaagcatcatgatcaaacttttttcgaggaggaagaggaggaggaatcaggggctcttcacttagtttatgtaaactaccacatgaactaaagaaagactttgaatgtggcaaaagcactggagcaaagatgctattgctgccacaggagctgttgagatccacatctaaaaatacactaaggtctgaagaagcagatactggtggagtagatggtgtatttggagaggttggtgctgacactgttgattccagctcagtttcagcaatccgactaaagcttattttacatggttctctttctaatggtgttgggtgacctcgtaaagtacctgaggtagagccatgtcggcctgtgttaggccttattccaggagattttaaggaaaaagttgatttcctaggaaatcgaggtggctgtttgcagtttcgaggttcaatttctagtgacttgttgaacaaataatctgtaaactctttt

SEQ ID NO: 158894 - DNA, 1000 bp, Homo Sapiens
tttgaaagtgaacagattttaaagctgtctttacttataagaccagacaaatgttgagttataagaatttccttcaggaccacaaatggaaacatagtgcagatgagaaatattttgacagtaaacagaaatccctgtaaatcaccccattctattggctggcttgcttctctccagtttgaaatggtctcaagctgagaccattcagggcaaagactgagtaaatatataacaggcaccttgtctgtccccagaagtccccacgcttttttgtttgttttgagacagagtctggctctttcatccaggatggagtgcaataggtacgatctcagctcactgcaacctctgtctcccggtcaagtgattctcctgcgttagcctgccaagtagctaggattacaggcacctgccatcacgcctggctaatttttgtatttttgtagagacggggtttcaccatgttggccaggctggtcttgaactcctgacctcaggtgatctgcccacctcggcctcccaaagtgctgggattacaggcatgagcccccacgcccagcccacacttttaattaatggagaattgaggctactaaacacatacttcaaggtatgaaaggaaatttgaaccactgttaagaattattctggagaataaaaggatctgaaggtggcatcaagagaatcacccatctccatatatgggagctactctagaaagaaatgcaaaaggtatatttcagtaatcttttcccaacttctctgttcccctgacaatactgagatcaacagaagcattggaaggtttcttttagataatagtgagagatacaggcagattgctagccaaatacagctctgggttactgtgataacacaggttccttcgaatgtatttattttcccaaattaaaaataagcagggatggaagtagttattatgcatttttcaaattctcctttcaacagtctatataaatgttgcagaatgctagactag

SEQ ID NO: 158895 - DNA, 1000 bp, Homo Sapiens
ggttggttggttatttacttatttatttacttaatacacttcattttttagagcagctttagggttacagaaaaattgagcaaaaagtacagagaattctcatataaacctttaaccctcccatcctccacaggctccccaattattaacatcttgcatcattatggttcatttgttacaattgatgagccaatagtggtacactgttattaactgaagtccagagttgacactagggtttactctgtgttttccgttcactgttttccattctctgcattttgacaaattacagtaccctacagagtactttcactgtcctaaaaatcacctacctgccatccctcctttcccctcaactctcagcaaccactggtcctttgactcgctcgatagttttgcctctcccagaatgtcatataattgcaatcatacaacatagaaagccttttcagattggttttcacttaacaataagcatttagggttcctatatgtcttttaatgacttgatgtctaattcttttttatcatatacctgaggactacattctacaaccctgctataattgcttattaatgtcagcaggtttttgttatttagaattttctacaaagacaatcatgttatttgagaacaaagacagttgtatttcctccttccaaatttatgtgcattttatttcctttttttttggtatcactgcattagatagcacttccagtacaatgctgaaaagcagtggtgttccttgccatgttcctgatcttagtaggaaagcatttagttggaaacatcaaggatgatgctagatgtagggttttttgtagtagttctttatcaaattgagtaagttctcctgtattccttctgtgttgagaggttttatcatgaatggatattggattttgtcaaatgctttttctgtacctattgatatgatcatatttaatctttgaactgctaatgcatgcaatggattgcactgaatatcaaatg

SEQ ID NO: 158896 - DNA, 1000 bp, Homo Sapiens
tttttttttttttttttttttttttttttttttttttttttttttttttttttttttttttttttttttttttttagtatacaaaatatttcattttttattttcatgaataattgtcattaatacagcagaaaccgatatgattataaaagataccaaaaaatcagaagaatgttagcattcaatagaaattaaaacctgagctgagggctcattagagtctgacacttggcaccattctcatggaagtgaagaaacatgtttgccggactccttaaaacaattcatgtaacacagaaagagttaaatttcaaaggagctacaatgtactgacacattacgactcttgttgttgacaaacatttaagcagggctatccaaagctcacagtcttgaaggcagggaggtgtgtaaattgtaggtttttaattaagcagtaagcaagctgagatttttcttggtaaaatagtttgtttattcatgtagatctaaaaggctggctcagtttgtcagagcacaggagaatgccagaagaggtcaagggcatggggatgtatcgacatgaatccatcccaacttgtggaaaacaaacgacacagcagttaccatcacaaagaactctattagtaggaatagaagacttgaggtccaattcagttctcatttggattctatagtatctctaagaatttggttaaaaaaaacaaaacaaacaaaacaaaaaaagggaaatccttactcctttcattaacaactgtccacaaggagaagaaataaaagacaactaatatagataggccttactgattaaaaatctgtgagcttgaatacattttaatatgttgaatctagagtgataaaccaatggttaatatactacaaaactttacaaacaaaatctcatctgttgcagaacttcaaaagtagtggaattgatttcttctcccttttaatttttcttccacaaaagtcctaaaactgagtagtcattggcatgcct

SEQ ID NO: 158897 - DNA, 1000 bp, Homo Sapiens
gaattccggtcctcctccaaatacaacaccctggtaaaaaaaactacagttctgggaacctcacaggtgacctcccctgaggaatgctcagacaaggggaagaggctaactcacataaaacagcaaacccctatgatttacagtggaagaaatacctacctacttatggtagattacagtacctagcacagtgccttgtcggtagaaaatgcttaataataaatgcatggctgcttttttagcctgacgttcaacccttttgtaccaaaggaataaaaaataggtaacctgatacttgcccacctgtcagggaattttctgtccttaacaaagatgaaggcaaaataatgatgaactctatcatctttttctaaaagccatgacagaccattacccttatgtttacatttgccttcaacactgccatccgctacaaatttttccctagtgttataatttctaccttcattattttacaactgtttattatttagactgtatgctttttaataatatatgggaaaacattattttcattagtaagatgactccaaattatagagaggatgagtagcttttgaattttctgcaggcaaaatataaattcttgatacatttcaattcttagatcaaagtatttgcatatcttccccaatcaaggtgttccattcactttttgatgtttatcaccatcacttcttatctgagacttatggttcattttgaggctcttagcatcctttatcctcttattttctcaaatgcatattcaaattaggtaaaaggaaataagggtaaatttttaaaagatggtttaaaatggttttcagactttgtaattcctgttgccttttaatatataagggaatgtatccatataaagaacatttcaatgatcaatgcagaaataatgtatttgtcttaaaaaagaaactttcaagaaagggacaatgaatcaggtagttcattatttggagaagtaatacagactataaacatc

SEQ ID NO: 158898 - DNA, 1000 bp, Homo Sapiens
tcagaaagaaagaagtcaaattttatttgtttgtagatgacatgatctgtgaagaaaatcacagtcaaccaaaatacaactggaactaataaacatattcagtgtatttgcagaatagaataatagcaccaaaaattagttgaatttccatacattaacattaaataattttaaaataaaattaaaaaccacttccatttgctaaagagcttaaagtaagaaatatttaggaataaacatataaaggtgagaagtttgtaccttgaaatctacaaacattgatcaaaatgattaaaaacatataaatacacatacaatccatactgattggaaaaattagtattgctcaatgattatataaccgaatgtgatttagattcaacacaatactcatagaaatccccataactttttgttaaagaaacaaaaaacaggccagtcacggtggctcacgcccataatctcagcacttcgggaggtagaggtgggtgaatcataagatcagaaaatcgagaccatccaggctaacacagcgaaacccagtctctactaaaaatacaaaaaattatccaggtgtggtggcatgcacctgtagtcccagctagtcaggagactgaggcaggaggatcgcttgaacctgggaggcggaggttgtagtgagtcaagatcatgccactgcactccaacctggatgacagagcaagagactccatctcaaaaacaaaaacaaaaaaaagaaaaaagaaagaaagaatagaaatgaaaacacaggctgggaaaagtggctcccgtctgttggccaggctgttctcaaactcttaacctccagtgacctaccagtcttggcctctcaaagtgctggcattgcaggcgtgagccacagtgcccagcccagtcctcttaacataaacagtttaatgtcaattaatgcttaaactcaatgttaagtcaactcaaactcaggtcagtgctcatttaactgtaatgtcaattaatgctt

SEQ ID NO: 158899 - DNA, 1000 bp, Homo Sapiens
ggggcggaagatcggaggtctttatttccggttaccacccctccccctcgattcaaacacagtgatataaaaggaatagaaacaaaaaaaatcaggccatgagaataccaattaaccctctcccaccccatccccccaatcactcccaaatcaggacacacgattgatgtttgatgtttatccccgactcctcctgttaccctctctgtccaggactctggtcttccctgaagcctccaccaactggtgggagaaaggaaactggaccttggagaacttcctgtgtagcaacttggttctccgagaacaggtggggtaggggacaccaggtaggctgccatcaccccctgtcccttccagccttcttcatggccccatttagccttccaaatgcaacatggtcagacagtgcccaacactatggtccctctggcctctcattctcaccgctccagcctctgtaagactgccagcccttgaaggccctaatgccaaagtaaccattgctcccaggctacagttccttcctttggcagatgtccctggccagggcccccaacctctacgcacccctgacctggagttaggggtagaggtttggggcagggtagtttatccacccctcactcaaggtgggcaatcagcaccatcatgataactccccccagcagccccagcacctccagaagtgattgcaatggtgatgcctccctcagcagctcgggcaacacagacactgttgctacgtagataaagccacctgcagtaaatggcaggacccagccaggacctgcaccacctgcaatttcactgtccactgctcctccttcagtgagaagggcacagctgtgcctgccagtgcccctactgctgtcagtagttgcagacgcatcgcctgctttttggtgcagccagactggaccaagatggcaaagtccccgacctcgtggggcacttcatgtagcaggacagtcattgtggtcaggatccctagtccccg

SEQ ID NO: 158900 - DNA, 1000 bp, Homo Sapiens
tttttttcagagagaaagtgctttatcagccgggctcagccccgcacacggactcgccaggagtaggtggtcagcacgcgctgctggcggcgcaccacgcaggtgtaggtgccctcattgacggcgttggcgatgatgctcaggtgcgcctcgcccagggccaggtagccggggtaggagaactccaggggctcctggtccttgtaccagtacactttccctttcttgtggaggatcttctggccgcagcggaaggtcacgttcctgccctcgggcaccagcctggttttggtcctggggggcggtggggtggtggccaccgtggggaaggggaattcgtagcagaagtcgcagctgctggggcagagcctcttcatgagccgccggcgagcgtcgcagaagcccctccgcgcccaggacgcgcacacgaacagcctgtcgaggcatccgtagagccggtgcagcccccacagctcgtcctgggacaacgccttccagccgcgcagcgtggcgttcaggtgcatgagcgcccggccgtgttgtgagtgcatcaggcccagcgcgtggccgatctcgtgggccgccacgtgcaccaggtccgtgagccacacgcctttcttccagctgtagcgcgtggggcccaggacccagtactcgctgtcgtcgaagtggatgccgccgtgcggggggaagaaggcgtgggccagctcccccgtggggccgtcgaagcagtggtgcagcgcggagaccaggcagtccgtgtggttgatcgggtagaagcctatccggaggtcgctgggctgctcgggggccacctcgcggaagctgaagggggacacgtcgctccacatgcggaaggcggcagctagggcccgccgcgtctcccgcgggctcagcaggttccgcgggaaggagaggatcctgtaggtgaggttgaagtggtcccagcgcagcctggctggagtcagcgtgtagcggcgtctgcggggggccagtgggc

SEQ ID NO: 158901 - DNA, 1000 bp, Homo Sapiens
ttttttttttttttttttttttttttttttaatcttcattgttttaattctgaagcataacgtgccacagggaaagtgagtttctttactgtttgccagcagcaaggacaaaaagtgaatggtgggggcccaggagctcccagcttggagagaaggcccttccagacccaggaacccggggtttggggcaggaggcaggaaggatgggagggtgtgaacaccgacacacacacacacgttctctctcttcagggaagggttttccagaagcatttgcccatactctgaatgaagtattttcatgccaagccaaacctcctgaagagaagtgaattcatggctgagggagccacgtgccctggctggggatgcacctgaacgctgctcttcagcaagtgagttcatagcatccaccagagcttcccagctcctcaagctgaagacaggctgaacaaaaaccaggcaggccatgaggggattcaaagaaacctaataggattgggtgcggtggctcacacctgtaatcccagcactttgggaggccgaggcgggcggatcacttgagaccaggagttcaagaccagcctggccaacatggagaaaccccatctcttctaaaaatacaaaaattaactgggtgtggtggcgggcatctgtaatcccacctactcaggaggctgaggtgagagaatcgcttgagcccgggaggtggaggttgcagtgagccgcgatcgtgccactgcaccccagcctgggcaacaaagcgagactgtgtcaaaaacaaacaaacatacaaaaaccaaagaaactaaacagacccaggtttcacctgcggtcctgggccagcccacgggaggggggcactgcgcctgcctcccagagctgaagggagagggagagggtgggtgagtctccccctcactgctctggctctgatgctcacctctaaggggccacacgcagcttcggaggccgtgccctaggtttcatttagtcttgc

SEQ ID NO: 158902 - DNA, 1000 bp, Homo Sapiens
tttttttttttttttttttttccaaaagtgttcttttatttctagtaacatatattgtataaatactctattttatatgcacttccacaaaagcgatataatttaaaagtttttttcattagaaataaatgtataaaaataaatatgttattataggcatttattactaactatagtccttcttggaaggaacacccaaaccaatacttataaagtacatgtaatttatagtaacatattttactatatacatatggaaaaaatcatattctcacagaagagctgaacagacattcaccaggatacgactgttggaccagctgctggagatggacctgctacccctcagcagcctccccaccacaagacaagtgatctcaatgtccccaaacctgtgggaccctgttctacacacctcatttttgttccggcgtttcatcctccttgtgtgattgtactgattttcatgagacacaagttacttctttacatccatattcccaaagcagggttacatggtaggaaagaaaggaagttggaggtactaagctcattgtgtctcctctagcttttaccagcatctaatgcttcactgctttttttccattgtagactttaatgcacttgaataaatacatggagttgttttttcctcaaaatgaattacacaaataaagactgagatggtccaaaaaaggaaagaggaagccatttgcgttatttcacgttgctgagcctttctctcatgttgaacaatctgaagttttaattctcggtagaaataatgtataaacattctctgaaaccatagcagccataaacagtgctggtcaaagatcctatttgtactcctttctccccccattgttagtgaggtaaagtaaaacaggtcttagtaaaatctcacttttctcctacttttcatttcccaacccccatgatactaagtatttgataagtaccaggaaacaggggttgtaatagttctaactttttttga

SEQ ID NO: 158903 - DNA, 1000 bp, Homo Sapiens
atactttttaagcttttttattcttgaaaagttcaaagatatacaaagatagactatgcaggataatgagcccccacatactccgcatctcttgtctgtaattatcagctcgtggctacctctacctctcccctctacctcttgtctcatctctacctctccccctgacccctgcctctgggtcattttgcagcaaatcccaaatgcctatatcatttatcctaaatattccataaacattccactatgtagctctgaaagataaggacgcttacaacacaactgcaatatcttttttgtttgtttgtttgtttttgtaaagacggggatttcgccacgttgcccaggctggtctcgaactcctgagctcaagcgattctcccacctcagcctgccaagtagctgggattacaggcatgtgccactgtgcccagccaagtgcagcatcttatcacacctttaaaaattaataattccaatcatcctatagttgatcagtgttcaaatttccaattgcctcataaaaagatcatttcttaacattttgttttgttgcaattggttgctgtaagtcacctaaatatcttctcttttttatactttttattgtagtaaaataggtataacatacaatttgccattttaaccattttaagtgtttaactcagtggtgttaattacattcacaatgtgtagccatcaccactatttagttcaaaaatttcaagtctcctttattttcctttttttttttttttttttttaattttagggactaggttttgctatgttgcccaggctggccttaaactcctggcctcaaggtgatccttctgtcccggcctcccgagcagctgggaccagaggcgtgcaccgtcacacccagcttcaagtctcttattataaagttctggccacgcacagtggctcgcaactgtaatctcagcactttcggaggccaaggcggtcagatcacctgaggtcaggagttcgagaccag

SEQ ID NO: 158904 - DNA, 1000 bp, Homo Sapiens
tttttttcagacacaggagcatcactctgtttctttattggaaatccgaacaccccagccgccttcgcaagtctctccaaccactcctaccagcaccccgcggcccacgcggtcttggctctcacccacgcctgcccgagggcggcccccggcctaggctccaggcaacgctcaggcctaggcaccccattctgcaccccacactgcccagaggaccggcacagagcagatcctgggcctcaggttgtgatgaatttccagctttggggcaaaaacaggcatcctctgttctctgtcatacatgtggtggctgcccctgggagtctgatcaggtctgaaggccagcgtctttgatctcctcaggttgaggtactgcaatgatttcatttctctggagaagccactcagggtgtcaatctggttgtctcgaagatgcaaggtggtgagattgctcagatcctccaagccttccaccttcttcagcatgttttgggccaggtagaggttcttcagcttaggaagattgattcccagggtgctttccagctggttcccccgaagctccactgtgtgcaggctgatcaacttctcggggtccagacctgtcaccatgtggatgctgttccctttgagattcagggtttcaagacgaggatgagagatgccttcagtgtcagtaatctggttataagcaaaactagcaatctgcaggtagggcagttcattcatctgggcacttcgcagccgattgccatcagccttgagccagagcaggtgggtgaggtagttgagtggagacaggtctgtcaggtggttctcagaaatatccacatagcgcagatggatgtaggagcgcagcaagtagatgtctgtcaggtccctctctttaacctccagcttgacataagcatgagccagcccattgcctgtcttacagagcagagaaagcccttccttcatcatgtcctccgtgaggggggtgggcagccattcctcaggg

SEQ ID NO: 158905 - DNA, 1000 bp, Homo Sapiens
aaactggtttccaaagtttattaaaaatcaaagaatagaaaaactttacataaaaatatgtcaattttagcttccatattgttgtccacacacaaaaaaatcgaaacatgatatctttttgtcaaacctgtagcacgcgaccacagtggtagccaggccaattcatttgcttcaccatgacggaaatggaacatggtacctgtgtctatgaatcgagttttaaaatgcacaccccacgggacacgcactgccagacccgtagtggtttccttaatgtgggtttacagtcaatattgctaatgcgtagagattagtacaggcctacagatcagtttttataaatattctttatcaataggttcacaatttaaatattttaaatatttttgataactttcggtcatcgagaactgcagacacagtgtgctactctattctggaatgcctcctagagaacctgcagtcgcagctgacagctcccaatgacagagtgagccagtcctgcttcaaaagggcagaccgcagacattttaaagcttgtccttgctgggcgtcgatcacattcagagatcaatctagaactccccactgctgcacatgcatcagatgtcatggtaataagtatcttgtcttgacattctccactagtggacttcaaagaccaacctacctgtagtgtttagcaagaccagacccccgttttaaaaacaggaagtcagatggcctacaagatgcaaccaactcccaggacaactgtggtgctccaaaaactcagggttaggcaggatggatatattcttgttcaaaaaaaggtaacaaagacagtggttgttgtggcagaatacacttgcatagtatacctgtatgcttccgacgtcgggcgccagcggtcccggccccaacgctgggctgtgctctcctgcgacacgatccgttaaaacactccccacggcgcactgggcagctgaagcacttctcctagatttgctcttaacagaac

SEQ ID NO: 158906 - DNA, 1000 bp, Homo Sapiens
ttctagaagttatttatgtttaatgcttaaaagtctgaattcacaaacaatctaccattatagaagtactggtggtcaatacaatgcattagaactatgtacaacgcacagtttagtatcaaaatctttctacactgtagagttttacgaaactgttaatgacatcaaacactaagcacttaagacaccatttttttttttctgctaccacattaggaacgtcaatggacagtccatttcaacttgcagcatccatccatttctagtatgaaattaagtaattttctacttatacaataaagtatatctacacggttcttttgattttgatccatagcagcaaaggcactgtacatcagcagatccacagacttaaaagatttttaaagcattcaaacaaaaaataataaaaaaagaagtcacatattatagtttaacagcaacaacaacaacataaaagataacacaatgtttctggcacaatggcacagcctgtgtccatttcagggacatccaactaagacatggaaagaaccggaggtaaagaaagcaagtcctcatcccaggagagagtccattctttgtgtttttcagagggaggtctctgcaaaccctcctctgctgtccttgttttgtaaaagacttaacttgcacagcagtgggagtcctccccataactgtgcagctcccaaagagcatgccacaaaataacccataatttctcataacaacaaaactgactaaagatatatatatctccttttgcaaagaaatgtggcaaaaatatccagaagggagtaagttctctctttgaggccaaatttaatttgttcatctgcctataatacaacaaaaaaagggaactaaaaacatattacaaagacacttgtcaacgagtcaaaaaaagaaaaaaagtccaattacttttatcgaatataatctaaagctatagatatattggttaacgttgtctaaatagatccaaatgagtatgagttgg

SEQ ID NO: 158907 - DNA, 1000 bp, Homo Sapiens
tttttttttttttttttttttttttttgcttgtctgaaactttttccttttaatatggtttacattctatctccagagaaaacacacttaacagaagacagaaaacatttaacaaatccaaagcaattaaaaatagccacaaaaaaagagaataacctagactgacagctcacagagcaaggaggtggcagagacctgcccaggtgagcttggctgttgcccccagctcaatcttcctcctctcctctctctgtcccttcacctctgatcagtcccagcctgattcccgttccctgatgcctcaccttcttgctgccagatgcctctaggaactagggtccttcagactccagatgccctgacctgggccttaggacatcttgacttccccagtggacagctggacagtgccctgctctcacccacagctgggaccctgaccatgccatgaggcccctgtgtggaagtggtgtaggggtggggatggtagcactgagtggtacagattctatcttggccctcatcatgggggaactctcccaatgccaccacaggacgtatgagttgtagccagcagagtgccccagtggtgccaggtgacagtcccccggaatacattagtgcatttgctaagactccatgtgttctcttgggcctcacagaacatgggctttgagggtgggagccaagaggcagacttgggagtgcccgaggccttgttctgaaacacctggggggctgacacccccactaccctcacacccctaccaccagtttccccaccagcgatgatggtagctactcagccagtgggctcctatatgcggttacacgtcagaatggcctgggaggcaggtgccagtaattatccctatattacccatgagaaactgaggaacacagatgttaagtaagttgctcaaggtgatcagccagcaagggtcagagcgaacgggattggtaacatctcctcatgtgaaacaggctgttatcatattca

SEQ ID NO: 158908 - DNA, 1000 bp, Homo Sapiens
tttttttttttttttttttttttttttttttttttttttttttttacaaattttttacttttttctctcctaaaatttctgaacatacagtacaagtatgagctgccttgcaggagaggcagtcttgcagccccagcttcatccagacacatgatgcctatgttcctctgggatgacagagaaaggggaaggaaatgggaggcactccagcatgaggagcaggaattcacacacgggcctccaaatgcccaactgtcccagtgcctgaggtgtcccctgactcagctgagagagttcaacaggtccctaggcccagctcctacatggaggggcaaatccaggcttcccctaggctgggaagagctcatggttggatcctcttgcggtataggtaggcattgctcacctggttcataatgaccaagctggtgaggacagggcataatacagccaggtaccaggctgcaccagtgacagaggcagtgaaccagagtgagcacatgcccagcaagaggctggcactacccagcaggtagcccaccagcccagaagtagcatggtatagcttgagcttcgccaggggccatcggggcagcagcttggggtagagcagccccaccccacctgagcactgcagccctgcccacagcacagccagcagccctgcctgcccatgccgcgtaaccaggtgggctttgccaagctgctctttgtggaggatgacaaggccgaggcccagcagtgcacacagcagggccagcagctgcagcacccagtggcagcgtgctcggcctttccgtgagagggagtgcagcagcgaactctcaggagaaaacaccagtagtgcctcggtcatcaggaaggagaaagccaaagacataagcaccgggtgccaggagaacaggctggagccaggcctggcaagcacagccacaaagatggtaaagcccagggccacaaggtgggcggcagcgccagaagcagtacgcagagctcggta

SEQ ID NO: 158909 - DNA, 1000 bp, Homo Sapiens
tttttttttttttttttttttttttttttttttttttttttttttttttttttttttttttttttttttttttttttttttttgtcattcctcagagaactgctttattgatactgcgagcctgggcttggctgcccactcaagtggtcctgtagaaaatacctgggagctggagctgttctggtccagaagcagtcaccgccacagcagagggaaacaaatcctgacaggaacagtctttctggggatgggcagggatgtgcagccccaggtcggctcctgcatttgctgggcccccagaacatttttggcaaatccttgccttggctcagggctctcggcaaccagtttcagatgtgagggccggcccaggagctgtggcatcagtgtccctgcagccacttgcttggggctgccagctgatgtacattcttacctcagatgagggcctggactggccgatgcctcagaggctccgggcctggcatagtggttgtctggagttggaaccaggtagcaagagtcctgggtagtgttggcgagaaacagcagaaggccatggaaagccccagcaggccttcttccctctcctcagagcagtcaggtgccctggagtagctgagaggatgtcaaggggggcttgggaggggaggtgccacactcaaggtggtctggagttacagcgtcgggggagctgcctcgaaggtgattagactggattctggggcagcccccttccctgggggtgtgggagctttgtctgagggcagggggctgtccaccttggccccagactcctcttcatcatcatccatgctgggccagatggactggtcttccactctcttcagccgctcattgagtgccttcagggccagttgccttctccgctcggcgtcttgagggtctgtgcctggcaggctgatggtgatggaggatggggcacccacatcgtagcgcttcaccgtcttctggcatatctttaccttcaccaggaggc

SEQ ID NO: 158910 - DNA, 1000 bp, Homo Sapiens
tttttttttttttttttttaagcatatagatttattaaaaataatgctaatataatcctgggcacatggattccaagagagattttgcagcagatttcattatagttacttaacagctaaataataagggtgtatttaacttacttacagagtcactaaataatggaggggaaaggaaagagtagggctaatccagtagagactgaagctggtatcaaccttccctaagcatctgtctggtccgcagcctggggcaaagcttgtctctaaagggttaatgaggccccaaagtgatttttgcactgagctcctcctgcacctaccaaggtgccaaaggcatgagattcagaagagagcagaaccagtttattaaactgttcaaattggtaaaaatgattaaaagctaaagatttccataaacactattccaaaatgttaattttaaaaatgtgactagcaatgtatgcattccctttatgtcccctccctccctatctcttaaaataaatttgaacacccagtgtaaaaaacacttgagggagaaccagaagtcagccatttgagaagagagtggagagggagcagacggcggggagcagatgccggccccgctcgggctgctgacgcaggcttcagtggcactaaatcccccagtaaggcatcaggtgtcgggactccttctcatagacgtcgggaactatgccataaggtgtctgtaccattttaactgtcgacttcccaaagagctggcgctcgtagtctatcagttgcctccagaagcctacgttgggcctgatgacaggtcgccgggctttcacccagttgtatgcctccagcaggcacacgttgtggaatttcatcaggtacgcgatacacagcgtggctgagcggctcacccctgcagcacagtgcaccaaggtggccccgtgcttcctgctcacactgtggatcttgtcagccacggtgtcaaagtacagtccaatgggggcatgcggcatgt

SEQ ID NO: 158911 - DNA, 724 bp, Homo Sapiens
ttttttttttttttttttataatgagttctttttaaaccatgtcatacattccccatcctgatatcgcatgatccattataatataggcagggggatttactattggtggggcgtgccagaccctcccttgcttcagccagacagttcaacctggagttccttgttcctgcgcacctccgcagcatgcctctccttttcctgcagacgttcaataatagcagctagattagcctcacggttttccttaatttgttccattttcaggatcagcttttcctccgccatcttgctgaagttgttgttctcctccaaagccttctgaaggacttctcgctcgtgttccctcttctctgccaattgtttcagcacctgggcctcctgagactttcttctttcctctgcagcctccagtttcttctggatctcctccagggacaggtctttcttctttggagaagctaaagttcgtggggcttctgagataggagatggtggcttcaagatcagctcaaaagcctggccagaggcacgtttgttgatttgcttcacttccatatcatcgtaagtatagatgttgatgttgcgaggttccgggtaaaagcaagagcagatcagtgacagcatggacagctccttcattttttccttgtaggccattgctgttttagccattgtagggatgtgcagacgctgagcagtggcgaaggcaaagggtccggctac

SEQ ID NO: 158912 - DNA, 1000 bp, Homo Sapiens
tttttttttttttttttaaaatataatatatatttataattccgggccctcaaaagcaatcatggtagttaagaaccaagttttgagtcattaggatagaggccaactttaaacatctccagtgagatggaattaggaaactggcattagaaccccacacagttacttgacaatcacctttaaaacgttaagttctttcggacacgcaggaatcaggctagatcatccctcgggctctgtggagtggctggcaccacctgcggctgctggggaaggcggctggcggggagcggcccgttcctccctcgcaggccttgctcctgcctgcccacctggcacagcggggaccggccactcgcccttgctcccatgggctccacccgcctggcttcccgcctgcagctgactagaattccatccgtgagaaacacttaacgtcactgaaaaagaaatccatgcgatttggtttaagcgccagtttcttctagaacctgatatttcagttacaaatcattgaagctcctttttaaaaagaaaatttgactccctcgtaatcaactactttatgtgaagaaaaaaggcattgttaacaatggctcaaaactgttcttgcaacacgtgaggcagcctcagtcccgcttctagctggcgaaggccttgccggcatcctccttgcctctgtaccttctcttcccatgtgtgaacgggatgtaccggtacttaatcatgtgcttgatttgcctcttcatcgtgatacagaagagcatgatgaagtacatcaccagaatcggccagaacaccgggacgttgaaagcgtcgaagaaagtacagaccatagccacaaggatgcccttggtagccgcatgccttcaagtggggagagaaggttagcgccgcatctgcagccagcaccgggcactgccggccgcctccagccttgcagctgcaccgaccgtccccgcaaacagaagcatcccaaaatttaaactctgggagcctt

SEQ ID NO: 158913 - DNA, 1000 bp, Homo Sapiens
ttttttttttttttttctttttttttttttagaggataaaagcttttatttaacagattccttctcagacaaattatggcaagcactggagcataaattccttcgtggtattccttcgtggtctcctagatactgctggtagttcaataaatacccttggaggccaaatcaggactgttttacaaaatgtgctgggcatattagtggtacataagatgattttagctagttcacagatgtacatttgtttcaatagttgaatattgaacatttaaaaatatatataaaaaaaaataactagaacatcacactcttgatttcatggacataactgccaagaaaagtgagggtagcatatttacagtaattcaccacaaagcccactcacaggtatgaagaccagggatgctcaccagtacccagaggaccagatgattgatgggttctaccacgagcatctaatagcgactgctgcagaactggtgtggaaaaggtttctattttataaaagaaagtatccagaaggctaaaggcagttgtggaatttatttcttcccagtgctctgattgtcaaaatttgaataaagctcagtgaaaggaggacagtaattaatgacttgatagccaaacatcgtaatgatgatttagtgatatactagactggatgaaagagaggtcactgtcttttcactatggattcatcataaacagtatcattcttctcaggaagaaacttatttttagaactatattttaataaatttctcacattctaatatttaatttttattttttaaattttattacctgctaggtatgatgtgtaaaatgattttccatttatagtaatggtatagtttcctttttataaaaggtttataaagtttatgtaaaaagtcaacttaaaaataccaagttaattcagtcagttcaaaaagttttgaataattaaacttggaaagtcactgcaataaagccaaagcaagttaatggtcataat

SEQ ID NO: 158914 - DNA, 1000 bp, Homo Sapiens
agaaaaaccaagtgtctttattcctcgatcgtttagtatggcggtgggcggcgcccgcgcgggggagcctggagcccagggaatcgacctggagggccagtggagggagcggagggtgcgaggatcggctcctccgcaggccggccctggaggggttcttgggggatcgcgccaggccaaaagtctgcatgggcggccccgagcctccctgagccggcgcgccccgggcgtggggagaggccgctctgggcgcggtgccgctgcgggcccgggtgcggcgctcgcccagggctaggtgccccgtctcaggcgagaccccaggagcccgccgcccccgctgtctcttcagccgacgtagacacgtcgggcgggaccccagtctacgcgtgttcaagctctgggtccccatagagcagggccccgctgaagatggtgagcggctcctccgagtgcgccagctgccccatgaccaggtcgacgcagaccgtgtccccggcctgcagcggcaggatgaggctgaagacgcccagggtgcccgggctgggctggctctcggccaccggcttattctccaggccctcaggctcgtagccaccggagtctacgcgggccacgccctggttggagcgggacagcacggcctccactttctcgtgccggtgcccagtcagcaccgcgctcagcaagtagcgtccagccagtggcgctgtgaacacgcctgtctctggatcataatagcctccatcattgagcaggactctgtcgaaggggaccgtgcctggttcagaccggggcaaactcagagcagctgaaaatgccacttggggcacaggggctgctggtgccccctccactccctgttccccttgaggacctggtggcccgatggggccctcttgcccgtccttgcctggtgatcctggaggtccagcagggcctgggggtccctgcagcccaggaggccctgggggcccagcctctcctgcaggcccagtgaggt

SEQ ID NO: 158915 - DNA, 1000 bp, Homo Sapiens
ttttttttttttttttttttttgagcatctgaaatcttttattggaagatcattgctgtttgccaaatagaagacacagacagcagacgaacagtgaaaacagagcccagtgacgagagccggccccttggctggggaccctccccaactacctggtagaccagcctggtgacctctgcccttccccggacccccgggcctttggcataatgctgatggggggctgcaggcagtgaagccccttgactcaaagcagagacttgaatgggcgctggagagtggagacagtggagaggccagggagggctgggcgggccccccaggctgggccgagcagcgcaagtagaggaagtcaggagcgggcgagatggcatctatctgttttctgaaaaggggcacataggggcctggaagcaggtggcggtggtagctggggcaggtcacacactgacatccttctcatcgcccgtcttgggaacagcttccagtaatgggtccccaggacctgcctcctctccctccttggcctcgctggccttagagttggggacccagaggccagagtcaatgcagcgctgcatgtggtactttgcgtcggtggggtccatcttgctgatggcgtcctgcagcatctgcacgtccttcacatcgaagcacttctggagttcctcagggagggactcgtagacctcgacggggtccaggccgccggggccgagccgcttcttgcgctcctcctcctcgtactccttcatggccttctcgatgcgcagcttggcacggccccgcacacgctccttgaaggcttccagctcgtcgttgaagccctccatgtactggcgatcggctgtcttaatcttagtgaagaactgccggaagcaggcccgggggtccacctttaggctcttggccagctccaggataaattgcatgacgattgtctggtgggccacctgctccatgagtgcacatttctcctccacctctaggtcaatgcacc

SEQ ID NO: 158916 - DNA, 1000 bp, Homo Sapiens
ttttttttttttttttttttttttttcacacaaatcatcggcatttatttcctgggtcctaggtgtcacttatcctggtggacagggcagaggtggtcagatcgttttgagccaaaatcccttccctaaaaatggatctgtggagctccatgagggaacctcagagatgcacaatgacagtttagctaaaatggcttaaaaaatgtgaattgattgtcagctctctccatatctgctgaaaaaaggtttaaaatttttaaaaagtttaaaagtgttttctaaaaaagggacaagcaggtctggacccagaagattgggctggagaggaggtgttggtgttgggacagggtccctgcccgggccgctcgcgagaggagcgttcctgtgtgggctgctcactgtagggcaggccccgcccaagtcccggcgccagctcaataaataacatcttgtggttacagtgtcttgaaagtgtacctgggcacggtgcgaaggtggtgggaatgtgaagcctgtgggtgtgggcagagggctttcccggagtggaggccacagaggcctctggggagccttctcagtctggcctggtttatctgggacatggagctcagagaagaggctgctgggccagtgccagggttccccctctgggaggggacagaaggtctctcgtccagccttcttggacaaggtcagattcaagacgaggtggtcccatcgctgctctggggctggttgccagcttccttgtctggggcgcttccctccacctgtccttctgccccctcgagtgccagctcgcccatgtctccagccagcttcctcacgctcacagcctctgagtctccctggatgtcagggaccgcattccgacggcctgtccggtcacaggagatgaagtccgagtaggaggactcgacctccatcatgcctgtcgcatcgctcctcaggcctggtttaatttctttttcctgcttgcatctcttcagattttccactg

SEQ ID NO: 158917 - DNA, 1000 bp, Homo Sapiens
ttttttgggctgcactcccccaataaaatcctccctcgttttgctttattttattctgtgaaaataagccttattataaatcacaatgaaatccacaaaccaaaccccaaactctctagcaaaacaagacccccttgatgtataaagtcatcgctgacagacagtctttttcagttattgcttttgtcgcttgtttcttgagaacatgactccaataaggctcatggctgccaagcccattcctgcaacgcttgcagcgatgatgacatctctgacctggtcactgcgggcgactccatagcgcagctcattcacaaagtgctcgcagttctcactggtcagcttgtagagcacctcctgccccaccagctcctccgcccgctggatgattttcgtgcagggcagcggcgagtacttgtcatcatgtttgttgttgacctggtacttgtcactcccggccacatcatacagcaattccttcttcacgatggccttgtcagtcagggcggacatgacactggctgcaccagctcctgcgacctcacttggaggggccagatgaaccacatatccatcgccaacatagatggcccagtgtctgtagaaagggcgaaaaatctcaatcaggtctccaggcttaggctctggaatgggcgcacgcatcttcctcgcggtgtggaccctcaaggccaggctcgatttcgctgcgtagatgtctgaggcagggggagcagggatttattgtcattaacaaggaaactgcgtctccagaccccacgggactgcggcttctgttgggcagggcgtgagaggcgcgcctcggaccccaggaacaaccacctcgctccctttaacaactttctcgccgggcccgcgggcgcccaggaggctgcaggtgccagcgggcggctcggcaggctagtctacacccgccctacccaattagatctcttcctcgcggaaggggagaagcatcccaggcacctcgcccggccttatc

SEQ ID NO: 158918 - DNA, 1000 bp, Homo Sapiens
taccagaaaataaagccattttattatgatttttttctctgccatgtggctgggaatgggaggtgagtggatgggtgtgaatggctgaccctgctggaggccctgcggggctctacttggcctggactgtctcctccagcctgtccaagcgcttctggagctcctgcaccgtggcctggagcttccgcatctcctcctccagccgagacacggcatccgagctgggagtgccactggcctctggtgctgccctcctgcgcccggtgtccaggccccggttgaccctcagctcccggctctttgggggtacgtagccatccttgagggagatgaggaggggcccagcatcccgaccccccagccactcctcagccgtgagggcagggtcgggccctgcggtgggtgggtacaggtcctcctggaacaggtccgactttcgaggcactgtcatggcaatgggctcacacctccgctcgtgcagcttgtagaacctggcgatctcacacttgttcacctccaggccacgtttgggcatgtagcccatgccccgctgggactccttggaactgaacatggagagatagtgcaggaaaggggcctcggaagtgatctcaaagtaccggattgagctgtcacccttgccacagaggtagacgatgttggtgtcagggtcaaagaagggcagcaggacaccgctgctggtgtccagctcctgcagggacagcggctcctccaggtgctttgtgtcccacagcgccacctgccgctcactcatgcggctgaagcccgtggtcaggatcttcccctccgacacgaacactgcacgcacgggccgggtcccctcgtggggacggtccttctcagctacgacagtgcctttgcggggctcgatgatgcgcacgcgcttgtcacggcaggaggtacaaatgaggcctccatctcggctccagtccacactgtagatcgtgtctgggtgcacctctgggcccagtgtcagcat

SEQ ID NO: 158919 - DNA, 1000 bp, Homo Sapiens
aaactaaaacatttggaggtaaagaatgtttctccttttgctttaggaagtgactaggtttctagaaatgctgtttctttttttttttcctacctcaggacagcctttgtcactgaggatttctagggttagggcttcacaggaagcgtctccttgaacccagagtggttgggttgggcttctggcagtgccaccgagtactcagttgtggcaaaaagcagggtgtccagggtggtctcagtacacttggcgatgaagcgaatgaaaggcctcacgtcgccctcgttggcagcttccaacacgtggtagtagtcggaccgctgctccttgcggatggtgatgggcgggtagcccgcctgcatgaggatgaggttcatgagcagacgggaggtcctcccgttgccatcaatgaaagggtggatgtaaacgagtttataatgggctaaggctgcaaactccactgggtgcaggttcatggcttcctcggagttgagccactgtacaaactcctgcatctgcttttccacatcctgcggatggggagggatgtggtgtccgaccaggacctgtgttgtccgaaacctgccggcttccacggggtccacgtagcccagcacccgcctgtggatctccagcacgtcgctgatggtgacggagccgatgcgcgaaaccagagtcgtgttgatgtacttcatggctgcatgcatgcctatgacctcgttctgctcctccaggctcttcccgggcacggcgtagcgggtctccaggatgtgcctgatttccgagagggtgagggtgttgccctcgatggccactgtgtggtagatgtgatggtagtaggtctcctccatgaccctgcgcagagctgagttccccttggggatggacatgaccttcttcactttgctgtcgatgatgctgaaatacctctggtcgatctcttccacaagaggcagtgtccgatcgcggttgaccagtgctttctcatggtagggtgaga

SEQ ID NO: 158920 - DNA, 1000 bp, Homo Sapiens
ccttcctcaagaccagcccctgataattgaatagatagtttttggagaaaatgacttagagcctgtcagtacagtcagcaacctccttgtccctgcatatttgaactttccaaaaataacagaatgctccaaggtacttgtctgcagctcctgacaaatctccaggcagtcccagcagattttactctgcctgctgctttgtattcaccttctcacagatccaaaggtaggaagggccctgtggcaggagcacatccatgtcccttcctgatgctccttgggggagactggtggcttcgtgcttggaaaaaataggggcttcctgcagctagggacatagctagctgcttccttctccctcatggagaagagacaggtaagatggcaatcccctggaagtctcagtccttagaagaaaagagttctaatacattcccataaaacatttcaaacatgcaaagagaaaaatccaaaacaggagtgaggacagaatagagtgagttggaagagagcctaaatatcgtgctcaagtgagaaacatccacgcaagtgcctgcttcaatgccatgttttcaatgagcatattaacagggcttcctaaaaagggaagcgactacactgtttccaaccacagaatctaagctgccttctttatcaccaaacagctttaagatgcttacctaactcaaactatcactagtataaagtagtttgaaggcccctctacttcaataaatacttaaataatagctagatcaactcagctcatacattttcaaaatattggccaaaacagcaaatgcatatatatcagtgcatctgtcccttccagcagttaacacaattgtacaaactcagtgtgctgcatttaaaggaacatttgaaaaggatgatgcagacctgaaggtgggaggtcctgcctcctcgtgtgttcttactgagggtggcagaaagtaagtttcctcttccccacccagagtttgggcatgtgagcctattc

SEQ ID NO: 158921 - DNA, 1000 bp, Homo Sapiens
ttaactgagactttgtcttaaaagttcatctatttgagttttgtacatattttttacatcttcgagatctaatcgaagttcttctgcctcttctgctttttctccatacatctgcagaatagtgttgtacctttgatccaaatctcttagctgagttctaagtttgggtatctccttcaccttctcttcaagttcatcattttgatttgttaatttaactagttcttcagccattattgatcgagttttttctagattgccaatttctagctgtaaatgagtgatttccccttcccttagctttagctgagactgtaggttttcaatatgcttgatcctgctcccatccttacaggcagcataaagatgcttccatttggctgatataggcattggtccaaatgagtgatcatgagactcatcctgagacagaaaagatgtctgtagtcctgccatatcaacaccacttattgaacttgagcgtgacatggtgggagtgctagaaacagaaaatggcttgcgttccttttcttttattgtttcttgagtaaaaatggctttcttcctttcttgttcaactttcattctttccatttctaactgactattcaacaatgtcttttctttcctcgtctcttcaagtgttcttacatattcatcttttaggttttccaattcaacctggtacctattgttctcatcctccagtttacacagcctatttttctctgattctagctgggcttgaaatctactgttttcctgtcttaaaagagaattctgtgactccatggaagacatctgaattttgttagcaaggagttcttctgtagctgcacgttctctctcaactgctgctgccagcaaggtctgggattcaccaagcctatcagaaagattcttctctaatttctcccacgacgatgtctgggatcccagggttgcttgcaaattttctatttgtcgaagcaatggtcttgttgttgatgaaacactttga

SEQ ID NO: 158922 - DNA, 1000 bp, Homo Sapiens
tcacattgcctgtggcctgctgggaacatttgggcagcaagatggaaacgtgctgtgaatctgctccatgacctccgtgagatccgtgctggtgtcgtgcggtggggccagcaggtcctctcccgctgcctggtggaactgtgggccggaggcatctggatcaagcgagtagctcagtgcagaatgctgaggagaagcccatggggaaacaccattgattcgggaatcagattcaggctgctccagcagctgtcggaggcggtggagctgagactccagctgtttattgtgatcttctaaaatctgcatcctagcctccagccgacctttgtgctgcctgaggagttttgcttctgctataagttctgaatcctcagacgtgtgatggggagatataatcgactctggcggtgaaccgacagggagcccccttcggaggtgctggtccttcagctgctcatactccacctgtagatttctttgttcttcctccaggtcagcaatgatcctctccagttctccacgttcttccctctctactgacttcaggatctgagctgggctctgcggctggctcactggggactctcctccgagtgtttggcaatactgctggatgagggcgtgctcgtcttccacacttcctgtggtggagctgctatcagtgagaaaagacccattagtcctttccatctgggccagtcgtgtggcatattgttctattcttgaatgggtgtcatcatgaaacagttgaggagattgtgaggggtcatagtgctctggccacatactgatgagtgtgataggagtctctaagttgtcaccttcaagaactgtctggacaggcaggtaaccaagtcgagggtgtttggcaaagtacttcttcgacctgaacttgttcttaagtacctttgtgaagtctcgtacatcttccccagatgttgtaggtatacaatattccaccattgggtaatgtaatttgtgaccttttgctgttcga

SEQ ID NO: 158923 - DNA, 1000 bp, Homo Sapiens
tttttttttttttccattttgacccaacgtttattgtccttttacaacatgtcattttttggtttagaaactgcttgtgattagttttccaacattaactcaaaagcatgtaaaataaatcaacctactctctatataaacatccagcaactgtggcccctacccacctacccaggttggatagggggaagggagggctcgggcagcattgagtcaagtgcagatgctttactgtggcaggtggcagtagtgccttggttcacaccccacacaggtcccctgcactgccccaaactacaacagaaatggcataggcccaaggcccaattccctgttggtaattcactctccgcctaccaaatgaaaatcgcttttattttatcgcttttgttttgtatttttgcaacagaaaccccctgtccagagtcagactgtagctgaactgttcagactggagaatggagcaggctgtgggcgcacccctggtccctctcctgggcaagcgccccacccccagggaacaaggtccaggcaggccagctcactgcacgctggccaccaccacttagccatacaggtcatcatcattgtcttctgtgtatacactgccacctgtgccgcctccactgccctgactggggccagctccaccctggttccctgaagggaatctgaagctgccaaagccccgactctgctgaagggtctgggcaaacatctcatacttccgaatgtcattgtcactgacagaacggcgcgcaaagcgcatggcttcttcaaagtgatctcgacggatctcaggcactggatcatcctcttctacctccatggctgatgggtttgtctgcctctctcgttctcgcctaatctcactctcgatggattcacggatggccagcttgcaagcacgctggcaaatctctgtcaggtcagctccagagaagccattagtcattttagccaggaactccaagtccacatccttggcaactggggactt

SEQ ID NO: 158924 - DNA, 1000 bp, Homo Sapiens
tttttttttttttttttgcagtttcaacacattttattatatttctgtatgcattactctcaaaacatcacaagaaatgatcaaaccacttaaaaccttcaaataaaaaatctgaaacagtttatgcccacaattgtacatatttatagttaagaaacattctttataaatattgtttcctctgtagcaagttaataccataatttaattacaaatggataaatatggtaacgggtatttacagaaggaagggtgttattacggaaaaagctaacggcacgacgtttatttttcccccacaatctttcatacaggaactaacaaattgaacttgcaaaagcactaaaacatcacatgtaaacccagctaacagaaaaatacattcacaagcgttgttggtggtggtgtgtatgtgtgtgctatgggtcaatgtgctgaagaaacagaagggagactttggcacggctcattttttccagtctatagttacatgaagtttacaatcaggttgcctcataaaaaggaacacaatattcaataccacaatacaaaataaaccattttcttccacattacttaaaaagaaaccgggtaaactaaaaagagaaaagagaaagcccatcactttagggaagggaaggggcggaaggcggggaggaacgcaatccggagttttacaaatggacaaacttctatacaccaaaaagcctttaaaaccacctcggaggagaaaggaggagtccgctatgtacacagtttgtcagaagactgggaacagggtgggaaagaacgtgggcatggagattagcagggaggtttggttcaacatttttgtgggtttttatttttttattttttatttgttttatattttcagcttcaaagactccggaagggatatttttgctcttcatgcctagattattattaaaaaaaaaaaaaaaactttaaaaaatccttctgctggtaaaattttcatcatcataaaaatcagattcat

SEQ ID NO: 158925 - DNA, 1000 bp, Homo Sapiens
acagcatgtgaaatagtggctgtttattgaaggtgttttgcatgtggctctgggctgcagactctaagttagatgtcttcagatgctttcaagcctttagcatttctcagatcctcacccacctgtcctgagtcggcatgtccgggactctctccacttctaccatgttcctagttactctccggcgtggagtctctgatgtctaacgaaggcagagctgcaccggaaggccttcccacactcgctgcattcgtagggtttcacgcctgtgtggattctctgatgctgactaagggatgagctctggttaaacgctttaccacactcattacactcataaggtttttctccggtgtggattatatgatgccgaatgagggctgagctctcactgaagaatttcccacattcattacatttatatggcttctccccggtgtgggtcttttggtggattatgagattggtactctggctgaaggccttcccacactcgctgcacttgtagggtttctccccagtgtgagtcctctgatggtttgtgaggtttgcactctggctgaaggccttcccacacgcggcacatctgtagggcttctccccggtgtgaatcctctggtgctgaatgaacgctgcgcagtaactgaaggccttcccacactcgctgcacttgtagggcttctccccggtgtgagtcctctgatggttcgtgaggtttgcactgtgacggaaggccttcccacagtcgctgcattcgtagggcttctctccggtatgaattctctgatgctgaacaagagctgagcagtcactgaaggctttctcacactcgctgcatctgtagggcttctctccggtgtgggttcgctggtgtttggtgaggttggcattctggctgaaggctcttccacattcactgcacttgtaaggcttctctccagtgtgaatcctctggtgctgaatgagagatgagctctggctgaaggccttcccacattca

SEQ ID NO: 158926 - DNA, 1000 bp, Homo Sapiens
tttttttttttttttttttacatttgtgaccagttaactttaattttcaaaataaatctgcagtattttgcatgttagtaatacagtgctggtattgacaggtaaaatcatcatctgcttacatagaaaccttcattcaggagcacaccgtaggaggggaacggatacacaataaaaagcaaacgcaggccaagcagcgagccctagagcgtaacaggctggatgtcagatttaaggattatctaatacaactgtttagctgccaatctgataaaggggaagctctcaaccaggttacaaccagaagggaaaaacgtactctgccttttcgtagagcagtggctgtcgtgccttcaacacctggttgaatcagttcatcaacatcgaaactcaattccagttccaagacacagaatttcatcacacaacctattcggtaccccttttcagtggcccacccaaaaccccctcctgccatcgactctctccctcccaaaagaagacatgacgtggctttattattgcagacaagcttcttaagtgaataaagaatgcatacaaaatagtattttaactgaagtcatacaatgaagtctcactcctgtttattatacaatgaattgataaaacaattacttctagtatatatctttttttttttagaactaatactttcagggttctgacaaccacattctagcttaggggtagggcccacacctgcccccactgaggactgctccttggaccactgtggaggaagcctgggctgtctgaattgtgaattatgactgccagcccaccagagataacagatcccagcaggcagagccagaacccagttttgggtctgcatgccaggaaatgtgaacttcctccaaatgtggccactgtgcctcccaatccaggcctcagcaaggtcattcttgggctttccctacacgagtccttccagtagtccacacataatgctctacatattaaaaacaaaccatttttg

SEQ ID NO: 158927 - DNA, 1000 bp, Homo Sapiens
tttttttttttttttttttagtgtctcaaaaatcagtaaaactttattcgcttccattctttcgccattaacagaaaactggagaaagcaaaaatgtttcgtgtttacaaagataaacggcctctttacccagagatcaaaacctcaaacgacaagggggaagataaaaccgccctcccccacatcccctgagctgacccttgtcatcttagacaaagccttcagtccactggccagggaccctgtatatggccaattcaagaagagggccaagaaatcagacccatccattcccgtgatataaagttgaacagaagctacaccaagggtcaagtgtctgtattttacaggacacagtaaccaggcggctacttataaaaaaaaacaagattcatttcaggcacaacttttttatttttttttgttttgtttttaaatcagtaaaagaaaccgggtcctagaagctgcagtgatctaagcagcagcaagtttgtgcattcattttttttgtttttgtttaaatatgtttaaattatcacactgctggcactcctcatttgcatgaaattctgcaccatacttactaattgtagtaaagttaccccccaacccacgaaaaaaaacctactctggaagaaaattttcactgaaatataaccaaacttctttaagtggattgtgacaagattataaatgatatgaaaaataacattttaaaatttggccatcaactttaagaaatggtttgcctatacaaatttttgtaatttttaaaagataatatattctaccctcatatggtcctcagaattaaagcataatgaacaggaagaaaaaggaaaagaatgcaactgagtgctaaggcagaacatcttgccagaagtaattaatgaaggtagagtatataatgaaaagtgcagaatttcatagggccaacaagataacagtctatatttttcacttacacaggcaaagtggattctgcaattaccagttgcgt

SEQ ID NO: 158928 - DNA, 1000 bp, Homo Sapiens
agggagagtaaagttattttattaaatcatgcacgtcacgtgtgttagtgcaaatagtttaatctgtactccagaaattctattgtactttatatctttacaaaatagatttaaaacaattatttactttaaaaaatgtaattctgaagttaagcatttcagaacaatatttgcaataacctatatacaagaggtactgggtaccactggcatattagcattctgtggtggagtggcttcctgcaacagaaaatgatgaaatgaactatatgacagtattttctacaagtcatttgtgactaattcctccataaatctagtgatcttcccaaaagcaatctcaaatagcttaaaatataacctttaaagtataaacagtgactgccaaacatcacaaggcaaattataccctaaactcctatttcaatatttggctagacctgtggattgccacagaacattcaagccaattcactgacattccctcccggtcttcactgactgaaaaatttaactatgtgatactttaggatattctatgacctaaataaactttattgacataactatgatgccgcacaaaaccatggctaaactttcacttgtgttttaaatttataatatcaagcagtgtttttaggtgcttcattgtgcatagaacactattaatcttgggaatagtgcttttcattaacagaaagtcccaattaacaacaataaaaagaaaataaccatttgcatacccaaccaggaaatttgttggtaggtacaacgctcaccctgaacatgaattagctctgacacatcataaaccaaattaggtcaatacaagcttatctaaagagatattaatactttcttcaattaaacatgcttggaggaatagatgatagaaaaaaaaaatcatgcttcctaaaatgctgtatatgagaaagtaacttggcttttaaagaaaaatatctctttaaatacatggtttaataaattacattccaattga

SEQ ID NO: 158929 - DNA, 1000 bp, Homo Sapiens
ttttttttttaacagtgttatagtttataaggttttaaaaggaggaaataaaataggatatatggttttattttcatttaaaaaaaatatatatctgtttaaaggcacagaaaaaagttcagaggtatacttacaccaaggcattaaaagtggttatttggggcatcagaattttggttgatttaaatttcttttctgcttattttgtattttcatatgacatgaggaatgttaatatgcataacatgtactcctcacaaaagagtagtaaagctaaaaagagaaagcagtgccaggtagacaaaatgtctctttcaacactggctgaccctggatattatactggtaacaagatgatagactctgtgttctaccatgttcctgctgtgacagctgcatggcataaagagacagagatgctctacttccaggattccttgaatgtacttagagtcttcttcctagtgggtctgaccaccttcttagtctgggctaagagctggccgacattcagcagcagcaggaaccccaggcagacaatggctgggatacaggtgcttagtgactctttcagagctgccaaggtgaagatagcccccatcatgagcagaatcaagaacaagttactgatctcttgcagcatcggtgggcccatgaccagcagcaacccagccagcagttccagaaagcccacagctatttggtagttcaggggatctggctggtagccaaataccttcagcgggaacacctcagcaaactgcacgaacagggcattctgtctgacattctttgtgctgtgtatgtggtttgcaagaagtggccttggtctgtgtgacgggtttgcatgatatgcctttgttctttaaaagcctggaaggctgggaagattgggaagatggaaatttcatagcatcttcctgtgtactttcatcttgaatgatctttgctgcctctttagtaactgcaccttttaaaacactgttagtgttccctgtag

SEQ ID NO: 158930 - DNA, 1000 bp, Homo Sapiens
ttttttttttttttttttttttttttacaaacgccagttggttccttttttaattacatttaaaaaagacaaaggcatggagctgtatggatgacacaccttgaccactgacgaggaagatttcactcagccacgtctcagtggagtctcagaggggagggtttccacacagcacggtgccaagggcagtcttgacgctgtcatagacaatgacatgcaagccccagccctggctcgtggttcaggtggccctccaacactgagctgtcccgggacgcctgccgggctcgctgagggcagggccgggacttgctcaggttgctgggtgttcatgaaggaggatcgggtctgccagatcaaactccaccctgcagcaattagcaaggaccaggccctggtcttgcttgaggcttccactgctggccctgggttctcggcttttcgttgtcgatgactcctacgctggcctctgaaatactccctgtgtcttagttcaggggtgaagacacggaatatctttattgtcgagaaaaaattaactttgcacaaaaggaggtgctcatcagagagcttttcaatgagacccccaatgtgttccactagaggccctgctcagcccagcccgtgtcctcccagcgtgggcccaccctgctcattacgtacattgaccaagacccttcaacctcgtcccgaccccagcacgggtgttctttgccacactcttgttctagtgttttcggatcaagatgtcccagctgtctttccagcgaagggccttgagttcatgtggcgagagtgacttgtccccgtaggtgagtgggcgcagcgtgttggacacgtggcacgcggaggagtaccaggccaccaccagggcgctgaaagaattcctctggagctgggacctgcacaggtggtcgctgatgtgctgcaggaccacagggagcagaaggatttggaaggtgagtgcgggcaggtagtggtagaggaagagtgtcttctc

SEQ ID NO: 158931 - DNA, 711 bp, Homo Sapiens
tttttaaataaatgtattaagcttttattaggttagaaaaaattctaagatggttagtatatcttagttacaagtgatgatcttttttcctttagccttttaaaatcaatatatggaagacatgcaatgctaagttcttcttttgtacatcctgtaagacaacacttttctgaatatcctctgcgttttctttggggatgatgcccccaaaacaaattgcttaaggttttaattttgtttctacgtttcttctgaaattttgcattctcatgaatatatacattgatattatgtgatgaagaaaattctcttgtcttaccaaggggtgaatatccctttttatccttatactcaggtagtgactgcatttcccaactgtttactgcttcttcccaagaagtagacactgggtttgtgcctcttccccgggccggggaagcggtttgcgggctttcgaactggtatgggctgtaggcttcgaccttctccgaggcctgtgcaatcaaccgtgagaaaggggtttcctcctcgaaacggaactggctccagttggcatggccgcagagtttttctatttctttcaccaagtacctgccgcacagcttcctggcactgctgatgtcgctcagttcacgagaaaaccgaaccagcaggagtccaagccacagcagggacaagcggaggagccgcggcatccctgtgaccccaggc

SEQ ID NO: 158932 - DNA, 1000 bp, Homo Sapiens
tttttttgcagaggctaaagtcatgtttattgggagatgaggacatgccatgaccactagtgtgtctatgggggagggggtgcaaggactagttcctgacacccccctagggactcattcctggatgtagaggttgctgggagcagtaggatcatccactgggcgtgtctccaccactacaggcctgtaatcccagctactcgggaggctgaggcaggagaattgcttgaacctgggaggaggaggttgcagtgaggcgagatcgtgccactgcactccagcctgggggagccaagcagacggaaagtgagggtagggtctctcagctcctgtagcagctgatccgagcctagagcccacacctgcactccatgcttccagaaggcctgaagctgacctccaaccatagccacggcctccaccgcttcggtcatggggatctcaggtgtgcgaagtccccggactggggacccctccggggtcaccagcttcacagagccatccatcaacaccatcaccatatcttcctctacctgggtcacctgcacgggtcccctgtgctcggtgctcatctcgcccagccagcaagagagcgcgccaaagcgcaccgtgtggaagagcaccgacttccccggccgcccggggctcacgccgatgcacacagcgggcagctcagagcctggcccggtcagcagcgcgaacacggacagaggcgtcggcagtgggaacagcacctgccggacaagcaggaatttgttcatgggctggtaccactgaagcaggacaacggacgtctccaatgcaccgcacaggaacgggcccccagagctcgcaccctccgccacacagcacgcccggcagcctttggtgtcctggatcttggtggaaaccatgttcttccttgccagtaggcggtgggggctaatgtgagcgatggggtttcctgctctggtctctttccgttccagcaggccaaggatgctatgagaatacaggtggg

SEQ ID NO: 158933 - DNA, 1000 bp, Homo Sapiens
tttttttttttttttttttttttttttttttttttttgactgttcatggccatctttattcccagtgctggctatcccaagatactgccaggccacagccaacccccacctctgccaatgtgactgggtcaccaccccatacaccagagcagccttgagccctgccccaccccctgccctgcggaagccaagtccccagctataagaccctgcccctcctggtggcccaggaccctcaaagatgcacacaggggccccagcgaggggcccctccgtcattagccttctcctccaggctgggctgccaagcagcctggagctgagtctgtcccttggacgctgggccacgtcaccttctcctccagaaggcttcacctatgggcccaggaagtcctccttccgatagcccttcgcccggaagtcacggtggagcttgttgtactgccacaggttggccaggaggctggatgctgcccgggaggacttctcactgtcggggctgtcccgcttcttcttgatgaagatgagctttcggagtccgtcaaaatacagcaggtctcgggcagcgatggggctggccaccaccaggttgttgagcacagctatgatgttgaccagcacctcggctgggggcgacttctcacccacgctgcccggcagcttctcgatcaggtggctcaccaccttcgtggacatctcgtccttgttcctagcgttccgagacaggtttcggatgaggccagtcagtgagcgcagctggtggtggtcggcggtcctgacacggtctagcagggggttcagaatacgctcctgctccagggccaggcggctcagcacccccgcccacctgcggtcgcctgccgtgatgttctgcagcgccccggcggccgcctccgtcgtgtgccggttgagctcgcagcgctgcagcagccggttgtacagccccacgatctgggggctccacagccactcgaggcccttggggtccttggacacctcc

SEQ ID NO: 158934 - DNA, 1000 bp, Homo Sapiens
ggtgggagggaggcagccggcaggactggggaggggagggagggattggcctcccctgccagctgctcggccccggctttattgtgagcaggagcagccgcagcgactctccacatgctggccctcctgggggctcagtccccagtaggctcccccaggctgagccccagccctaacactgatgcttggcagcgaccacacctcagggggcccttctcaggacttgtgctggtggctcctggggccttctggctttttgggcggtggggccgctgtcctcggggcatccagggcctgcctccggatgagctcggcgtatagcccgcctttcttcaggagctcttcatgtgtcccagcctcccagacacggccatcggccatgacgacaatgcagtgggccccacggacagtgctgagccggtgggcaattaccagcaccgtgcggcctgcactggcccggtccagggcctcctgtacaacccgctcggactctgcatccagcgcgctggtagcttcatccagtatcagcaccgtgggctgcttgataagggctcgggcgatggccaggcgctgcttctggcccccagacagggtagtgccccgttcaccgacgaccgtgttgtagccctcggggaaactggtgatgaactcgtgagcattcgcttcccgggcggctgtgtacacctcttcatcggaagcttccagcttcccaaagcggatgttttccatgatggtcgtcccaaacaggacgggctcctggctgatgaaaccgacaacctggccccggagccaggaggggtcaagggtgcgcaggtcccgcccatccagcatcaccacgcctgccgtggggtcgtagaagcgctccagcagggaagccacggtggtctttcctccgccagactggcccacgagggccacgatcttgccagggggcagcgtcagggtgaagtctttcagcacctcgaagccggggcggcaggggtagctgaagcagacgttc

SEQ ID NO: 158935 - DNA, 1000 bp, Homo Sapiens
ttttttcagcaatctgaatttttttatttttttgagacagtgtctcggtctgtcatcaggctggagtgtagcggcacgctctgctcactgcagcctcaacctcctgggctcaagtgagcctcctcttatcagagcagctgggaccgcaggcacatgctactatgcccggttcattttattactatttgtagagaaggggtctccctactttgcccaggctggtcttgaacttctaggctcaattgatcctcctacagtggcctcccaaggtgatgagcttacagtcggattacaggtgtgagccactgtgcctggccagtctgcatttttttgagacagggttttgctctgtcatccaggctggaatgcagtggtgcaatctcagctcactgcaacctccacctcctgggctcaagcgatccatccaccctagccacctgagcaggtgggattccaggcacataaagacgggttttgccatgtttcccaagctggtcttgaactcctgagctcaagtgatccacctgcctcagcctcccaaagcgctgggattacaggtgtgagccaccgcacctggcctgcatttttaacaagcagcccaactgctgtgcagttggggcagaacctcagatcacaatcagaaaaccacgctcctggacagtggttctcaaaatagtctctagaccagcaacaacagcatcacctggaaacttgctagaaatgttaacgttcttggtctcccccaaaacctattgaaccagaaacgctgaggcgagatctggcaatctgattgcatgagccctccaggtgattctgattcatgttaaagtctgtgaatcacaggcctgagaaaaggtacaatttcaaatcagaagtaaagggacaaagttcttccagctcctatggactagtcttcagttcccatcgacacactgacgctggatccagctcctgctgtgggcagtgcatgttggcactgcagggaggagaaggccccaga

SEQ ID NO: 158936 - DNA, 1000 bp, Homo Sapiens
gctgcttaaaaaatgcattaatgttactgctttattcacactaattagaatacatacacaaaaaatgtgtatcatatatcactttcaaaaatttccatgttccatgagaactatgtaaacaatgcaaaatgtttccactacgtaacaaaagaaaatcagcattcccacatagtattaggaaaatatttggataatctgaatttatagtaaaacaaagtgatctgaatttgtagtaaaacaaagtgaaatattacaaagcagtcttgtcatgaagtagccttatataactcagaagcaacacatttcatactttcaaacactttggtataagtgaaattaatagaaaacaaaaagaagaagaaaaaaacctctactttggttttcacattattggaacttcagcaacaaggcaagtgcacagctaccttggatgacaaaatggaaaacctctcatctgcttgcttctcctcctggaaatggacgtgctaggagagcgcttcccaggacttcttgaaaataaggtgcatctcacttctttccacaatcaggctctcagcaatcgtttgagggatttataaaacctcagattcagttgggatatgagtgatcttgattatttcctcttaacaaatataaatgaccttgcattaaggcagctcagaagtacaattcacattttaagtagaacataaatctcttaaaaatcatattactatagtttctcaacaagttcatacttgaataaaaagaacatactgcattaataaaaagaaaaatccaagtttaatagcccactaacaatactttttaagaaacagaaataaccgtttacatgctacaaatatttcttcattgatatcacatataactttgacaactatacaactaaactgatctgtggaatttttcatggcatcatttttataattatgttttctcacctatactgtccaaatgtggtactgatttttttcactgtgttagttctgtgtcctgtctt

SEQ ID NO: 158937 - DNA, 1000 bp, Homo Sapiens
tttttttttttttttttttacaaaaacaaacaacaaaaaaaacccagtttattcatcttttagttcttccaaaattgaaaatatcaagtcctactgctaaggagaaaaaacaaacaaacataaaatccgggacccctccccccttcttctcttaaagtcacagagcacggaaggaactgcagtgggacaggtgggtgcagagaaccagaaggggaggatggcaagataaactccccaaatacttgaaaagctgttcaacagaaactgtgataaatacaggacaatgcaagacaaagttaaaataaggagcagcagtgccgagaggctgtgttgtagatatggcctcccttcctcttctcttttctcatcagggtattctaggcccaaggcatgacttgtcccttccagatctaaatgttgactcctttgagccttcctctacatttcactagaagcggtacatgaggcacaacctgatatatcttccttagatatatgagaaaaaaaagaagacagtggcaattttgccttctatcattgtaccatgtgtgcattgtatggagaaaataaccgagccagggagtatcactgcttcttatgtcttccaaggcagcagatatacctcagaatctgcacgaggcaggaaagcaggaaaactcagacgaaggcaccagcccaatctgcctcactggctcaagctgtatggtttatcacaaccattagcaaatttccgagaaccttgagtattgcaaagataaaacttagagatgtgcggaaggtcatggcagtagggtaggttggaggattgaatgtgctggtcaagaaccatgatacgggtaattaagggtcaccttgtaccactgtcttggaaatacagctttgagacaccaaataagatgtcagaagccatcaatgtcttggcagaaggtgacaggaagagagaagaatgaaacaatatttattaacagcgggagcctcctcctgtcttcaagaacacctc

SEQ ID NO: 158938 - DNA, 1000 bp, Homo Sapiens
ttttccaggttccatcaggtttttaattgtacatcagtgactgtgaaaaagcaattattcccataattaaaatacaaactataaaaaaacagactcaaagaaaagaaagatgacagagtgaaagaaggtacatttctttcgtgttcaaaccacggagttcacaacacagcagcacacacagctgggcgctttgtggtctcggcaccctcggcttccccttcacggggccgctttcgactagtagaaggctgggctagaacctggggtagagctgtggattcattttcctcagacagaagatcttgaaactttctcttcatgtcttcatcctgaagccacgggtgtcttaaggcttcttctgtcgtaaaacgtgcctttggatccactaccaacaacttcttgacaaggtccagagctttctctgagacttctgcccagacttcaggaatgaagttgtattttccactggtgatctgatccttcagtgacacttgagtcctatgctcagagaaaggtggatacccactaaggcagataaaaagaataactcctaaactccagcagtccacagcacggttatacccagcagtcccaacagaaacaagaacttcaggcgccaagtaggtgggggttccacataaggttctcatgagagaggtctctcccaaaatcttggagtgcccaaaatcagtaatctttataagacagtcctcttcttgagatgacagtaaaacattctctggctttaagtcacggtgtataataccgttttcatgaaggtactgcacagccaagagcatctggtaaaaatagagcttgcaggtagcttctttcaggcgtttattccccaccactttgtcaaacagctctcccccttccatcaattccaaaacaatataataatcttctgcatcaaaaaagtttttaatcttgatgatgcaaggatgatttagctttttcaaaatttctatttctgtttcaacattgagagctgggtctg

SEQ ID NO: 158939 - DNA, 1000 bp, Homo Sapiens
ttttttttttttttttttcataaaaaataaatcttttaattgctttgtaattggcacagatggtgtaattcaaactcacatttttatttaatagactctgaaatatcacactgtagctctcactgaaataatacaggaatcataatgtttaagtttacaaaagtacatttggcagcatcatgatgttttgaaagttacctgtaaaatcaaagactggggcttcaaaaaataagagaaaaagccatctggaaaataaaaaacaagccatactgaagccatttgtcatgactattagagaatggtgtttttgggttttttgaggatcttgctactttattaatgatccagaagagttgcacaattctggcttgtaaatacagtggggaagctgtaactatgcctggaaagtgctcctcaggacaaggaatgtcaaagccaggctttgttgaaaccatgtgcctgaaaaggctttgaaggaatctttcgtttcttaggagtaatgagattcactgggttttgatttaaaaaatcaccctaaagaggattatagtggaggagataatcattaaattctcatcactgtaggtcccagaggaaaaacgcaaagtcctgtctcttcaggatgatgtcagaaaggcccaagtcctccttatgttatcctttaatttcagggataaaacagagtggcagtgacacaagctctcactaccaaattaattttttttttaagagacaggctgtctctaaaaaagttggggggtattatctgcatattaaaaggttgctttaagaaatgtgacagcatctatgaagaacttcccaagagatcaaagccttcatggactattgggattttttttttttttttaaggcaggagtacagtggtgcaatcatagctcactgcagcctcaaactcctgggctcaagtgattcttccattcttccacctcagccaccatgcccagttaatttttaaatttttttgtagagacggggggt

SEQ ID NO: 158940 - DNA, 1000 bp, Homo Sapiens
ttttttttttttttttttaaacaggaccgataatttatgattttattgtctttcctttgtccggcctttaacatgtttctgtaatttaaataaaaatctatttactttctccattttagcaaatggtttctttacccaaataggttgcactatagtccccatatggttttctactgttccacaaccactatttcacaaagattgacaaaactttaataaaagttaaatttacagacatcttaagataacttgggaaatatgtagtaaaaaagaatcgagtccacaaattaagaatattttgctaatatgcccaacaccaatttcagcaaatccaatctacttaactcatatatttaatgtggtaatttttctaacaaaatttaatgggggtatgaatgatatatttatgcccttgacaaagatgacatgtgtgattttgttgtgactaagaaaggagagtatgatttctggtggttatgatatcactctggctcatcgaagctcacagaatatgtaaggttctgccacgtccaaagatgttaggcaaatgtaatagaaggcgcaccgggctgacacacgttttcatcatacaaatcttctggcagttcctcttcatctccatcaggaaaatatgtagggaatggtagatttttaccgagatccttatatgcaggcagtttagaatctttgacctttactaagcaatttttatgtccaggtacagagccatttacatagattatgttgtgctttgtgtttattctccacactttcagtccatattctgtcctgtatatgtttcccatttttccaggcattttagttccaggccagactctgccaatatcaccagttgcaacagctccaggtctcctgtgggttttcgtttgaccatgcgtagcaggctggcctttaaatccccatcttttcatgacaccttgaaaacctttaccaatagttttggctgtgacatccacatactgtcctggacgaaagtgag

SEQ ID NO: 158941 - DNA, 455 bp, Homo Sapiens
ctcagccagctgtgctttattgacaatgcgcccctcaggccttgaccgcgtacttccgcagcgggtacagccgctccttccgctgctgcttcttggtcttcaggttctcctcgtgcttgttgagccggcggcgcatggcacgtgtcttcttaggccgcaggtccaggggcttgtacttcttgcccttgtagaatttcctgaggttttctttctgagtctggttaataactgtgagaacacgggcaatggatttccggacgactcggatcttagagagcttggaggccgcaccgcctgtcactttggcgacgcgcagctgggacagctccaccttcaggtcgtccagctgtttcagcagctcctccttcttcttcccgcgaagatctcgagccttgatcttggccattgctgcacaagccgccaacgccgccgcccgctccgagggaaagaggaag

SEQ ID NO: 158942 - DNA, 1000 bp, Homo Sapiens
taaagtattttttcctggaatataattggtatatgtcttccactttccatcatgtatgtaaaatttcatagtaaaacttcctgatagtttcaataaagaaattatctgcaagttgtctaaagaaatactatatatcggtacacaccattccccaccattccccttctttttctcgtaaaatcagatcaggatgtttttatatcattgagtatcttagtttaaaacaatttaaaaaaaactatttttgttttgtaatatcttcaaaagaatgaaaggacaattttatgacaatactgcagacacagaatggctaacaaatatacaattttacataaaaaacatttagcacattctggtttatatcaaagtttagttgatacagtttatttgtcaaccctcagtctctctctgaatcaggactttcaaactcagctcaattacactgctactcaagtttcaaaaaaggtcctcagttgcttctggcagctaattttttctttagttttaaaatactctctcatgtcctttatcctctggtcaaattattttatttccttgactttaatgtggtttcctgatttgcattttcattctcccacccatttctaaagaaaaactgaggtccaaagttacattatataatttcattgaagaatatttggcacaggtgacgcaccatatgatcattacatctattaaaaagctatttgttcaaattttgtcataaaaatgtgaaaacattttattctatgtacaataatgtacacaaatttaaacaggtcaccaaagagaccagaagtaattaaagaggtatatttacagtagcacatcacagtaaacggaaaaccattcacagattcaacattgatactgtttttgtgcttggttacacactgaaggtgaaggatattactccattttggatgaactgaattttaaacaaatacctcaatcattaataaatgctattttcatcagtcagtatcatcattaaattctt

SEQ ID NO: 158943 - DNA, 1000 bp, Homo Sapiens
ttttttttttttttttttttttctgaagtagaaagagagatagggcaagagagagaagagatggaaggagggggagaggccaaagggtcggcattcccttcatccagccgggccagaagtatgggccattctcaaaaagccactgctctttggagccaagaggttcacagtggctcccttctgaggcagtggcagtgggctcacagcagctacactggaaccacagtgcacatgtggggatgtgggcagcctcctggatcactcagggacagtgtggactcagggcccactccctgctggggctctggacgggccttactggtgcataggagagggaaatgataagaggaaatggcttctgactaggcctttccaagcgcatctcatgttttcagcttagatgatttgatagcaggtgttgtaatcctgagggggaaatgggtgacgaggaacactgctactcaaagccaagatggccttatcaaaggcatacaacatgagccttgtgggcactgcctcaccaaccactggtggctggttgtgctggttttacttggctcaagggctgctgggaaggtttgctgcgacaaaggcctgcatggcctacagagaaacccatccatccgcaggtgggggtgtggcttgaaagacctgctcttagttcccttctttaccctcctgcttgacatggagatgaggctccaggagagagagtgtaatggagttagtaagagaccctcatgaagtttcttgaggcaaacccgcaggctcatccactcctcttctctcggcagggggtagtgtcaaagtgctttggttgtcacaagacccagacacctaggttcccagtttggctggcccaagagttcttcatgaggcaaaagaagtggcagctggtgtcctaggtagagagcagccatacagacaccacatgtgttcctcctggctccacacagacgtcgtgtccagcaacagtctgatccttgcggtaagctataca

SEQ ID NO: 158944 - DNA, 1000 bp, Homo Sapiens
tatgcacgagatcaactgtttattgatttttttcctcaaatactacacatgtaaaggaactgttaaactgaaaaagacttgacaatttttggtaaatccgtagcacagaaatgaggatttctgctggtaagttctcaggacagacacagacacaggtccactttccaagcaagacatctgctcactggaaacggagtgaatgcatagctggtgacggcggcgggcactgctgagtcacgtgaaacacaggttcccccacgttccccccacccccgccggcccgcgtggcccccgcgtaactctggctgcagcacctgctcccgggcgactccgggcagcccgagacactcgtgctgcgggtaagacccagcttctgtttgtgcacaagtaacacgacgactgaaatctgcaactactgcaaagacgcgggcacttttacagtgttctgctacggagccaggacaaaggccggtcagaagccggaccagcagtcagctggtgacgacgagcctccctccagcaggcaccacgtcagagaggccccaggcccactgagcccgggaggagacccagccggccagccagacgtgtgcctgaatgccacagacttcaagcagtttacaaacgaaactcactgttaaaagctgttaaatctcattaaaacagtagacgagtgctttagattctctgaatatcaaataatatatacagatagacactgagacatgacagtctaatctaaagcatctttacagatgcatttgcttgaaaagttagtcttctttttaactctgaatcagtgataaaattgttaatttgcaaaagagtacagttttaagcaagaatagagtgaaaataatttttaaatatggcgatttgggggagttctacctaaggttctatgtaaagcttccattcagatgcccaaaagcacaaagagcattcccaatagaaacccgaccataacccggtcccaccttcctggcataattcctttcct

SEQ ID NO: 158945 - DNA, 846 bp, Homo Sapiens
ttttttttttttttttttttcatctctatggtttattgtcactgaaataagaacactgattggggggagggtgggtgttgcaaattgcaaacctcaggtaacctgacctccaactttagagcccagagtacagagaggtgggccttgaagccaataaatacaaagcttcctctgccttgtaacaaaggcaggttggcatagggccctggagcctgactgcccaggcccactttgggatggggagcagctatcactcctctgctggcttcacttgcgtggcggcctctagctggcaaagtagctcatcccactgcacgaattgcttggagagaagcattgtagtcttgttgtattcctccaggagagccttggactcctcagtgatttccacacactggtcctgctgctgaatgtggatctgggccaagcgctgcaggcgggcagcatgctcaggaacggctttgatgtgagcactgtccagcatgggcaccaaggcattcacctgctccaggagtgcaacctgggaaaggataaactgctcctctgctaggatgaattgcagcttagaggcatcaggtatggcaatgcggtcgatgtactcaggatccaggtacttgatcagatcttcaatctttttgtagagaatcttcaccctctccctcttgctggaaatgttccccaaagccacctgcaccttgaccaggccgtcagccaccttccgtgagccgcgcgccccgcccggcccgtacacccagcgctccagctcttccactcgggcctgtagccgctgcaagtcagtcagacccgccatcgctactaccgacccacctcggccaggaaacagcc

SEQ ID NO: 158946 - DNA, 1000 bp, Homo Sapiens
ttttttttttttttttcactacgtaaagtttatttttatatatatatataaaaaaaagtataacactggagcctaaaaccattctcttttgtagaatacatattggcgttgaaacagtttaaagaaatgaaatggctatctacaaaaagttagttttgattgctgtcttcccccatactttgtgtcttcacacataaagaaaattttcaaagattttatattcagcaattttttaaaaagtacactgttttccactgctatggtctttataaaggacttgacttaaaatttcaaataaaaaagaattaaggttctaggataactcttgtgtcttttaagagcatctttatacagaacaatttggaccggcatgcaggcaacttcttttgttgttacatacctgtattaggaaaattacacccattttacagaaaaatcccaaaacatatactgcaataagctcaaaacaatgtgaaaaagaccagtgtgaatggcacacaaaaatcgcctctttataaattaactggaattcatgatcatgaagtaggcacagggaaatccagtcctcagggctttgctctctggaagaacacctttaagtaatttttaaaaactttagcatcaggctgctgaagcgcttgacaaaactcctgaattatttctggagctacttgcaaggagggcaggtattcttgttgaagatactgaacacattctgggccccgtttgagatgaattgttttcagtgtcactgcacactcagataaagccaatactgtttgtgcatctgccaggtcaaaggtttgttttaaaggtgctaggaaacatgcggggacaatgtgcttataaacaaaatcagcaaatcccactggtccatctttacctccccagagttctaccaactttgagaggatgataaaacatgttttctgtgcaattggatctggatattcaactgctccttggataacagtaaccaacactctttctacattctctg

SEQ ID NO: 158947 - DNA, 1000 bp, Homo Sapiens
ttttttttttttttttttttttgtttcaaccacaagtatttattgatggatcgaagatacaattttaatggaacaataaggcacaaccgtggattaaaacactttgctatacagccaaaaggggggaaaatctataaccttaggaactttatgccaatcaagaagcctctaaagtacctctctaatagatcagtatcagacattcttcccttttacataattcctatattacatcacttaatcataaaatctgactgatacttcataaagaattcctcattcatttatatttgagccatccagcctggctactcccctgttctccacccttttccatcactttgcagtggtattttttagcaatcttcaatagttttccaaagcaaggaaacaagcaagcaagcaatgagtcagaaagtcaaccaagggcagatgtgtggctaaatacactcatagagacatacattaggatagcaatagcctgattcactgaagtctaaactaagctgacttggcagaaaagttgctgtggctcgctcaaagatctgtaatgccaccttaggttgtgctactagtgccagacctcttgtttttaagggattagcagtggtctaaacaagaagccagggagctaatgtaaccaggcagctaatgacacaacagtcaatgctttggacatgtattaggagcagactatggcttccgtcattaacatttgccaagtgtaaaattcataaagaattttgcggctgagcacggtggctcatgcctgtaatcccagcactttgggaggccgaggcaggaggatcacctgaggtcaggagttcaagaccaacctggccaacatggtgaaactccctctccactaaaaatgcaaaaattacccaggtatggtggcacacgtctgtaatcccagctacttgggaggctgaggtgggagaattgcttgaacccaggaggcagaggttgcagtgagccaagatcacgccactgcactcca

SEQ ID NO: 158948 - DNA, 1000 bp, Homo Sapiens
tttttttttttttttgagataaggaacattttatttaaaaggtttgaattagcataggctgtaatctatgtctcacagctacaaagactagacaggccaggaaacaacccacattctaggcccagctcttccatgaacttgcagatgacctacaaaaatcattttatatgtgcttgccgttctctgtgttaatcagattatgcttactgaacgagcgaggttttcctccaataaaaatgcaacgtgaaggcacttttcaaaaataaaagaatgagggaagaaagaaaaacttggaactttttttctattttttgtataaacaaaattgcccaggtttatttgccacctccgcctcctccctgcctgctgctgtgtgcccttccacatgcagtcaggggagggcttctctggcctcctcagctgtaatctcctgggagtagaggtcagtgaagagagctggcagccagtagtgggcctcccctggggcctgtaagtccagccacgccaacccttccttcagcaggtgttccagcacttgccgcgctcgctcggtctcccatttaagactggctttgatctcactgacagtcacgtagccattcttctctgccagctgcagcaccacggtgtgatccatattgagctcagctggaacagactgaatgaggtaagtgccgcccacagggatgatgccgaagccagtgccaagtgcctttagtttcttgatggctctgatcaggtcatcttgactgacatcctgggcgaacttgccccttcccttcaacacctgttgatgtagttcctccaaagttatcagacctccattccgatgcttcagcgccaggcacacttcgataatttggacacctagttcgtaatagaagtcccccacgcccagcatctcagaccaaaatccttttccagaggccagcggatccacgccaatggttgcacacatgtcctggaactgcacacggaactcaggattcttccggatctc

SEQ ID NO: 158949 - DNA, 507 bp, Homo Sapiens
gaaagagttatgaccacattatttcaatgtcatggctttctgaaggaagttatcttcttatttattttctgccactgaattctagattaccagagtggttgctcctggggatgtcttgctggtctgtccctccggaagaatgatgatgcttcctgcaggctgacagaaggaaatcggggtagagagagttgacggtgtcctcgttggggtggtcgttgctgattttgaaaaggaggtgggggaggatggcggtgatggcctcctggttttggtggtctctgctgaggaccatcatcttggttaccactatcaccagggggtctaggtaggagtccttcaggaggaggtctctggggtccctgatctggtctctgacttgagtcctctacatctggtatggtgaaagtaaagtcttcatagttcacatcattatctgtgctctgagctgagctcagagccagaaggaccactgagagcaggaccagcagcatcttgaaggaggctctg

SEQ ID NO: 158950 - DNA, 1000 bp, Homo Sapiens
ttttttttttttttttttttttttttttttcaaggagaaacagcgtttattgtggaggggagctgggcggggctcagccctcggagaactggcagtacagccgccccagcctcggctccacccatagccggaacgggatctccaggatggcagagaagccttcagccagcgttggggcctcgaactgcttcctgtagccatacatgaccatgtctgacacggggatatgagaggagtccgtcatctctcgaaaccggttgttgtggcgcgcctgctccagagtggcggtgaagaggaagcagcggcaggggacgcccgcggctcgggcacactggacgtacctggcgcggctcgcggcgtctgggtttgtgttgtcgatggcgacccgtttcccttgcttcagggctgtctcacacgtggtcacacagcgctgccaggagcctagcgtgtccctgttcacgtggacatatccggccgacacgaggtgcttcttgagaaaggtggacttcccggccccagggaatcccactgcgacaaccacctccgggctggcgctcaggagggccctggactcggggaggcagagaggccctgagcgggagacagtcctcggatcaaaggctgggagctcgaagccggctgctggccacttgagaaagaactcctcaggcgtggcgaagggcaggccaaggttgagggcaaacaggcgatcggcgcaggagaagtctttcttcttccgccccggggcccagttggccgggcgtccggctgcgtctcccacaaagatgctgtccccgatggatatgggcgtgccgtcgttggcctgctcctgcagatggtcccacatgcccgtcaccggcttccggtacaagcctgcgtgcgtggccaccagcacctggaaggggacccccagcttctccaccacagcctccaccttggccttgaactcctcggctggcagcttcccgcgcccgatgctcatctggttggtgaagatcac

SEQ ID NO: 158951 - DNA, 1000 bp, Homo Sapiens
tttttttttttactttttgaaagtttcatttaggtgctatcatttaaaaaatcagaagatatcacttaagaatccagcattctagtttctttcgaaaaatcagaagatctggcaacactaggcccacattccggcatggcaacaaccagctagagcggtgctggctgttccccctctgtggggcttgtgctctggtttctgaagtcctaaccctcaccaggcccaactgccacctacgccagctgcatggcccctacactgtgtctctgcacgaggcagcccagcaggaaggaacaaaagtgggggtgatgagaggttgtcctgttcagccctccccactacccacaggcctgggcacgtgaaggaggtcagagtagggtgagcaggaaggcagggggggtcccggacaggacacaccccagcctctctctgatcactgtgcatggcaagcagcgtcccaggcaccccacgtgtcctggcccagcccaagcctgccttggcggccgggtggctgcaattgcgtagcttgctgtcttggtcctggccactccacatcctgtcagagctgggcccacgacctgaggccttgtcctgagcctgagcaatatggcctgtaggtacaggcttcctcactgtccatccagctcagctgaatgtgcaccagggtgtggcggtcttgtcacagtccaacatgatgttgaggacagtgcagggggccccgcccacagacagggcagtgcgggaagccacatggtacttcacagtgttcaggcctccctccctgtccaccttgaactgctcctgtttttgagctgcgatgcgcttctggtccctcttccgccaggctgggtcgtgcaggtggcgaaatgtcttgtacccagttgtgattcccgaggggcggaaaagctggagcccagctcccttaatgcgccggtagaactcgtcgtcctcgcggccccagccccagaagcggttggacatcccattgcacagccggtag

SEQ ID NO: 158952 - DNA, 1000 bp, Homo Sapiens
ttttttttttttttttcctttcacaaaatggatttttattgtggtcatacatggtttctcagtgccacagaaaattgctatgtagggacaaaaaatttttggatggctctgtaaagaaacatggtaggttttcagaaatgagttgtgcaggaatgtggttaatgaaaagcagaaagggttaagggaagagaaaggaagccaaggagtgtggtatgtacatcaaatgattactttttaagcccctctaggctctgataaccctttccccaagtcagatcccaacaaaattcatcagtaactgaagtgattgtgctaacagatacataaagactaccggagaaaagtgggttgagatgggctcagacttattgttaggacaactctgggagtcttgtgtctgtgccaaccacgtatccgtgggctacctggagatgagttctaacaaccagcacagaacccaaagctgctctccaacacctttgtttagtagggaaaacctgtagtggggacaagagaggaagctgtgcccttcccccaaccaccgtttcatcttctgctcgctgaccttgatgtgacttgagagctctccttgcttcggctgtgcagtccagaagccagaacttcctctaggaaacttttcgtgttgtgcactgtggtgcctcccaggacaatcctcactccaggagtggtgcggttcaggttataaactgttagagcctcttcataggtggctcctccaattacaaacacaatgatatcctgaggtctgtctctgagtgtgctggggcctaaataaggatataggttttccttaagccttcctttgatgagatgatccagggtttcatgtaggaaaggttgatgctgtgtatatacattttctactcccttcagtcctttgaggaattgtttggtgatagccacagcatctttggggctgaagaggtcacttcctctgactcgtttaccaccatattcaacaactgcagacacgagcttt

SEQ ID NO: 158953 - DNA, 1000 bp, Homo Sapiens
ttttttttttttttttttttttttttgaggaagcaatttctttaattttatcggaatccaggacacaacaagaaaaacacccaaaaaccacatggagacagaagacgagacacaactcctcccccactgcctccctgctctagagtggggacaaagtgggggtgagacagctggggggagacctgaacctcagtccagccctacaggctccaggcctgcagggaaggagggtaacggggaggcagggcccagccccccagtgtggggaaacagctgagggaaggcccccctcaaaaggctccacctcctcaccagcactcctgcccagggacagggagcccacagcagcaaggggaccccggggccatggccacattcatgactgagaagcagctgagtggaggcaggagacacgattatctgggcagaatcagttggggcaggggcctgggggggccccatgggccaaaccctgaggtcacaggagggggcccaaagcggggctagtgagtgaggtcctgagtgagtgggtcagcggctgggcccctttctccagctgcctgtagcccctccaatactgctgccaggggggcccgcctccagggaaatggataagaaagcagcctgcccctgctgcagacagagccaggtggctaaggccaggaaggaaggcccggccaggccttgccacctgcccccagaggcctgtgggaaaaggacaggtcaggaagggtggggacaggggctcgaccggctcagatccaagatggtgccacgcttgcttgctgagtcccccatgagctggggtactgcactggggccagcgactagttagacaggaggcagcagcttctcaagaaattccttcacagctgccatctcctgaggacaggagctgtgcatgacacccgggtatgtcttgaactggaccctggcaggtgtgacaacagaccggagcttctcagccgtcagggccccaaaccgtacgggcaccatgggg

SEQ ID NO: 158954 - DNA, 906 bp, Homo Sapiens
ttttttttttttttttttttttttttttttgctaaatgccctgtttattctgcaaacaaggcttagaaatgtatagacacaatttgtaggctgagaaatctctgtgtagttgtgacttccatacttccgcaaaagtagtaaggacagcgacttctgaacacattaacctaccactgttttgtttagagcgaacacagtgagaatggattcctaacggcctgtttctctaagtgatcgtcgcagttcgctgctctagtctttaagaacaagtggagccttcacttgagccgccacctccttgccattcagggcttcaacaattgcaagcgcaaactcgaagctggtcccaggcccccggcttgtaagaatcaggccgtctttttccacacgattctcagagtaggtgtaatgacctccattcatcattttgtctttagcaagagggtgtgttgtaactttacttccaaaacctatttcatgagccaacagagcagtaggacctgcacagatggcggctatcaggcccttccggttttcctgctccttcagtatctccttcacagcagcagactcagataaattctgtgcacccagattacctcctggtagaaccaccacatcatatggtccctctttttttgcatcttcaaggctggcatcaggacaaatgaccacatcacggctacactgtactgggtcttttccagccaggcctgcaacggtgaccttaatcccagctcgcctcatgacatctacagggatgaccgtctccatttcctctgctcctttagccaggatgaccagagctcttttggaagccatttttatgttatatgtttacaagcctgcaccccgcgcctcttcctgcggacgcggcgccccggcccgttgggtaccactcacccc

SEQ ID NO: 158955 - DNA, 1000 bp, Homo Sapiens
tttttttttttttttttttttttttttgttttttttaaaattaaaaagtctttatccaagtcaccaatgaaacaggattctgattcattaatcatgtcttgcccacttttttcaacaaacctgacggcctataatgagctatacagtgtgaggcatatttcatagcaacgttggttgattgccaaggagactctgccaccgttctggataagctcatgtttcccttttccttggctgctaatagaagggcaacttacagtgcagggtcaagagcaagaagctgggggagtagaggctatacatctagcctaataatagagatctgaggtggttaccaggagactacgttcttttgattccattcctcagcagcaaaagtacttgagttcaaatgataaaacttgaagttgtaggcttggaagagtatcagctcagtatatccttccttgcataaatacaagggaaaggccaaggaataatcagcattaacctgccaggtccaagggtcttctatccctgacttcatctgagtcacaagatttctctaataagagaaactttgctactctgaggaaaattatcccttatgggagcccccagttcagaggtaagaacagttctttcacatggaggtccaaaattctggacttctagaaacaagtgaagtgtgctaaagtctcctatttattgtttctcttccagtattgtgccatcgattcttgcataaaattctggaatgctggctcttcatggctttcctctgtaactctgtggtcaatgtcatcagtatcgctgtctgcttcctcatcctcttcatccaaggttcctcgagtcaggatcaaatcagaagggtgcagcacaggagataagctgtctttggcagtccctgcatccaaggctacagaacccatatcttttcgaaggcgttccagttgttctctctgctgttggctctctgcgttggccagtgattttttcagacgttcatattcaggacgat

SEQ ID NO: 158956 - DNA, 1000 bp, Homo Sapiens
aatatcattcaacattttatatcagaaaagatcagctttccaacatttattccatggaatgagtgcacagcattttcatgaactacctcagggctacatcagtacaaaatagtttaaattagtaaaataaagtagtttcaaagggaaatcattgacgacttcaggataagtgccaccaccatttgggaacagaggatagaaggtagccatgtggttattccatgatgcaggaatcaggtcggcaggtggactgtcattgctgtcttgcggcagctggcctctgccttcagggtaccaccgtctccaggacacaaatgggcagcagaaaaatgtcaccttgttgatgctcagcagctcatctattgggacaaaacttccatctcggccaagggaaatactctgttgagtgaccagcggggcccagcccccagccctatttatctcatcaatatggttcagggaagataaaaaagagtgttctatgggatagaaaggtgggaataagaaaaaactaagtggctgggcatggtgagtcacgcctgtaatcccaacactttgggaggccaaggtgggcggatcacgaggtcgagattgagaccatcctggccaacacagtgaaaccccgtctctactaaaaatacaaaaattagccgggcgtggtggtgcacacctgtagtcccagctactcaggaggctgagacaggagaatcgcttgaatacgggaggcggaggctgcagtgagccgagacagtgctgcagtgagccgagatggcaccactgcactccagcctggcgacaaagggagactctgcctccagaaaaaaaaaaaaaaaaaaaaggaaaggaaaagctaagcagatgacttatgtggcaaatgaggaatcaaattctctatttgtggtctgagatgccttttcctggcccagttttctgtccaaaaggctcttttaacctccaagttatacactattaatggtaggcccatagtggggcggggtgt

SEQ ID NO: 158957 - DNA, 1000 bp, Homo Sapiens
caggttaagtaataaaaatttattgagaattcctgggttggtgtttatctcctcccagccttgagggagggaacaacactgtaggaaatcactgagaaatcacgcactgtccccaacagccccagttaacacagggaggaggaaagtaatttcccagaaaaggggctagtcttcagtcttccttaatccaagaggggttcagggaaccggtgtgggggaccatcgcatgatactggggcggggtagggctgtgctggacccctggctggctcctcaaaaactggagaagcagatccacttcctctgggggtggagttcttggtgactaggctcatttcttacccttgatgaggctgtcacttcccctggtgaaactttcatcctgtaggttcagcacaaggttgtcagctgtgagatagatacgattctgtgatgtggcgatcgtcttggagatattctgggctgctcgaatcttgcgaagtttgatgtagccagggttcttgctcagtgcttctccaagcatcttggcagcctcggcctcaccctcggcctgcacaattttctgccgctgttcctgctttgctttttctaccaagaattgggcccgctgggcctcctgctgggccacttgtttggcttctacagcagctgtgtactctcggctaaagctcagctctgtgatggccacatcatccaggatgaggctgaagtccttggccctctctgtcagctcccggcggatcaacagggatacctgggcccgctgggtgatcagctgtgaggcattgaacttggccaccacactcttgagcacctcgttgacaatggacggcaacactcgttcctcgtagtccagccctaggcgctggtacatgctaggaagctcctgagcattgggtcgagacaacactcgcagggagatattcaccatctgtaggtctttggagcctgtaggggaggagatttttcgaggtctggcccgaatgtcatagataatggg

SEQ ID NO: 158958 - DNA, 1000 bp, Homo Sapiens
gcaggatctacaaatcattttattgaaattgaacaaataacacaacagtcttcctaagctaggggccatcctccccaagccatttcccacattatagaagcacagagcttgcacagtacttaaaaaaaaagtcacctctatatagaaatcagactctgccacgacatcatcatggactatttacaaaccttcacattataagtattccttttatggtttttccctcctttctttccctacccaggggttctagtgctttcccttgactgatcctgaaggggtgggggttactgtaagggagggggtggtaggctactcataactactggcaccagccttagggtgttgtcccttaccacaaggtggtgaacagtcccctcccaattggaggggtggaggatttggtgcaaagccatggagattagacagaataggtgggttggagtaactccccataggcacaagcatccgcagcctgtcctgaccccagcctgcactctctcaactcctcaactgggggttcggggttggggggcaacagttagttgcagtagggggatcagcccagccctgggtagagggagaagcccccacccagtccccactcctatcaatagccagcaaactgtccatccatctgaaggcgggaacaaatggcaggtaggtcggaagaatcaggctggcactgcccccagcctctgtccaacacaggaggaatcgaggtagcaaacggctgaaatgctctgactaggggttaaaagggaagtgaaggaaaggaagttcctacttgtatacagtgcccacagcctaggggctggaagaaagcataccttgcttgtaaagtgctgtagcctctagcagggctaggccccaggcaaacttggaagaaagcagaccaggcaaggaaccaggtaacgggcattcctgactggtatatgccctgctatgctgcttgcaggggtggcttgggagagtggggtgctaactctgccattagcct

SEQ ID NO: 158959 - DNA, 1000 bp, Homo Sapiens
ttttttttttttttttttttttttttttgcataaaggaatataaaactatttattaaccactgttcaccagtatttacaataaagtaaacaatatacagttggataacattttgattactacaaagttgttcttcctggcttttgctgaaccagtaaagcaaactcaagattgagcctccatgtaatgaattggggtaaagaaaaaacatgcaggtcaataggttaggttacaaaaggttgttcacacatttatgacagcaggtcctaaactgccaacacctctaaccatctgattaggtttctatgagccaagtcttacatattccattcatcatgaccttttagtcaatgtagcaacagggattccaacattttgctaaggaatggcccgctagggaaacttttaaatgttcatttaacttagttttgtttagctagttaaaacacactagcatttgtctagtttcctcatctggatgaggaaacctgctgtgatggcagtgataaaatttttccttttaggaattttgcaaataaaccactgcaattatagacactttaaaattatccaatttaaattgtcctatctagaattacttatttcacttgaaatgtatggtttcaggaaaattttcaatttaacttgaagggattatctcttattttgcttggaataatggcatctcagaaacatgggtttacctgtgatttttttgtttgggtgaatgcttaaaaacaaaaaaaaatttacatatgcattttatggatacacacacacacacacacacacacacacacaaaaaacacgtaataaatctagaatggtccttaggctcatgagaacacaagttttgactgagtaatgactatggacatttcccccaacatttagaaaagctgttctttaatgaagaggaaatgatataccatggtatcaaatgttcttttctgataaaggaagcaactacagaaagcttttatttatttgttcaaagtaac

SEQ ID NO: 158960 - DNA, 1000 bp, Homo Sapiens
tttttttttttttttttttttttactggatcttaaagtggaaaacatgtttattaacattcaaactcccctcatacaaggccatataaaaatccttagcattttgattatacattagtctacactttctacatagttacaatgatgtataatttagcttttcataatacagtgtttcaatacatcattagttctgttaaacataagtcacttactttcaaatccaatacttgaacagtttcctctgtacatagtttagcagggctaattagcataagatgctatttattaagaggtatatgatctgagtattaacagttgctgaagtttggtatttttatgcagcattttctttttgctttgataacactacagaacccttaaggacactgaaaattagtaagtaaagttcagaaacattagctgctcaatcaaatctctacataacactatagtaattaaaacgttaaaaaaaagtgttgaaatctgcactagtatagaccgctcctgtcaggataagactgctttggaacagaaagggaaaaaacagctttgagtttctttgtgctgataggaggaaaggctgaattaccttgttgcctctccctaatgattggcaggtcaggtaaatgccagaacatattccaactcaacaactctaggtaactttatggaggtggaagctgggttagttcatgctaggtggctgtagcactgacctcatgtataaaacgcaaaacacttaaatactgtgatctaggtcttaattgcaagctatactgaggatttttttttttttatgttttggctatactttcattccaaaagaagagctgaattgatgcttgagttacagcaccagtctattattagtgaatgaagtatattcttggcagataaataccagatcaaaagtcctgtttcagtaatttgattaaactgtagaatactaaaaaataagttatttctacagaaatctttgaagggagcaaaaaatcaaa

SEQ ID NO: 158961 - DNA, 1000 bp, Homo Sapiens
tttttttttttttttttttttttttttaagaaaaaattaattaagatgtatttaacctttaagtatagaatgattgtataaattagatttcaactgaaaggacaattagcgattcagagaaagctcctagaaatagactgaaaacaaagccatacatagagtaagaaatagaacctatggaacttccatttttctaactatagttttttgtttttgttttttcccagttgttaaaaaaaaaacaactcacagtttcaatattttctgaaccaaaaatcagaacacatggtttgtgtcaaagggtttttctgtgctacgtctgggagtgctgacctaagtgacatttttttttaatgccaaatacagtaatctccaagcttttaatggcttatgccaagatgacagaatatgtgaaatctgattgtcccagagttacactctgcactccaaagctacaacagtgccacagctgagaggtttccctatacttcctactactgtgacaatttagcaatccttcaaatggaaaattcctaattacacgagacaatggtcctacagtaggcccgtgcggaataagttccctcgttggaaaaatgctagcatgaatagtttgataaatgcaatccatcagcaaaggagagcaagcaggcagagactgtgccaagcagaaactcattcgcatcaagttttccaataagtttccttcccccagtcccttttcttcaatcctgcttttaagccaggccccagggtaagtctggtagaacactgagcaggaaagcttggaagggttctacaccacttcaaaaatacctttgcttaaaaacacttatatagccagtgattagcaattaaaatgtgaaaataatcaactactcagtagttaaattctgctaattatcaaaagtcatagtctactgggatcagcagcattacaaaaggaagtcatatcgcatttcttaagctttttctgaatggtttaacaggtctctttcag

SEQ ID NO: 158962 - DNA, 665 bp, Homo Sapiens
tttttttttttaaaggaagtcaaaaactttattcagcttataaaattccatgttccaagaacatgctctaagcatgcagaaagcacaggacactgctcccgggtgggggctcaggtggggccacctctgaagctctgctgacccctgggccaaggccctgacagactagcaggcccagtggtcatgaaagcgtgacggccaccacatcacaagcgtgatggcacctgctggtgcagctgcagtccctggtgggccgggcactcactctggcagccgccgtcccccacgccagccatggttgtcccgccatacgcagtagttgagtgtggtcgtgaaggccagccaggccaggtaggggtagagcaggcgggcggccagcgggctcacctggtaccaggccacggtagtggctgccgccgccccactgaccagcaggagatccaccaaggcccagcccatttgtcgggcaccaaagaagatggggggccatgcccagttcagggccagctgcccagtgtagaggcccaggggaaccacagccttctctgtgaagcctcccagctctttccagaccaggtaggagccgtaccagcggcgagggcacgctccgggaagggcactgcctggcaggagttagccaggccgctgtccccgcatccgccccg

SEQ ID NO: 158963 - DNA, 1000 bp, Homo Sapiens
aagtaaatcatgactgctttatttgctggactggtgcctctcagcagattcaggggtcgtgcagggctggttaccacaaactcagtaggagtgcaagggctgtacccccggagctagacagcctgggtttgaatctcaacttctcccttttcttgctgtgcaaccttgggcaacgtgcttactctcaatgtgagtgactcagtttcctcatagcctcattgtgaggaatgaataagtccacataaaacgcttagcacggggattggcaaagagtaggcactcagtgaatgtcagcctttgtgattgctgcagttcaaagactggctcagtgtctctggaggaattgtctatgaccttgccaagtagatgcatatggacatggaatgaatggtgtctgctgtggttctaactccttatgccactattccagtctgtaagtatgcatgtgtgtgcagggaatatgcctgtgacagtggctgagtgtactctttactgtgaccatgacttgtatgactgtgcatgtatttgaggaagccctggccagacccagagtgcattaggttctcaatatgtgcaactcagtgtgtggccaatcaccacatgctcttccgctcacaccacggtgcctgccagccagggtagcatcgacatttgaactccacagccatctgtgcctgatcttcaagtgagagggcaccccgcaggctcaggggcccaccaccaggcgtgagctggatggagaaactggcagggttaaggaggaggagggctttggggtggctggtgcggcggacacagcggccatggccggagcacagggcttgactgcagagaagggccccactggtcacgttcaggatgaagggccccagtgtagtgtccatatactccttgatggcctgacatgattccttggttcttgtattttcccagctcacccagagcaccactccagctgccccctgggccgcactctcccccaggctgtgctccagctcat

SEQ ID NO: 158964 - DNA, 1000 bp, Homo Sapiens
tagaaacaatattgttttaatgttgtcttctttgttttttagtcatttcaattgtaaaatcaactgaaacttaggttctcgccatctatataaaaactgagagaggaggcctcagattgtatgcagtgccacggaaagcactgtgtgcatattatatttaatgcaatacagatactttagctttaattttaaaacaaaactcaagaaatctttatctccaccaaagaagaatacagcatttgcatgataatatagttgtggtagcagtagtggaaaaacaagatacagccacatagacagcagtatgtaaaagggaagaaccttgtcaaacccatctcttaatctactttttgtgtcagtgataaggaaggaaaaaggtaaaaatacagtatacttcacgaaacatcatccactcaaaaaagtgtctggaaaaagtacaggagagagaatggaaccattcgcaaatgtgaaaaacacatatatcagcgaaacatatgcagttctcaatgcagttacataggaaatgagttttgaaatgatctgattctcatattatctctggtgtattattcaagttgtcagttactgctttttctactcctttcccaattttgtggctaatagactaaataccaccctaataacaaaaaggacaaagtagcccatttaagaaacatgaattaaatttctgagtttatctacatctatggttaatttcaacttttgaatgagtggttgtgaatagcctaactcccttgggagaactgtaaaaataattgtatgtgaccaagatgaaagcagaatgtattcagctttggatatcaaacacaacttgtgaatttggaaatgtacatccttctattgatattagctagtgtcattaagccataacaaacagtaaagctaatattctcttctcaagaaacagaatttgtctttgtctttaaatagccaatgtgaaagatgtaataaaatacacattttccccctaccagatcca

SEQ ID NO: 158965 - DNA, 1000 bp, Homo Sapiens
ttgaggccaggagttcaagaccagcctgggcaacatagcaagaccttgtcttgacaaaaaattaaaaattaaaaattagtcgggcatagtgacatggtgcctgcagtcctagctacttgggaggctgagtcaggaggatcacttgagcttgcaatgagctatgatcttgccactatgctccagcctgggcagtgtgagttaaattttattttctaaattttatttgatgtgaattaaatcttatttaaatttctgctgagaattagcaagaatgtaaataaaattacataaatgtgtaataaaactacattgaatttaacattatatacattaaatgaaaatacaaaattctttatgttaattttataattctcaaatgtaggtgaacgaatttcatcaattttaaaacacattgtttcacatacatgacaattgtatatgacactgtttaaaaacattttatagactccagaagtagacaattagtaataatataacatgcaactgtatcattgttagtaatgttgggtctttactctccaccttctctgccccaagaaacatttaaatgagctgttgcttacagatataacgatttttatcttcacaggattcatctaaagcatttccatttggattatacgctatgcagttctttgtattaaaagtttcaaatgatggaaatagatactgggagagtgcagagccattctcccacaaccaggcggtgtgctcctcactgtaagagagtccaatccagtaaaattgttgactggagctcataaaatccagttcatctgtgttttgaagctgaagcaggctggatttctgagaagcacagagatgccgactttcgttccaagttttctgttcactggaaatgaagtaacagttgcaccggtacccaacccatttttcttggcaagaacagcagtcagagtctttctggagttctatgttgggtcctggagtaaatgctggctcaatactcagtttagta

SEQ ID NO: 158966 - DNA, 1000 bp, Homo Sapiens
ttttcaaagtcaaatgaatttattcagaaaaggccttgcttggtatcagactaagaaaagcagccctgcccgccgccccccactccagaagggtcaatttacaaagacaggggcgcaggggagagctgggtggggaagacacagccaggccaggaggcttctgcaggccttgggcttccctgagggcctcgcggcttctggtggctgctatagtggccccacaggaggccagcactgtgggtcatgggtcacgggtcacgaagcagagcctgaggggagcccgcagcagctccggaggccccagcccctgcagcagggacaggaggaccaagacgccgacgggcactcctttccttaaggcttcccagacttggcagaagactccacctctgcgtcctgcaactctgctgcctcccccgccttggctggctcatcccttgtaggtcctgccgggctggggcctggggtctccgatgggctctcggctggctcgtcccctgcaggtcctgccgggcgggggcctggggtctccgatgggctctcggctggctcgtcccctgcaggtcctgccgggcgggggcctggggtctccgatgggctctcggctggctcatcccttgtaggtcctgccgggctggggcctggggtctccgatgggctctcggctggctcgtcccctgcaggtcctgccgggcgggggcctggggtctccgatgggctctcggctggctcgtcccctgcaggtcctgctgggcgggggcctggggtctccgatgggctctcggctggctcgtcccctgcaggtcctgctgggctggggcctggggtctccgatgggctcccaggggtaccttctttgggccccgttcgaccttctgtgtcctcctcaaccccgttctcactgtgtccagccttggggtgccccgatggggcaggggacccggcaagggccaaggtctgggcaccaccactggccaccgcagcactgtccccagcaccc

SEQ ID NO: 158967 - DNA, 1000 bp, Homo Sapiens
tagctttaaataaaattcactttatgaatcaataagtgaaatggcaaaaaggagaggtggatattatttaaaagaagatgactgtttaaacacaaaaccatcacagagggaagagaggtttagaaaggtacagaaaaaaaaatctacaccaggtaacactggaggatgcagggctacatttgccactgaagaaacattgttctcttgcatctgaattccagtgctttccaaatagatgggtagatgatgaaaaatggagcagcttcttttatttcttcttctttcctccttgaattctagtacgagacagttctctgcctgccaccaaggcagaaagcagcattttgctcacctgctcttcagtctggcagggtcccacgctcagttttccagcatagctgcagggtgctattgtaatgactcagggatggtgctgacaacgtgggttgcctctgtggctgcgggaggggagccaaagaaggtgttggtttgattcctctgctgatctcggaggtaaggaggaactgacgaacttttgatatggaggatcctggtgtccatcacctgacagtcaatctgcatcatcacttcgtagtcctgcccattgatcacattctcatttatgtttattgctggtaacacaattgacatttttggtcttgtggtcttgttatgggtggtagctggtaacagcaggtgatcccttcgaaatgacacaacataaaatgtgtctccccttctgcggatggcttcaaaaaagtcttgataacttctgggtgaagcataatacacttgtagctcactccctgagttcctgctgatactactagtggtttctgtgtattgaacagccatcagctgagaatttgagccctgttccagagcaccctgaagaatacgggttttctgttgattatttgtcattcttcttgacttggtcctttctacttcatgtctatgaacccatcctcgaagttcatgatttaacctgagagactct

SEQ ID NO: 158968 - DNA, 1000 bp, Homo Sapiens
tgataaaagcaaggttttcctacaatagatgtggccctaccacatattcaagatacaatcatcctaccatcagttaggttatgctttaaatattttgaaatcaggtatccttaactactgatttccttttagaaactatcttgagtgttagattttcataattacaccatttttaacttttagctttttaaacttctagacaaactatatgtttaagcaaaaacaaaaataaaaatcctcaaaaaaagtaatatcagagttttaatttcaaccagctggcacaacaatgaaagtgtcagactttctgaaagtactcgagaaataatgaataaattcttaatgttttcccctccaccgcccttttttattctccaagattaggaattactacggattaggtttttgaaaataaagtttcctttttggaaaatggtctacattcagaaatgtcttagaacaagcatttaaaaaaaaactaataaataatcataaatcaaaatacattaaaataaaattacagtacatcatcgctcctagaaaattcaccatacaagacgatcctttcaaaggttcataaataaaagtcttcttgactcgaaatcgtttcctgcatcgtgatgaaaagtatgcagaaaactaagaagaatcgcaagttttcagtagggtgatgtccaaactacttgatctggtgcggggcggagagactgttttgcttttgatccaagtgaagacaatagaaatgtgctcgtcccacttcctcaagtcctcaaaaccttgtcttgcccgggagctgcccctttcaggcagagttggaggtgctgcggagaagccggtgcccgtgcggctgcgagtgcggctgtgggtgtgggtgcggtatttggtgcggatgcgggtgcgggtgagggtgtgggtgcgagtgaggatgagagtgtggatgtggatgtggatgcggatacgggtggagctgctggggctgaggcttgggttggggctgaggctg

SEQ ID NO: 158969 - DNA, 1000 bp, Homo Sapiens
ttttttttttttttttatattaagcaaagaaagactaaatttattttaataaacattcagaggctgagggtggccaaattttcaagccagaccctcccaatgttaatacactgtgcaaagcttacaccatgaacaactgacccggaccactaccattccaatgggagcctctgccttacaataccaggttagatgtctgtgcccagaacccctaaattagttacaactaataatcttctttcaagagttttttttttcaatcttggagttaacaatctgacttatttttcttttatcaaagaagtaggaaaattacaataagaattctagagatctctataaattacagacctatgactcaaaatccttgaaacaatttctctacgaacataagagttaaaaatagatttcagtaaaaccctatatgcgtcttatgtgtacacagtatagctatgaggaacagatcttattttgaggaactttattgttacatttttgcaataattgaggcacaactacctcctgcttttccaacatcttaataaaaaagacaataaggattaacagtgaaattaaaattaaaaaatacaaaagcctaaggttctggagacaaaactgactagagtctatgtgtagccaagttgtgaatgacagtttagccttgcagagtttccttcttctccaattacaatgtgttacagaatttggaagggggtgtctttaaaaacgttctaattcaccccggtcatgaggaggaggaggaggaagtccagctcagcaaggccaagtgcctcggccagggcggtggggtcagcgctgagcgggtcaagagcccgcgccgggggccatccccctgcgctttctatcgagttaaacggaccccacaatatctccttcctctcatgcttctggtttgaaagtgacgagtaaatatgtcagactgtttaaaggaaaacaagcactcattgacaaggccggactactcaggaaggtgtttcaa

SEQ ID NO: 158970 - DNA, 1000 bp, Homo Sapiens
tttttttttttttttttttttttttttttaaaacggcatattctttattttgcatactttaatttcagaacaaaatgaagaaaataaaataaaccacaatacacaacatccaatcctgctgtcaagagtagagagggaatggggcttgacacccttagtttactgccttcaacacaaggacaggagagggaaaaaaacactagacaccagcagggggagccaggtgggacaggggcactcgaggctgcagtgggagcccatggggacactatacaagggcacaagttttccaactatgaactcctaacctaatcgacttcttccatgcgagacgcatcctcatcgccctcgagaggggggatctcatcaggaactgcagcattgggttcctctgctgccacttcatcttcatcaatacctagacctagcttgatcatgcgatagatgcggttggagtgggtctggggatcctcaagggaaaagccagaagatagcagggcggtttcaaacagcagcaccaccaggtccttaactgccttatcattcttgtcggcctcagccttctgccgcagcgtctccacaatggggtggtcagggttgatctccaggtgctttttggccatcatatagcccatggtggagttgtcccgaagtgcctgggctttcatgatccgctccatattggctgtccagccgtaggtgctggtcacaatgcagcaaggtgaagacacaagtctattggagattgtcaccttctcaaccttcttatctaagatttctttcatgagcttgcagaggttctcaaactttgccttgctctcttccatcttcttcttctcctcctcatcctcaggcagctccagaccctccttggtaactgagaccaggctcttcccatcaaattccttgagctgctgcacacagtactcgtcaatgggctcggtcatatataccacctcgaagccccgtttccgcactcgctccacaaaagctgagttgg

SEQ ID NO: 158971 - DNA, 1000 bp, Homo Sapiens
ttttttttttttttttttttttttttttaaaaggcttaaaatgtattttaataggttgatgctgcattactgctccatttttcagaaaaactccaaatatatgagacaaatcaaacacagtacaccaatgaaaaaaaaaatgcacagcatgactacctaagataggcgagtctaagagctactgtcagaccttcagtatacagtaaccctgttcccaagattgtactaggcctatcaagaaaagctgtgaacagcaacatcatagacacaaaagggtcattcctgggtgtcctcacccaagaaaaagatggaggcaagttaacacaagatttttttttaaagatacactaaaatgaaaatctctaagagaaaatgtcttctttaggacatgaaggggtaatatatggggtataacagaaccgtatgtacgctgcctgtgacctttgtggacgtttgcctgaattctcacctgggagtgaatggagcaatggggctaaggtcattgggggatgtttggtttttgtggtgtatgtggcagtttctctggggctgggggagtgtaaggataagaagcaagtgaggttgggcacggtggctcacccctgtaatcccagcattttgggaggccgaggtgggtagatcacgaggtcaggagttcaagatcaacctggacaagcttgaacccgggaggcagagattgcagtgagccgagatcatgccactacactccagcctgggcgacagagtaagactccgtctcgggggcggggcaagcaaatgaaacaagatggacaaaaaaaaaaaaaaccggaatgatcaagattaatgggctctaactggatccactttgccatggtttccccaggccctcaacagtcacattagagacttcaggaatgcaccacacagaactgattaaacaatataccacacagaattgacttgtttaataccacccctcccttgccctctgcctccagcatactccctagagtagtac

SEQ ID NO: 158972 - DNA, 1000 bp, Homo Sapiens
ttttttttttttttttttttttcccggtagtaaaacatttactagagagcaagcagaaaggaatgcacatcttaaagaaaccttcacaaagtcacaaaagtcaaagtttgtatatttcttttcctttttataaacgataaacaaaaatcatcaaaatcatttcagcaaaagacttttctatcattggggcaagttaaaaaaaatacaatgagatagaagacactttaaaagctgttgttgggtttcttgtttaattttaaatttagcaataccatctcaaacctggagcaatcctggaacagttaccaggatcaccttttcccttcaatccttgtggcttctgggaatcttcagagcctgggtctgaaaggtgtttcctacatgtctcagggctggatgcaaacctggctggggacctgagcatcaactcccatttagaatcagacatctcccttccctgcaaatgtctacaactaccaaattgctccccaacagttagctcaatggattgaatttgcagaagccaactcctaaaatggggactgcctggccatacaactaagaaaaagaagtcaatttatagatgcttataaggtgacaccttagtaaaaaatataagctacatacaatataaacctagagtgagttttgtgccctagaagaccctttatcccaagataacctcaacttacccacatgacaactcacctagagccaaaagaagcttcccagctctcactgcttccaaggaccaaaacagcttcccaagaaaacatccgaaaattccttctgatgaaggggtaatgtctccaagctccagctctccactaagggcagggggtccttacactttggaccccaacccagccctgagacacctagttaccaaaatctttctaaaaattaaggacaactgatttcacgctttagcacatcccctctaactgtcccatcgacttttcttgcgtttaggcggctctgggacagcaaagccgtcagc

SEQ ID NO: 158973 - DNA, 1000 bp, Homo Sapiens
ttttttttttttttttttttgtggtgtcaaaaaaaaattttatttatctggttcaaaaaattttttagaatgaatgcatttagattgaccaaatagatttttaaaaacaaatctttgccaaatagtttaagtacttttaaacttcaaaatcttcttagggtaaaataaatacccgtatctatgcagtaccataaacatgttaataaaaggccactcaacattgaaagccttctatgaccagtaactgaaatttacacaagtgtaaagaagggattaaaccatgccgttgacaagttaacttacccctgggctccttgaaggcttgtcagtttagtctttggaggtccccgagtaccattttaagtgttaccatgttactgctgctgagtaatagtgcaagtgctaaaatgcaaaattcagatggtacagggtttggaaatcatgcagattcagatgcagaaaaaaaaaattaaaacaactcaagatccctttacagaggaaactgaataatgaaacaatgtggcgattacaagtctaaaggatgacttcattgataaatgtttatgtaacttgcaaaatgacaaacctatttatcataatctaattaggtaagggcattaggtaaactaccaacacaacaaatatcacattcttccaactagaaaatgagctcaactctcacagaattagttacaaaaaagtacaacagagaatcaatgttattgcttttacatacttaacaatgcattgtgagagtgtgagttttgtaagcgattttattcaactgtattcaatgttaccacattcccccacctcctggaggacaaagcccattccacttaacacttccagacagacaacccaccctaattcttaaagctatcaggcctcttaatggatttcaggcacaagataatttgtggtttcttctactttatccctactgcaattaattccacttttcaaatcccaaactaggaaggtgctgatattccctttt

SEQ ID NO: 158974 - DNA, 946 bp, Homo Sapiens
tctttgtggaaaacaacaccttatttattcagggtgtaatactgtctacttcctttcagaagacttgaaaaagatcaaaataggataaatggacagttactactaaacgattcaaatacttgggcagtatctttccctcttaaccctttcacacgtttttaaagtgtcaaaattgatgaatggtataaattcaaaaggaaaattcttttctactgaaaaggacatccagctcgcacaaacggtggttcagctgaaggcaaggcgtttctggttttcctctgcactcgggcggatcgttaacttccccaagttacaactgagttgctctttccaggcttttcgaagcatctttaagtttccccaccaagtcctgtaattgttccatgctgcaactaaaactaatctctggataggatggggaatcagtgttctgtacacttaaggtcaccaaatatgcaggtctgtacatcctatgaagttgattggtctttatctgatattccaagcgccaagaaacatccgttatatgagggagagatctgcctatacttcccagtaggatttctagggaattcttattattctgatattccgtgcaaaacagttctattcgctctctgtcaaatttacagtcttctagataagtgcttagagttgacttgtcagctcggtgctttcctgcctctagtatgtaagttgcagctgctgcatgacaatgttttaaaaccactgggtcgatatgtttcaagtctggatgatctaacacggcctcgtccgcctgggcgtccagcagactctggaatgccgcccggaggagaagcgtgaaggcgttggagtcgaaggagcggggatccgccagcatctggaagcctttctgcacagactccgagagctccattgtgagcgcgccgtgaccttcgacacgcacaccacgtgacacgcgccg

SEQ ID NO: 158975 - DNA, 1000 bp, Homo Sapiens
aatgtgtttaagagtttattaggataggcacataacagaaagctcaaaggacaacaaagctgcaccttcctaaaggctgaccctcaaagcaccattttgttagaactcagaggagaagctcgatctctgagccttccctcctcacagtttgggaaacatgcacaggatgaaggtaaatcctgcatagaaatcttgtaattccagaattagtcaaacaaatttgaaatacacacatttaaaaatacttacattctcatttagcattcatgaagtgattactgacatttacaattacatctgacatcacagagcaagcctttgcagggatctaattcaagcttaagccaaatctatgcaaagaacttcagctcagaggaatagtgggcaaaatctgctgaaaagaactgcttgccaccttgcagataagagcaacagcacaataaagggattccagagcttctacctaaaatagaagggcattatctacaagaacagaccaaaacacaatttatttttaaacaagcccttcagtgagtatttgtctcaggaatctagtatgaaaatagtgtctttgattagtgaatatatggagaattcggattatcatctctatttttagttgagaaaatgcacaaaccatatagatttaaaccatgggttttgcagccgaagtagagacagatgttttctgggatcatatctcagattcccaagctaaagctattgttcaaggtgatggaaatatgtagggggcattaaaccattttgcagctgctagaaagctgtgttttcctgttttcctgatttagacaatggagaagctaagaagagaaataataggaaaggctttcctatgttagttttaaaaagactgtgttatttttaattcaatttttttttgtcaaatctcatctctgttctcctagttttcacagaaatatttacaggaataaaggttgaaacaaaagtacctaatgatcatctccatccatcgaaagat

SEQ ID NO: 158976 - DNA, 1000 bp, Homo Sapiens
tcacgtggaagaggtttattacaaataaatgaaacaaaaatcaaaggcttgtgaaacatctctaagtcttcctgttcattgaccagtttctcaatcacaaaaaacaggaacgtctgtgaggttcaattttggaaagggggattggtttagtggctcttctgatacaaccacagacccctcggataagactgtggtccaaagaaggctgctgtatgttctctgtaggctagactcagtccttgtaaataaactcagtttaaagctttcaatactcaactgcatagttccatataaacatgaaaattaggaagattgctattagcacacattcctaaatccacaggagttatttagcaaaacatccaatgcatgaatgtagagaaaacacaatgacccaaaagttaagactggtgaatctccaggttcacatgagacggtaacccaaattcatcacttaaccaaatttagacaagagtcaccatttcctaattctaggaaatctgactagttaaggtggcataactagtgataaagttcatcatgagctttatcatcacaatgctaagaaacattattttagaaaatctagagaatcattaacaagcaaataacagagtaggggatgagctgggccactctggggtcagactgcctgggattgacctggccctactacttgctggtggtgagatgctggccaattatgagtactcacctgtaagatgtgagcagtaagaaagtgtatctgcctcactgggttgtcagaacagacaatcccggtagagttctcggagcgtcttggcccatcactgttagctagttaatactttagtaagtacaattaatttcagtcactctatctgaacatggtaactgcaagatttctcccttatttcctgtaatttactttaacctccacttcactgtgtccctctgatagggaaacaagtgggttctgaactgccctaagcctgtgctggtggccagctctgcacatgct

SEQ ID NO: 158977 - DNA, 1000 bp, Homo Sapiens
tttttttttttttttaacatgtgtcaaaagattttattaaactaattcaatttgttagggaaatggtaagatgttacaactggttaagaggagcattaaaagtgcagacatatattcaggccatcaagaatgaggaaatgaatttgctaaattgatgcaacatcaatcaatagccagggcctgtcattcacagacaatcactccaccacacgcacacatacattcctacggtttgtccacaacttccagagctgaagagtagctcaaggacatcaaagggcagaggcccctaggaagggctgagccacaatgaagcagtgctccttcactcccgatttccatggctaccaccgtttttctctggcaaatcagagacgaattttaaagactgagtaaatctataaaagcgattaatcacagaagttcaatgtctgataaattattccaaaagtgttcctgggcactgagactcaccaagcatacattctgaaatcaaattctatttctatccaaaaagtgcagcccatcagtgttcttaaaggaggcaaatggttgttgtgaggtagcaaacattttccaatgcaggtaaggatgtagataccaggtaaatgttacagttgtgttcatactaacaataaactatggatgacgtggcacagagtcagtcaatgaggaaagatccagagacattctgaggtcacaaaaagaatttaaatgttagctaacaaggagtgctcatcaaaaacaggactttcccactcagactgcaaaccaggcagaactaccatctcgctttatcagttgtcattgcatgttgacatcaacactgaggagagtgatgcagacgatagatataaacatatctacatacatatgcatacataaagcatatacttatatgcatacacagtttacatttcccagccagtgttcagaaaaactagaagagagaagtgatgttccattttgtcttggaaaagtatatattttacatatacat

SEQ ID NO: 158978 - DNA, 1000 bp, Homo Sapiens
tttttttttttttttttttttttttgtaggaataattttgcatatataccacaagatcatgatcacatattaaaaataaatacactgtttgttaggtaattctgaaatggtcatttctattttggagttacaaataataagccctgagacagaagacactggtcctcacacagcagctgccattgctctgttctcagttgcggtgctttatatagaacaataggtatacaaaagcgtttgagccattccggtattcccactgctctgatagatgagagacaagttgtaggcaatatctcttcgtaagtctaactggtcaagttctataccctctaccacaagtggagggagctccagggccttctgataatagtggattgcaagatgaatcagccccaactgatgaaggccacggcccaaattgtagaatgattcctggcagggcccacgtaaactgaggtatcgattaagaaaggaaaagccctgtacaataagagcatgtctccgtaacacatacttctgagatgccatatgaataaaggttaggcctatacagaagctatagagaggttcgtcagggtgagtgcgaaaggcttgcacatactgtccaagcgcatgcttaaaactaccagatacaaatgcattgtgtccatttaagacacatagggcatgattttctgggtttttcagcatcaaacggagacagaagcgatgatgtcgtacatcttgggagtgcatggtaacttgattgaaaatgttccagagctggggtttattgacattttccattaccattatcctgatatagttgtatgcctttctgaaatttttgtccagaattgcagcagacagaccaaagtattctagttctttgcgtttttgcctgtcatcataaaatgagtaatattccaatgaggaatctacaagcaactcagcctcttgaaatcgggataggtcacataaggagtatatggccttcaacagaagattccaccagtca

SEQ ID NO: 158979 - DNA, 1000 bp, Homo Sapiens
tttttttttttccagcaacgctccttttaatatccggatgtccagagccacagcctgtgtgttgagccccgggtagggctgctggccggaggctgttggcttccagcagcagcacgacgtggctttttgaaaggagagcccggagagtggcggccagcaggggcccagccccatgggccgcgtgcctggtcccagctgcggcgtccctctggccagctacaaagtggaatgcttctcgaagggcacggtcaggaggcgggcggccgcctcgtccaagaaccagcacagtttcccggtgtggggctggaccagggcggcgggcagcgggttttcctcctggtcctccaaaatgcgcttcagaacagctgccttgccttctccagttgccacaaagatgacagttcgtgctgcattcaggacaggtagtgtgagggtcacacgctgtggcggtggcttcggggagtcactgatgggagccacaatcttctcccgctcctgtaggagggggtggtctgggaagagtgagcaggtgtgaccatcggggcccacccccaggatcagcaggtcgaaaaccgggatggagtccccttggaatgcctgtctcagcttcttggcgtagtcctcagccgcctcctccacaggcagctcggggttaatggtgatcacctggctttctgggatcggcagtctggagagaagatgcgtccggtagaggccgtacgtgctctcggcgtgatcgaagggcacgaggcgctcgtcgcagaagcccagcgtccagcgcgctaagctagctggcccggcaggggcgacggcggcgggtagctcgcgggctagcatcgagacgaggctcccgcccgacaggccgagcgcgaaacgggcgcgggcccctgccaggcagcatgctgcgcgctgggccaccagctgcgctagcgccgcacccagctcctgggaactcgagaacaccgagatgaggcccggggccggcgcggccatggcgagg

SEQ ID NO: 158980 - DNA, 1000 bp, Homo Sapiens
ttttttttttttttttttcaacttgttgctttcatctttttattgatagcacagccagagctaccaaaatgatttactggattctagcaaattaataaatacagtaatttgattgtaaaaggaaacattctacttggacattttagtagaaattgctagagggaaggagctcctggcgtacattctacttggatagaagagaagatagcacaggaggagaactggacagtccaggtatagattgttgagattagggattcagcagaaagcaaagcaaatgttctcattgttcttttgaggtacgaactctgaagagtcaagacattaaaaataaaaagcaattgaaccgggtagccaaacttaggcaaaaggaataaatatttggcaacattttgactttaactgccaatctgagattagtttcttcagaaatttggaagctgcaaaacgttgcctttcttattccatgaaaggcagggcaggcaaaggtaagaaaactgctgagtgggctccttgtaccagcaccaaccagcagcccttgacagcatagatgggatgagtgtaagggctatccttagcataagggaaagacggttataagctgagaagattgaaagaagaatggagccacaaagagaatagcataaataacaagaaggaaacatgaagaacaagcacttaagatattaactttcagtctttctccatttcttgatgtctaatgaggcaaaataactgggcaaggaccaccaagatgaagaagttaaataaaatgtcacaatgaaattgagtgcaataatacaactgttgactgactttccaaaaccacggtgatcggtagagtatcatcaatgttaccgaggattttgtttctgcctcattataactcacttccatgtattttgtcagtatagtacgtatatttaagcactccagtgacaattatgacaatagtttctggaagaaatctatgactatagctttgggaagcacacaatat

SEQ ID NO: 158981 - DNA, 1000 bp, Homo Sapiens
gacagaccaatggtttattccaaaggggaaagcccaagctggatgtctccctccccaacccctgcaagctggcccatccttccagagcccccataggcctggggctgttgagacgggagatgtccccactgtgctgctcctggttttgtctcctctccaatccttgagcaccctgatatgcaacatggggggtaatcagaaggaggaggcagcctctgatggggcaacggctgagggtgggggcagtgtgtaaggcaccttttgcggtcagcccagccacactccatcgccagagagaatgccaaagtgtagactgaatgaaattctgtaggcaaatggtaaatggtagctgggccagtagctatttgcatgggtggattatatcatgttaagggaattctttatctcagcagagggaacagaggaatatcttggctaaggtcatcctgccagtcaggagaagccaccctccagggaccacagactcaaagtggctgtggtggagacccaccgcctgggtagggtgatgtcaagacactgagaggtttccatctgcagtggccaagggctgcaggttctgccatgctgggcattgataggtaggacgagagagagcacgtagggccagtcctctgggaagcaggaggtgggccatgtgaatgggagatgggtggctgtgctgtccaggcatctgctgacaacattgggggatagggccttggagagaaacgtctataggcctggagacagcagggcgtgggcgggagaggcaggctgataccatgcgggtactcactgctagcccccagatccagcccgagaggaggaggctggcgggttagggcaggccccaacctatctcacccctgtgatgggttggcctctgagcacaggaatgatggtgaccatctgaggtcacaaggcaggaaaggagtctgaatggagtgtggccagtggggaagtcggagaggccggaactgcccccaagaggctggcagag

SEQ ID NO: 158982 - DNA, 1000 bp, Homo Sapiens
ttttttttttccaagggtgtagtgtagcttggttttatttatgtccacaaatatttcaaaaaaattacaaaatactcaaatggagagaacacagaagtcacgatttctgggtgtctactgtttacactgtgttatctcatggcaaactactcatatatacatttagcttcaagatatatagaaacgtagcaaatccgagtgtgcacgctgcctctgccgcagtggagtgaagctcaacctcgaggacaccgaacaagatacggacacacacagaggagccaaaccaaaccccgaacaaagggaggaaaatccgaaggaaaccgagtggttgggcttcaaagacaccatgaaggtcagggcctcctaaacaaactgtagtttatctggtgagggtttcgggtcgagggttttttagatggaagaatctcagccgttcgccttgggatatggggagaaaagcaaagctaacaagaatgccttcggacggttttcaagcacagacctcagaggactcgactcttctttggaaaaatggatgccaaaggaggggataaagaaggtttaactgaatggtagatgttgtgttctaccaaaaagaaagaaaaaccagaagccgagaaggtgggggcctggatgcaggagtctgggagcccagcaggaagaggcctcgctcagagccacgggaacaagcctgccatgagggcctgtccccaccccagaaggaaacgaatgccttcaagccaatgtggcctgaagtcccacgacaaaaggttcatgtcagctttgcctccctgtgaacaaactaaagttaaggcagaaatggaatgagagaaaaatgaaagaaaaaaaactagaaacattttcaacagacaaaacaagcctatcccaactgaaaccaaacacggtttttaagagaaactggaaatgtcgctatttgacgccagaacctgaatttgagccagtagctgctggtttctagatcaaactatcagcaactctt

SEQ ID NO: 158983 - DNA, 1000 bp, Homo Sapiens
tttttgttttttaaattatgtttatttagcatatgtacacataaaagagaaattgccctctgaacccacccagcagaaaacatgcacaaacccaaggtatatgtggaagggaggggccccggccccaagttagcagctgggacgatgcaatcctgtgagtcgcaagccccagtcaggagagagctggactgaagtgtccagcaggctggagtcccctgccgctggccctaaaataagcgtgcgccatagccaaaggtctgtttaatgccctcaaagtagtaccgctgccagccctgtcgtgtccgctcttcctcaggagcagggatgcctcgaccttccatgcacagctcagtctctccgttcttgtcgatgaaggtcaaggtgatggtggcaaagtgtccctctggccaagatttaaacctccacttcatcacaatatgtttctcagggaccagatcagtaaattccccagagacgttgccatctaccatgtggaactttccacctctgtctgcttctaatgttgcaggagcatgggtaaaggcctgcaccagctcttgggtggtaaacactctatagagctcctctggtgacgtcaggaaggtttccttaagagtgatcttacaagtggggattttgactccaacaggtctggcctgggtttttgaaggagcaggcttagccttgcgctcctcagttttcagtgctggctgccccactgggtctactgactctccattcattgtaggtaagatcatgccctgggtgaactctgttttgagggtgctgatgtaaattcccattgcttctcttagaagtttcaccccttcttccttcattaaggccacgagatttgtgtcaggctcatctttggcaaggctcacactaatctccacttcatccacgctgttttcatcagacaaattggggatctccacatgtcctttgtactgtactcctgacttagaagtacctgtccagtttagtttgacgctccatt

SEQ ID NO: 158984 - DNA, 1000 bp, Homo Sapiens
tttttttttttttttttttttgctttagggctttttttttaatgtttcctcactgttttgacaatatcatgaaaaaaatcagtttagaatctggaattggcctggacgggattcgagggcagctggcgggggctgcatagcccctgaggttcctcccccaccatgggacctaagctattggaaacaggagcaccaacagggcaccgaacctggaactaagttagtgtctagagtcaggcaagagaggagagtcaggcaagagaggaggggccgggccacagtcgccatggggacgcccctggctgtggttggttctgtgtctccccctcccctcactggctacatggagacagggaggtgggtcaggctgttcccaggacagaaaaataaccggcagtcaacctcagggctcatacccgagcttctgctcaatcccctcggggacagttacaggactcagagagaaacgtgaatttcagaaaaacaaatcatttttcacataagtgttccaaatattgcgtggggcatattaatgctagaaaattatcttttgtttacctgaaatttgcgtttaactcagcactctgttttggttttgctaaatctggccaaccctggcctcaaaagtcggtggggggaggcctgagaaaagaaagggaagtagtcagtactgagggtattgaggggagggagggaataactcagccaaaaagaaaaaaaaggctttccccccataggaatgatatattatttaaaaaaaaaatcgttctccaaaaatattctgcactggccttcctcagttgttaatagctatgggaggtgcgtagggaaaacacacacaccagacacccaccccatgtcattctaaataaagttgggaagcactaaagttgagctggtgtctttgccacggatgtccccagactccagtccgctaatcgccaccagactccagtccgctaatcgccactgtgaattttgaagaggaggcttagtataa

SEQ ID NO: 158985 - DNA, 1000 bp, Homo Sapiens
tttttttttttttttttttaacaattaagctatttttatttaacatgtaatagtcataaagcaactccatatatttagttttctgatatcctaatgtatttccacaaaccttttaagtctacaattttatatagttttccatcagggaggcaagatatatataatttctttttatatttaactaaaggttttaagagggcttagtctctaaatcagtaacaattagtcataacaccatacaaacacatttaaatattcaggaaagaggttgttaagattattgcttagtcttataaaatggtgaattttaaccaaattgatacctctgtaatcttatttatgtttcctataacatcatactgcttggcaagtaatgtaagttttgacataatttaaaaattcaagtagttgtaaacaaattctaatttgttaaacaattcatatattcccctttagttactatactacctcagaattaatcctccttaaaaaagtaatcatcccacatagaaaaaactgcagagcttcatctcttccttaaatattttcaagtactgtaagaacacaaatccatgaaaaaactgattaaaatttgacatttcatcttgctttactaattatggaataatacaaaaacataaaaaaaatgttccttaatatttctttgcttaacagagaaatacaaagaaatactgcaattatggttatgggctactttccagcctcttcaagtataggacacaactatggttcctaccagtagggagaaatgaataatcaatcttacataacacaaaagaaagatgagaggcacaaaaagacaaactgactttggcttttaagaacctaatgttaaccctgaaatgccacattcagtaacacaacaacaaaacaaaagattacagcagcaagccaccacttcacacagtattaaaaattcggaaataatgtaatagccttccttccatctcccactcaatctgttgtgtcatctttttgt

SEQ ID NO: 158986 - DNA, 1000 bp, Homo Sapiens
ttttttttttttttttgagacttgatccatctttattagtagaaaagaggccccttgaaaggactgggtatgaccaggtttcagtccttccagactctggattctgagaggaaggatggttccctggagatcagcatgggttcagtgagtacaaggaattgacattggatatgaaagggaagagcaagaccttcactcagatgtggggacaggaaaacaaaccacagtatagtatagaccacataatagctgcataatagatagtgatcagtttatgaagatacatattcttagaagcctgttgaatatcagtctcgttaacaagtgacactgttgtacattctcctgctggttctcactggcacaagacagcttcatagacacatacatattgcacaaaattctatgacaggtttccacaggaaaaggtttccacctggtctctgctgtttcctacagaaggggcataagttccctgagtcactgttcattgttacccagtgtgcttcctcttgtgaagggccatgagcctatccctttacttcattggcaaactcccctggcatcaaatggccttggtcataggcaagagtcatttaatatgtcagcaattgctgcagctatggccccttccatttggcaaccaaacttgagcctttacaaaaatcttcaaggactcaaaatgagatgtcttctttttgaaaatatacaaaccagaatcagcttgctcatcctcagaggatgttgactgtggtcattgttctttcgagaggagttgttgacttttcagggtagcttgctgttcccctgccagtacaacttctcttccacttttttctttttccatcggcagagaagcagcatcttaaaggtcttcctgaaggttctgttgcagagggcatagcagatggggttgacagtgctattgacatagcacaaccaatagcccaagtgccacagggtgactgggacacacttgtcacagaaggtagaaaccagg

SEQ ID NO: 158987 - DNA, 1000 bp, Homo Sapiens
ttttttttttttttttttttttttttttttttcctgagctctgacttttattagctgtgtgatcatggatatattagttaacctctctgggccaaattctatctgcaaaatagaatattggtatccacctcacagagttgaaggatcagctgaagcaacctaaagcatctagctagtgcccagtgcccagcaggcacaggggggtgcagtggggctgacagtgagggctgacagtggaagctctagctggccttagctccagctcataccctttaggtccaggagccagtgtgtgtctgtctcctctcctctgggcccagtgattgcttaggtgactggggtgacaggcaagtgggtggagggaatggagaagagtgtaccctgggatctgagggctttacccccaggactagactgccctctggttttggtcagacctagcacagcgatcttgcttcctagctggggcaccccaccctcacctcaaagatggtgaaactgctgtgcctcctgctgttgaggcaacctggaggcagagaaacctacaagtgacacagacccaaggtggcagttccacagtgccaaggggtggcagcaccttcaagagaatgaaattcagaaagatgcctttcacctacacccgatggtgggcatggcagcattgtcagcattcctgcagttggggcaggaagtggaattggtgagcaggtggggagggctggggaagatgaggcccctctgagccctagggcacacagatatgggtgctattctccaaatagtcactccacttctctgcctgccgccttcctgggcctgtgactgctgtgaggacctggccctgagcccatggttaggcagagtcatggaatgagcatccctgaacatgcctaatatagccatcccagcaccctgggctccactctgccccagcacccctgagaacaactctggctactgactccaggcagcaggactggttcaggagcagacctagtag

SEQ ID NO: 158988 - DNA, 1000 bp, Homo Sapiens
taataacaacagaaacatttattaagagctaagcgttttacaaatattaattcacttaatactcacatcaatcttataaagtaagtgctcttgttatttccttttacaggtgaccaaactgaggcatgggggtttaataagcttacccaaaactacacagcaaggaggaggctgtgtcgggaatcaaactcagtcactgtggcccccaagtccatgctcataaccaccaggtaaaaaatgtgcctcctattctaatttctgtctgacagtgggcccagtcatggtttcaatacagctcagcagagcaatgcagcaaatccaggtggcaacactaaaatactcagaaaagaccaaccaagcaaccaaagcataacatcagcaatagcacaaccaatgtgaatcatgagaaccctctgtctttattaaatttgggggaagaaatcaaggtcacgaaatcaagtgactggtgatggggcctagaaatgagtgtctccccccacccccggtttccgctctggcaggcgggtgttagcggatggtgtacttgtcccacttcttctcggggtcataggcctcccagcggctggcggggaagatgtgcttgttcttctcgtaccagctgcgcagcaccaccttgcccgcgtgcgactcgtccttctccatggtggcgtcgctgagcaggcgcacgtcatcgtgcacatcgaagctgaagagcggcccgctcttgcccctcgccctggcgatgatgaagtcgtagaaggtgtggtagtgcggcaggatgaggtcctccttgatgaacatgagctgctccacgccggcggagcgcagctccaggaagtccttgcgcagcccctgcagcgccttcttcaggaactgctgcaccgtgttgcccttgcgcacccgcaccgtgcgccggtggcccgagccgtcccagtagctgaaggtgacctccatctcctcgtccttcactttctcgcgctgcgcctcccactcttggcgc

SEQ ID NO: 158989 - DNA, 1000 bp, Homo Sapiens
tttttttttttttttttttttttttttttcacagtacaactcaacactttattccattgtgattggtatacatgtaagattgagacatcaagagactaaaaatcagtgcagaacttctctgaactaaagggccgtgaaaggcatgattggttttggcacacagagtggataaccatacattggctggaatgaggtggtcaggaaaataaaatgcacaaatctaacaccatgttgaaatcatgtctgagttctggagaaagttaaagtgtaaataattacaaagactgacatgcaactctttaccttacattattcatctacagactatttttctcccttagagatgaggagatggccttagtaatctgttcagagtagctgaaaagaccaatcaatacacattagaaagatctgcctgatttctatagcaattcattatagctgaagaaataatgctaaataatgtattttctctatatcatcctttaactaaattgaatcacatcacccaagtaattctgacttaacttttacttagttaaatataatttctcctgtcttttaatgtcaaaaagcagtttccgttagtttatccattggtgtatatcacaacagatgaggaaaacttatgtgatagtatctttccttttcaaaaataacattatgctaatgagaacatcaaagaagtaatactatgctgcaagtaatttaggttttcacatcatcaatcatatagggagtccaaagaagccagcctagcaggtaacatagcagagcagaatgcaatgtagaagaggcacacagagtctaagtgatttctccagacaaaagagaaggaaagacagaaagaagcaaaagaaaggaaaagtgaaaaacagccttctgcagaacaaattgttacaaagaaaaatctatttgcttgcaattgattaaacataatagagaagagttctttgatttgggatgatagaagtaaagatattaaaaattatatgctggt

SEQ ID NO: 158990 - DNA, 1000 bp, Homo Sapiens
ttttttttttttttttttttttttttttttttggcggtaacaatgctctttatttgtggcgtttaaaggcggggttgggcgggacagcgcccttgcgtgtattaggcacaggttcggaacgcagcatctttccaggggcttccctactagctcagccccataaagtcactggtttcctccatctggaccagcagccgcaccagccaaggcgcccactgggtgtcggaggtgggcgatgtcaatccccgtggccttcgtcgggagggtggagctggccaaaaagagagcggtacagttctgtcctggcatcatcattcattgtagtatggtcaataggtgccatgaaactcagtagcttgctaaggacatgaaaccgaagtttcctgcctttgctggctttcctatctacttttttgtggattttgcttcgtaacttctggattgcaagccactgccttcccatggccacctgatcgttgggatccaaggagctggtcttccgttctatgagttctcgaaggagctggtggtaaaagtcatcatcatcaaagatttcttcatccaagtccttcagatgagcattagcaggggcttgaggaaggatctccggttcccctggcaaactctctgggacaggctgagctgctggctcaggtttgccaagaactcgatagacagagcgcttggtctgtgtccttcgaagtaatctctctttgtccatcagaatatggtcgatctgagtcaagattgagcgttcaaaggcaccaaaacccttccccagttttccagaagccagtttggtcttatcgtgccatttctgaagtgtgcggttcctgtagactgtaaagtcggcaaagcgctttgccatgaagctgggatagtcctccatctccagcttcctctttgcagggacccttcttcgttgctgcttcttctcttctaccagctcatcatcttcactagaaatctcctcacttcccgcattgggctttgtcccatc

SEQ ID NO: 158991 - DNA, 1000 bp, Homo Sapiens
ttttttttttttttttttttttttttttttttttttttttttttttttttttttttttttttttttttttttttttggcagctcccggcatttattgattgcagcccccacagagcacactgcccttcccaggtggggtgaagcccagcgaccagggaggcagaggatgcagcatccgccccgtcggactccttgtcggggagaaggccctaaggaggaaccgcagcccgcctgggccattcccccagggagccaagcgggggggcccaggtgcccgagggacgcaggcacaatccctgaagacagagaccgcctgctggtgagtggagaggctttggcaaaactaactgttaaagccactgcagggcaggcagcggtgcgcgggacctcggtggccctcgaccctcacccacaatggctccagaaccaccctgggccactccctcccaggcactcgcttgtggtctgcgttgcttgttcatcccacccagctgcggggtctcgcggggagttgcagctgcccgaggacatggaaggtctggttgctctcagcagacacgaagtgcagagctagcacttgggtgagcaacagccaggctgcacccacactctgccacccaagtcctcgatggaaagtgctggaagatgctgctttgggcatcgggggcaggaggcagggataatacccctcccctggcccaggagaggggagaaatcagcctctggtagcccctgttcccctgaggagctgccagcgggagaggggcaaggccacgcagtgcccagccgggagagcctggtagccagagcgggggtggtgcagctacagctgagaggggacgaggccaggaggagctcagccagcaggtggggggacagcaggggcctgctgcggaggacgggtggccacggccagggaggtcgtggccccaggagcaggtgctgggcttgggactctttggaagaacctagcgtgtctggcctggcagcccagccattc

SEQ ID NO: 158992 - DNA, 1000 bp, Homo Sapiens
tttttttttttttttttttttttttaaaatagagcatttattgatggaataacaaaagtgcttttcttaaatattcttcaaaatacatttgtacaacttacaataatatatccaaaataactgtatatacaaaacattacctagttttaatgtatgtgcttttttccccaaaaattacaaagtaacttcttttttttttggcaaagttcaaccttaacagaggtgacaattttaaaggttggtttaagaaaatagaacctgagggaaattgacacgcaagagtcaatgacaagcaagagatttggaggaatatttttagtttgttaaattaaaaatgttttttagagtgatacttttcacattacaaaaataaaccaaaatgaagaaaaggtcactgtaaaatgatggaaaaaggatctgtagatttgcttttagtatttcaaatagccaacaatgcatgtcagaaaatgaatgcaagatcacaacagtcttgttatttactttgtatttgaagaagatagtgaaataagtggccacattctattttcttttaattgctattaatatggttgatctgattggctcttcgatgaatttcatccaagaagttctccagttgttctattagcattcgttttttaaaccttgatgcttctttaatgacattttgtaaaaatattagtcttgtttgtaaactgccttgcacatgcttcagtaaagtgaagattctttcatattttcttcctggctttcggatctctttcattatttgtgcttttagttcagtattgacctcttcatggcttctgcaatgcatcaatttctttcctttgttgagtgaagatgctggtatgttctcttcagcacattgttctttatctcttggctcctcatgattttctaaaaatccaccaacagtgaggtcattggttcctaaatggtcatgaccaagagcctccatatgattggttggccgttccagtaaactggctggagaaga

SEQ ID NO: 158993 - DNA, 1000 bp, Homo Sapiens
tgtaatttacacttttttttaatctggtaagaacagcatcagaaaacaaacttcaatctagaggagaaccaagagcagggagattggcagccaactattcccaaggccaaccttgtcacagaggaacctttgggtcataccacccctagggctataaatgtatctcttaaaaggtttctgggagtgcaactctcaacaccacaatcagaaaataacactcgagatcagcaccccaaggagttgacatctgtagtttagaaacaaaaacaaatggagctccagaaatgaaattacaaatcaatcacatgaatgacagccggccatcagttggccgacccctgctgggtctaaagggaaatctgtcattggggccgcctcgccctggcaagatggggttaggtcctggaagtgggccaactggatcaaagcgtggtctcagtggaggaaactggctgggcgtctccccaggaccaggaatgagtgaactgattgggtctccaacatagggaagtgttggtctttggtcatattcacccccgataattcctggaggaaggcgggagctaggaaatggcctagggtgcaaggggttgggatagaatggaatggtgtgagttgacgatggcaggagcatcacaaaccgccctttcggggattcttttctttgtatgtgcctcttcctgtacagttctttccaatctgtgtcttgaactctgacagtattgtctcgaaaatcacgcagatataaaaacctccacaggagtgggtcatttgaagcagtaaagaggtcacgacaaaccgcagacaaagacaagacggaacgaacatccagaagtcggaagatccgtagtttcagttccaatgggaggacgaccaacccaaatacatctggtaggttcagtgcttgtcgggtaaaagccagaagaggatacaccagctggtctttaaagaggcgagagagtttctgaagatctttgtatatgttggctacattttcccc

SEQ ID NO: 158994 - DNA, 1000 bp, Homo Sapiens
tttttttttaacaaacaaaactttattttcctttaatacaaaattaaatagcaaggggttttctttgtacagtgataaattagaaatttacagtacagacatcgatgcagacatacttttgtacatccttaaaagcagggtccatttcctttgaaatttagcaattcattcagggcatgtgtagcaggaagtttgcctggtacctctttgtcaaacatctgaaagtcccccagattggcttcaaggttcctggagctgtggggtggcatgaggacccaagaaaggccacagagcatccagcccgactgctgcacagagcaggggaagtcacattttatctttttttcagattacatccgatatttcatctacctttcttacaaagagctcaaggggccatcattttttgaccttttcaagcctcacaacatccctgtgaggtagacaaaattcagaaacacctccatgcctcactgggagagatctagaaagcagcttacccctcccaaagcccacagccaagtcagggccccagcctattagtacaatttgaaaactttcacaacctcggagagaagatggacccaacctttgtggcgcagagtggctcttgcccctcttttcagaagccttctaggatgacagtggtcatgtactgaatattgtaggagagcaaggaggtttaaaagctttgaggacatggctcatataggaccccaaaaaggtcctctacaaattgcctggggaaattctgggaattggctgatgcaaagaagaagagaaaaaaggtacatcagaaacagaaacatgctactatcagggcaactgagcttgccaaggggaagaggcatgtcgggggatctgtaagtcatttgtctcctggtactgtcaagtgtgtaatcaccgcacaagtgcatggcaagagacagcaacagaaagctctatgtaggctagagtgaaatgaaatctattatgtggggctccagtatctgatccttgg

SEQ ID NO: 158995 - DNA, 1000 bp, Homo Sapiens
ttagaaatagaagccactgttgtctttataaaacacagaattgtgctgctgctgctgctgctgctgatgttgcttgcttcagaaggaactgtacattacagctgctgggataatttcacaatggactggacaaggtacagctcaaagcaggacacaaacacaaatctcaaagggaaacaaatgcaaacaagtacacagctgtggggatccagagacatttccccatccatgctggacttgagagggataaaaagtttagaaactaaagtgaaaaccagagtagtcacacatgcccaccacatggctgctaagtgcaacatcacataccaattaggctggactgtgtgcacaggaaagtaatttcatttttccttattgctactacaccaagggactcagtgcattcaacaaatgtctttacttgcacaattcttggagggtttcctattttcctctgtaaagaagaaaatctccctttcccacctcattctgttttgtttttagctcattccttcccctccctttcttggatgcccaaacagcagccagaggctctaagtcagtatgagtagagtaagggagagcaccaacccagcctctctccctgcccagggagaaggcaagtcctattaagtcggaggaaagcgaaaaccagaaaatacctccttcccaatctgcttagaaggccaaatagtaaaaagtgccctgcatatccctgccatgatcagattttaagaaggaaggtattccagctaccatcctggattggcctaggccccatatataaataaaaataacgtcccccaatgtagtttccaaaactgccttttggctagtttgagatgatttttctaccctgatggggaagaaacgtccaaccttgttagttacacatgattccaggtccaaaactgtcccaccagccttacagatatcctatgggccagctaatagtcagtgcacccttggctgcccatcttgagtgctggccttattcaca

SEQ ID NO: 158996 - DNA, 1000 bp, Homo Sapiens
gaattcccacttttaatctctgttggtacatcagatgccacggaccaagcaatttaagttctggagcccgaaggcagttccaaaccaaggcaaggattaaaacctaactcaacccagcaaggtcttatccaagctctctagaagagaccattctgtttctagaaatgacgggacactgtgttcaaattgcttcgtcaagatacttaaaaacaagtaagtgttcctcattggttacaaagctggggctaatgctcatgtgaaaagcactccaactctctgagtccagccatttccaaaggacatcctttagtctctggaaatggagagtgcgattcagaaatgagctccaggggccctctttacgatcaccaaggacttctctccactcgtgagggtccggcttcctccagtgcatccttctcttcaggctggaggaagttttctatggcagagttcatcatgcccttccatcttcccgtcactgattatttagaagacaggagaatcacagaaagggcaggggctttgcagtaacctcttaatccagtcgggatcttctggagctggatgccgggcaatgctgtcatggagcaaacaccttctatatatcaaactctggcaggactggtaggttaagaagcaccggagccaaatgtggccattggaacagactgcctgtttgcgatctgtgaatggcaagatctctttacacaaactacagtgctcagggaaagtctgtttgttcatcttctttgagatatgtccaatcagcacccgtgcagttctgtcatcatactcttcatcagacattaaaaagttacagagtccgcgggtggggatgctagtgttttctgtgatccaggtgtgcagatacacttctcctaagactggcttcatgtgttccctggtcaagtgcatctccacagcttcgattttcccttggatttccaggagtttctcttccattggctcacggcctccagcatctccagtcgtgggg

SEQ ID NO: 158997 - DNA, 1000 bp, Homo Sapiens
ttttttttttttttttttttgaagaaacagttctcaattatttaatgcttgatagagaaatggaaagaaatcctgaaaccaaatagtatgtactgacttgaggaaaacacagaataacaaaccaatagttttgctgtttgttttagtaatgaacatgaaaatgtgtccacctctccactttgttggccctggcctatgttgtacaattccttagacacaggccagaagagagaggtagtatgaaaaatgatgagccctagagactatccaaatttgctgactatatcagcatttgtttgcttattcccagcttcctatgctttggcataattccaacccatatatgcttctttaaaaggcaagcaatttccaggctgaagtcatcaataccaaccaactagggtcaatccattctgtcacatctgcaattctcaatccaagatggcacagatcctccaggcgagaggtactgcttcctaaagggcttgtgtatcccctttggtagcactaaatgaatgactttcatactggtaaagacgatcagactgagacataatgttacgggaatatgatgtcttaaatgtcactgaaaggtggagcagatcccactgaagcatgcacagtgaatccaatcagagttcaagagaaagtgtcacagatgaagcacattatagtaggaaggaaacaatggatcaagggcatcaaagccaaatgggaaaaaatcaaggatttaatacaagggcaaatttcaaacatggcacaaagggctaaagtggctctctctactaaagccttggaagtgcctaattgctaatcaaacttcagctaacaccatcgtgtgtcctatttgggcagtgcatcttttaaagctctaaatttaggtgggaagccgggagggggacataacaaataaaaacattaaaagatggagcttctaaagttctagaactacccagctggaatcaggacataggctgagtctattctgcatgtgccacta

SEQ ID NO: 158998 - DNA, 1000 bp, Homo Sapiens
acagaacaaacgtgttctttactgtgaagttcattatgaacctgaatccctgatcatttaaagcctattatccaacttatgcctcaagcagcaacatttttgtgttcaacaatttaacttactacacacaccttgtgcaaaatcacaaaccttctcatacatttatgagcttcagaatgtaactgggaagtgtagcacagccctttgtccctctgcattgcatggtgagaaacggctaaagcaaccatcgccgcattctgttttatgagcacaaaggaacacctattcttatctgggccacgcgccccggtccttaggaggatgccagatccccctgggatggcaatggcagaggctgcacagcttcctgaagatgtaggtaccacagcaccagccccgggcagggagccaggccaagggcaacgacagaatcttccggagacagcacagcaacccactcatttgtgtgcacccgcacccacaaccgtcttgcactgggtgcatgtcacgccaggtaggaagttgaggcctggcctcacagtgtggaccggctgcgggacaagaacacagtcaactttggctttgctggaaagctgcttcagatacataactccggcccctcctgaaaatgatcgttttcttagccggggccctgtgctttaggagaggtttactgtcagagcttgctgttcttttgaaactgggccactaggctgaggacctgctcagaggctttgatgatcttggagccgaggtaggaggtgctgttggggcccgtctcctccaggaagtagcggtagttggccatcaggccgcaggagccggtgatgcctctgaggctcacatccgccatccagttgatgcgccacagcaccgccccgttctgcaggtggaagttggccacggggttcagcgcgtagccgcggtgcttctctccatacaggtaccaggcgcacagcctcatcagcggagtctgcagcgcccgcaccagcttctccga

SEQ ID NO: 158999 - DNA, 1000 bp, Homo Sapiens
ccacttcaagttttattttgcctcttgcatggtcttttacagttcgttttctacaggaactgagctctgatccaaacaatcaataaaaatgtaattccaaccttaatattcataaccaggaaatagcatagcacttcatgatcctagagtgatgaaagcaagaccaggggcatctgtttcacagtcacctgtgaccagaccagccaacatgattactaaaagccaagataaaaccaaaagcaaacttgctaaaaaatcctgaattccatgaggttaactctgaaatcctccaaacaaaatgctagaattgtccactagtgttaagacgagaaaactgaggaaaactcagctgtcttactatctggtaagagtcttcccttcatctcaagccctcaaaaatgcaaacttggttccagctttacaacataccatatccttctatcggttaaaggtttctaacctaaaaaccttctctcctttcttctcacctatttagtgcatactcaaaggctttggttggaagtcactaggtaccactaggtacaatgctttagggctctctcaaagcccacaatggtggagttctgtgaaagaaaacttaagtttctttctctttacccctctcccctcactcagctcaaagttaaacagctgatgcaaaactacagagaagcaagataacaaaatactgttatcaatctatggagaaatcagccagccatgatgaaaaaatgagtcctgccgactatctgccagcttcatgctcagaacccttaaaaacacagaatctaaattaaaatacatgaagctttcacaatccggttaaaggaaaaaggtaactgtaaataactggttaaagtgtgctcattcgttcagaaattagatacaaacatgcaagaattaaagactctgatttaataaaatcagtagtaacaggtcttgagattaaacaactgacctgagggcaaatgggaccaatcagtccctgaaccctacctga

SEQ ID NO: 159000 - DNA, 1000 bp, Homo Sapiens
ttttttttttttaaaatcaaaggtttaatgtcctgttacggaaacattccgagggaaagcagttcacagcaggcaccgagggcccactggaattgtgtggatgctcaggcttggagtggacgctcgggcggcccgctttggggcaggtgcggccgtgtcaccggcctgcacggtcatcccagcaaatggctgggagcgagacgggtgcagaaccagacaaggaggaccctgctgcacctgacaccaagctgcccccaacacagcggtaacgcctcagctccccaggcagcgatgcccccaccccgcaggcctctgtgggcgtccgttcatcctggaaagagcttccggaatttgccgtaggctgagttgctgatgatgaccctcacgtcggccgccccgtcctcagggatcacgtccacctcctgaactgtggcctccttatacagccagctgagctgcgcccctgcgagcctcacacggagagtgaggatctgtctccccgtcgccttcaaaaccgccgcatcgagctcagctttcagctcctggagcccgtggccccgcagggcagacacgggcacgacgttcggttccgtggggctgtacccgggcacgaggtccaccttgttgtgaacctccaccatggagtccaggagcggggcgggcagctgcaggccacgcagcgtggacagaacgctgcatttctggagctccgcctcggggtggctgacgtccctcacgtgcaagatgagatccgagtgggccacgtcttccagggtggcggagaaggactcgatgaggccgtgcggcagctgggagaggaagccgatggtgtccacgtacaggacggtcatgcgtgagggcagcgtgcccgcgtgggccgtgacgtccagcgtggcaaacagctggtcccgtggctggatggcggcatcgcccgtcagtgccttgatcagcgtggtctttccgcagttggtgtaccccaccacggagatcacggggaact

SEQ ID NO: 159001 - DNA, 1000 bp, Homo Sapiens
tttttttttttttttacaaaaataacagggtttgcacagctctattaattttttaaaattacacaggcaaggtttatgcttcagtataaccatttttactttggatttaagtgggaattttaggcctaaaaataagattaccaagcagaggccatctagccacacagacacaagacatcttgagctccatgaaactagaaatgtggtgatgtcatcctcacacgggggggctacacatccccatcgattattttaactaaaatacaaaagcaaaatagtgtgttaaaataatcctctactcaatgcattagcacatataccaaattatactatctgcatgacagtctctaggtaccaagactgtatttttgcaagtgctattctctacttcattaaatacagtacccagccagcaaccacaaaaagagaacgcatgctgtacagcaagagaaggggagggagacgattttcagggccataacttccatggcaaccaaaagaaaaataagtaagacaaatctcacatgacagatataaaactaatttgcagtgacatttgatatatagttttatcagaagtaatacatttaggttacagttacatgaaaaagagaaactatgtgaaattataggctttctcctagaatatccaaaatgctcatcaacagttaattagtacaagaaagatgaccaccaggtgattgaatagacagaatgtcatgtagtattttaaaaacacagattctgggactagaagctaccaccaaaatatccagaaatctgagttaacaggtcctttattttgcacacttgctgctgatatatagaaccacgaagtgtttgcacagaccacgaatgcagccgctagcctagaggctggtcacagaagagaatgcgatgaacaccgtcctgccagtgtgaggacggagtgtctgatgtgtttgtgtccccccaccacccccccatatacaaaggccatctctagggcagaaatctctca

SEQ ID NO: 159002 - DNA, 1000 bp, Homo Sapiens
ttttttttttttttttgcaagacagtaaaaagagtgaagagaatgaaatagaacagtttactcaagctatctttatgtccaggaagaaaaaagattacatgctgctcgcagtaagtacgagctttccctgcaactctggctgcaggcgcgcaagccgttcaccactggagttcctaccacagcaggggattgagaaatgtctccaaacactgaaaagctccatgtcaggactggatgtgtggttgataacctttgttcagtaaaacaaatcatagtaggttttgagaaggaaaaaaagaatgctcacaactgaatcggtagagtgaaggtttatcagacaaagggacatgaggcaaacaaattttaattacagaaaccaccactgcaatgtcatgtagaaaggagaaacaagggactagcttcctggatggaccaaaaatacagtttatagactgtttcaatcctaaaactaagacaatttctagatttacctcagacatgagtagacgtctggaaaatggatggaattcaagttacagaataccatattttcatgagtgcttatgtaagaacagcaaatgataacatgtaaccgtaatttacacgaatacttggcattctggagctactttagttacttttgaatgatcaaagccctgcccaactaaaccacttgtgatttgtcagttattccattgcaaatgcaggctatctggagcagtctttaaatttgagatcacattgtttaaaaaatatatatttttatatcgtccagtactctttagacagatgagagagtcaagttcccacatggattggaacatacttcatgtaagactgattttaattaaatttcagcactttcatagaagggactgtcccagatctgtaactgttcaatgttgtattcacttcacagtgtatcaagcaccagcgttgccatggattggtttcaaataaccctttatatataattttatatttatatatatatagttat

SEQ ID NO: 159003 - DNA, 1000 bp, Homo Sapiens
gcctgacagatgatgatatggttttttaaaaaagtttaatattattacagtcaggaggcagcggctggaagatactcggctctttcccccaagtccaggttcagtgcattggcccccacacagcaccccagcctcctgcctgggcaaggaggccctgcgctcagtccagcttctccagcacagagggcacatacaccaggctgagctcactgccaaagttgcagacaatggcagcgttgtccagcaccaggatctggcgggcaggctgggcctcactgttcttccccaggtagactgtctgtaacaggtccccgtagtttaggtcccaaaaggagacacagccctggccgccagtcaccagcaggttgtctgagatgacacccaagcttgcaccacagcccaggtcctgctgaatggagtagaacttgatgcctgtgctgcggtcccagatgctgatgaggtcatccaggccactgctgatgacacaggaggtggtacaggtaagggaggtgacatccccacggtgagcaaacacatggctgacccggctgccagtcagtacatcccacaggcagatggccccatcttgtcctccactggccagcaccatggtctggtcaatgtacacggtcgtgatggcccctgagtggccctgaagggtgaagaggcagcacgagtcctccagacggaacactctcagtgtgtggtcttggctcccagtcaccaagcgcccagcagcggctttcagggctgtgatgggtttttggtgtgcacagggcactgtgtgggtcaggtgacaggccactgtgtcgctgctgctgtacactggagaggcaggggaactgccccgccctggggtccctctaaactgcagggggctgagggcagtgtgggtctccaaggagaagaaatcaagggaaccgttgagccgtgcagccacaatccttttgtccaagaacaccagagcggtaatgcctgaggagacctcctcgctgctgca

SEQ ID NO: 159004 - DNA, 1000 bp, Homo Sapiens
cctatattggtttttatttataaacagattgacataaaataagtccagatggcagcgtgagtagctgtgctgctgacttgcttacaaggaagcctgtggacaggcgagtgggtggaaccgactccagcctggaaaacctgccctcccatcccccttagcgccttcttggccttccggcctgattttcttcgacagcagttctggccagggcaaggagctgtggtgggggcagtatgagccagggactcccttcccacagatgaggcctagggctgcaaaagggccccgtgaagagaggagaaggtgacagggatccttctcctccccatatggagtgatgtggtcaaggctttatgggtctctccacctcaaagagaaagtgccctagggtagtgtcctctgaagaggggccacgcctatctgcagagggcctctctgggaccaaagcagggcagtctccctcctcctgaaacccagtgtctagtgtgggaggagtattaactacagggtttgcccaagtgccagaaacaataaattaacaataagatctttttgtaaaaaaggtagaggtttgcaccacgagtttggattcaggggaatctggtgagaaggtacgagctgtggggcgatggggtgccacagcaagaccaggacagagttggccttttcctccatcacgtggaaggcattcagcctaaactcctggtgagaggccagccagggttgagaaataaatagagggaccttagagccccggcagagctgagggaagagcagcaccagccctggacccccactctccctcctcagtccttcatggaaggacttatcatggcagctgtggctaggagtggtggctccacacagcctcttggagtcctgaggtggcccggaaccccactgaggtgcctggggtgggctgatgcccctcattcttagaagaatgcccccacctgctgccacttggttgtctaggctgcctctcctggttcagaacttg

SEQ ID NO: 159005 - DNA, 1000 bp, Homo Sapiens
tttttttttttttttttttttttgtctaaatgtttttatttgaaacaaatagttgcaccaagcaagaggttactttgcccactccaaattaaaacagagcacaataggggcaaaatttatttggcaggacagttccagtatgtgaacatcttcctcctcactgtggttggggtaactttactcatatgcagctgttcttacacaaaacattaaccccaaactactagtgtcacataaaagtaagtggtcttgactttgtatgtggggcagcatgttctataaatgctgaaaggtgggagaagcacaaacacaacccactctttaaaaaaaactaaataattcaaagtagaattttctatcccccccatttctccagtaataaaaagtagtgctgggatctggcacccagatttggtttttatcctgaccatttacaaagtgttcccccatatgacttgcatcattagggttatgggtaagagttcattcactttggagagacctgtgcctattccttcctcctcttcttgccttcatgctcgtgttccttggggcggctgctatctgagggtcttttagagccaccatgctgtttggcttcttccaaaaacttgtccaaaccaaaaggatcttcctcaaactgcactggtccttctcggcctctctgtctacggtctgaaccagaaaactccttgtcgggaacaaatctgttggtctttattctggcttctaggtcatcaccatacatgtccttgtccagatttttactgggcctataaatactctgggccatatctttaccacctctccaggcttgatcataaacattataaatttcatcttctccacctgcaaatccactgtccatacccttggattggttgaagagcctttggtcatactgaacttcattggaagtccgaggattaggaacaccgagagcaataacttcactgatatcccgattttcatttctctgaagtttcgacctcttatcagg

SEQ ID NO: 159006 - DNA, 1000 bp, Homo Sapiens
tttttttttttttttaaaaaattaaatatttatttgaataacaagtttaagttcgagctgcaatgttggcaatgcaggtttttaacacagatcacaaaaagcgtgcacaaaaaagtactggcgcaaaggacaaaataatgctaagaattaggccaaacagctgctgattttaagaaaacaaaaggcctgaaatcactgtacaaaatagaaaatgtattaaacactaccatccacagaacagtctttactattgattatatttaaaaattatttgtgtaattatatattgaattgtaaatgagtattatacatgaacctccattcggaaggcaattccttgtagcactatagaacatctaataacattgcaaaaagtatccttttttgctatcgataaaacagttaatggtattactgtaaatatcaggaaggctacaaaaaaagaaataagatttcttttttgtcttcaaagtgttttccatgcaatgaagcacttgctgtgttgaactgaatgcactactggagaatgttctgggtccgagatgctcttgagagacaagactaggcttttcaaatcaaacactcaaaggaatcatgcaaccctcttatgactgggataccgtcatgtgccacttaccaatgctgtctctccagaaaaccattcaagacgcttaaaaaaaaaaatcagacttatatgataaatatacataaaatgaagacaccaactgctatttgacacgactacgggtaatgcctgtgctatgtgaaagcacctttaaaaagcctatgcggcaagagataagtgtctaaagattcaaaatgaatcaacagtattggataacaatataattctcaactcagaagctgcctcaagattaggtgcatcttcagttaatgtaacaggaaaaaaaggcaatggattttattttattaattgtatccacttacaaaccgacctaaggtcaccccgatgtgtagacacaatgagatttttgttgtt

SEQ ID NO: 159007 - DNA, 1000 bp, Homo Sapiens
tttttttttttttttttttagtttttcaacaaggtttcttttatttatttagcaagaaattactctttattgatcaaatcaccaggaatctgccgcaaaagacttaacatcttaatgaccactgaggcctgggctctgaggcttgctctgcctctcccagtccttaatggggtttagagggagagacgtcattaacagagaccaagtcagatggttgcaggtcctcctttcccagtcatcagacaagttgctcaattcttgtccagagcaggaaagagccagtacttcagtaaaattgaataaagaatttgatgttgcattataagatctctcttaacaatttagatttatcaacaatattggtccaaaactcatttgcttctaatttttttcattttgcaatttactttgtgtgtgtgttactttaataatctcactccctgtgcagaaattaatcaaccccgtgcaaagaaaaatccctcaacctggaatagcttcatcttactttggcaagagaaaacagaggtatttttgctcctcttctacccaagtgatgaacaaatatccccccaaagttcaaaatgttactctggcctcggaatgcatataaagactgctttagatgggctgattccaatcacctagaaagggcagccggaaccactatgcaggcagccttctttggaaatttcttacaatcaactcttgagaaccatccgtgattgtggacaatggctctaaggtccaaacaacttctgttctttcatctcacgagctaggctcagaggaggcatttgaactgtcaggagcaagaacagcagctgtggccccacgaggcaggacttcaataactcgcggcttgtcaatgatccgggccgttcggtttcccttttccacaatgccaacgatccacgcttggtgaccctctccgtacttggaggatttgatttcagaacaaaagcgagccgcctgttctcttggcagacaaatcagtaatccc

SEQ ID NO: 159008 - DNA, 1000 bp, Homo Sapiens
ttttttttttttttttttttttgaacacatctgagtttattctgccactgctacagggcccactgtcatttccagcccactgaggttgagggtatggccaggctgggattcacacaggcccaggatgaaagggacaccgagtgtgttggggtgggggtggctggctttgatccctacccctaccccagtgggttggccaggtgatcagagcctccaggttccctcacacacagcctggtacatttctgccgtcaggggccggaaggactgggcccggttgtccagtacaaacagagggtcaaccacgatccccacattgaagccctcacgcaccaaccgggtcttcatcagtttgaacgtgctggtgacctccatggcgtcctggatgcggatgaaatggggggtagcgtaggcagggagccaagcgcgaacgtgctggtacaacttctccccgtcgaaagtctggccgggggctagctgcacagcagccatgcccaccttaccctcacaacctggcacgcacacgccatacacgttaacctgttgcaagaagtccacctgcgacaacacgccctccacctcgtgcgtggacacgttctcgcccttccatcggaaggtgtccccgaggcggtcgcggaagtagaggaagccttcgcggtccatggccagtacgtccccggtgttgtagtaaacgtcgcccgattgccgcacgttgcgcaccagcttccgttccgacagctctcgggggccgcggtagcccacgaagggttgctggcttaccaccttggtcagcagcagccccggctcccctagccctacagggatgcagaagccctgattgtccctcacaggctccgccgcctccatgtcgaactgcaccagctcaaagggggacagcattcggaggaggcagctcatcttgcccagggccccgcagcgccccacatagttgactaagcccatgttgccttctgtggagccgtagacttcccagatccga

SEQ ID NO: 159009 - DNA, 1000 bp, Homo Sapiens
ttttttttttttttgagttttaaaagtttaactttatttttttttactaaagttcagaaatttctgtaagacaagtacattaatgaaatgtttccaaagaaatactgaacaatatatactctagtttgctgaggttccagctcgagttcaaacctaattcttgtgcaataaaaatcagcatggatcttagatgatctagaatacactgtgttttgaaatccacagctggtttcatttttaaccattatgaaaaaccagtactcctattccatcaaatgtgttttataagcaataataaattcagatccactgtattatgcaacatacatctttggaaagcaacataaacagtgagatcagatcagtagaaatatacacagttaaaagaaatacacaaagtactgtagttttattaaaaactactacttgagaaagaaatctttccacaaatagcataaaactgtagaatgatgaaaggatttgggaaagctttacaaaagcttaattccaattgtatcttcctgagggtggtggcaaagggtatttccttccttctctgggatatccctgtctccctccacgatcatctcgtctgggtggatacccaccaggcccagctagcatctggtactggtttggctggaaggctgcattctgggtttgcagcatccggttccatgggagcagaggttcagccccaacgcctctgtcaaacctttgctgctggaaaaggggaggaggacctcgccaggaatcctggggcctcatatttgacataagttttggaatctgggcttgtcctctcaaaagcggcctgtataagtttccctggtaagtcacaggtggtggtgcagcattgctgtaaatgccagttcctgagcctcttggcatcacatggcccaaagtcctgaaggctgcctgatccaggtgcacaggcctccggtcacggttaaagccaagctgaggcttccactgccgtccattgctggatttttcccag

SEQ ID NO: 159010 - DNA, 1000 bp, Homo Sapiens
ttttttttttttttttttttttttttttttcagagataagcaacttttttttccatttatttgaaataatatacaagaatatagtgtgcaaaatttaggggcaacatcatgaagaagtgtgatgaactgaaatcaattttacagctgtgattcctaaccagaaacaccacttggtaagtaacatgaaaagccatgattgtagctcagagcaaaagcagctgtattgccaatgtatttgctctaattttagacagttggaggaaaattaaagtgcaagtgttgcactgcagtaagtgcaaagtctgcccccaccataaagattatgatgacaaaatatatttaagatacatggctgaggagatacagaacacgaagttaaaaaatacaatggtgttgactgtttgttaatagcaccattacagtgactatatcccaatgctattaactaactttaccttggcctgggctaggtctccattggaaataataacggatggctgctgccacctggtgcatcaactcagcatgccatggtaactgcagcaggtggctcttaggctgggacaccaacaccagccacctgccccatgttctggtagcctcttggcactgaccagactaggagcgcctatgtttggcacagatgctgagccatgtggtggttactagaggaaaggccgactcccagcttctgcttcatttcatcatgtgtacaatacagattaataagcagtaaggagccaatgtataaacagcagttacatattttttaaattcccctttcgtacaatttaaaataaaacatgtatacacttctcctctctttctactgtactttagcaccacaggatatcaattttcaagcctattattacctgatagacatatatgaagtttggaagaaaaataaggcaatttggtttaaaatgttgatagttttagcttaatgctctaatggagaaagcaaatcctcactcatattattaaatcatttcaagac

SEQ ID NO: 159011 - DNA, 1000 bp, Homo Sapiens
tttttttttttttttttttttttttttactttgttctttcttttttatttagtcacaacacatcagtacaacagaggtcaaacccagttcagtggaggtcgtttaactacacctgctaaaagaataaacctgaaaaatgatattttatagcccaaatcaaattaaataaatcaaagagaaggaggcaggaaagcccttttaaataccttggcaaccacagttccatgcaccaaaaggaaaactcacataaaaatttccagttaaaagaaaatatggcagtcccaggaaaattaggttatgcatttaacagtttccactgtactactcaattgaccactcgcacaccatgatcacttatccatgttaacatttgtgaatttgagatccgtgtgattaaaaattctttgtgttgctggggctggtaaatgcaggcgtattctattcaattaccttcagtttcctttccaccaacactccaaatgagacctaacctatcagcggtcctcctaactaaatcagaactgccagtcctggcagataccagcagctggtcagatggattcaggccaccaacagtttgtacattcacctttctgctataggaggcagacaatttactagtcttctttcttggataaagctgatcatctgatttgtcaacgctttgctcagaaatataaaattcaatatagttcccctccccccaaaagaatattatttatacaacaccttaatctgtcaaaatattaacaaacagaatcatgttaacattaagcatagtggtttggaaaattaattctaaaaacagaccataactatacaaggagaaaaacagaccaaaaatacctaaatgttaagattccccaaattttgaggcaaaaacggaatcattctggtttacaaagtaaattaggcacagtacaaacctatcacaaagtgttggcttatactcactatttcaatttaatgtcttgaacaaaatttaacaactagtttttaa

SEQ ID NO: 159012 - DNA, 1000 bp, Homo Sapiens
aatagtcaaaaaggacttcatttaattagtggtatgtaaagactcttgcatagaaaaaggttacaaagtaatgcaaaaaagactaggtacagtaatttcaaaacaaatatttaaaagtataattttgcataacgtttaacattctcataatgtttattgctttctccacacagtagagaaatgaagtgcataatacatgctgtgtctcttatcttttaaacaaaaactctcacgtgcttgatttcagcatattaagagattattttgtcattaaacgaaatcgaaaaaaacaaaaccacaaccccattacatagcactagtttaggcatgggcaaaaataacttatgtacatcccattgcatacattcatcttgttttgggatcaaatgcaatcactaacttgacaaagagctttaaaaattgtagcttttctcttcctagtgctccctccttgcttcatcacctccagaaatgtaacttctcccaaagggtgacaagaatagatgttgcatcattaggagaaaatgaagaggataaatatataaaaatagtcctaatgaaactgaataaattaaaccaaactcctacaaactggagagttttcaagttggcatgaattaaatagcctctggtggacacatggtaggcaactgctcataggtgcactatataaatgtaaggtttatataaagcagcaccatattttgagccatccaaaaaaaaaagtgcctgggggcctgcaggcagagcagaaatgcttgttaatctgagaactgatgaaataattgcttataccaatgcactgctaaatgtcacctcttggcatgtctgtacaaagaaggcaaactaagataaaactagatctttcaacttgaaaattattttcagcagtcattttgaccagtaaaacctgttggtttcagcagaatactcttctctggcatggtattaaaatgtctgcagcctattgcaagacttctgtccctttcctttcttaacc

SEQ ID NO: 159013 - DNA, 1000 bp, Homo Sapiens
atttataaaaatatcatttatgaaatgacaaaaccagtattctgcagggtgagaacggcacatcagcttggtaacaatattccagcacagcatataaatgccatcagttattagtctaccctggccagtactttgcatacatcatgcccaacctttacaacaatcctgttatgtccatttactgacatcacattgctaaatgcagatccctttgattctcaagccatgctctttgttcagccactgcaagtacaaaccaaattctgttaagaaaactcatcattgaactggtattttatcaacccaatatcatataatataaatagaatcaatcaagcattgctcaaagcaatgagccagtggctaagaattgaaaatcaatggaattgagactttcttctttaagggggaaaaaaaaaatcagaaatgtgtgttcccaaaaaaaattatggatatgtccaaactgtgccataaatgttagattaagttactttcaaatttttttaattctaatagccctttctctatttttttcttctaattaagtatatattttgtaagttttccatctgaaattttattaccagcaatgaagtacaaagcaaaagcagcagaggcatgtcagtccagataaaatattgtcacaagccataaaatcattagaaaccaatgatgttgcatgctttcttgatggcaacactatctgagagttaagttgacactgaacactgagtcagcttggaaaatgtccatcagtgtcaaggctacaaaagaaaatattaaaacaggacaccaatttttccccttcccactgtttattttatagcttttgcatcaggtagtcaactgaaacacttcaacatcagaaagctggcagaatgttaaggaaaaggagtgattatctctccaacagatgtgacaaaatggtttcaagttggaaacagaatttgcataaatgaatcaactgaatggagtgggggagggcagggagagagaagag

SEQ ID NO: 159014 - DNA, 1000 bp, Homo Sapiens
gagatttcaatacaatctatattatctcatatatagatttcttcctcactttatttgctcacttctgtcacgcatttaaaatgtcacagagaccaaaatagagtggctttctggtggaactcatggcagtcatacaacaagatacaaaactaggagactctgtcttctcatacatcatacaattaatttttcaagtattctttatgtacaaagagctactctacctggaaagaaaattaaaaaaaaaaaagacaaggtaggttatgcatcctaaggaggaggaggggatggagcggtcgggcacatgttcccgtccccacgaccccacggaccgctgattccctgccactgagctccccccaccctccacgcaaacagcaacgctgggcaggcgaaaaccaagggagtgggaatcagcagcactttggcctggagggagaagggaagccacggtggagagacagcttggtgaaagcagatggcggggcagggccagggctggtcctcagcctgtgtctgcacccaccctcccgggcagcttgggcccaactgctccgcccccccaagatggagggggagagctggcctctggcacccacatgcaggcctctgccacgaggaaaggaaggaggccaggaagacggctgggccccaactctcctcacaggtggcagggagggaacctgttcattccaggaaggaccaaaagaaagaatccccagtgaacaccggcagggtccctctcccttaccctaccagcttctccaggtgactgcagcccaaacccagggataatctgggttttaaatgccaggacactttgcctgtagggacacgtgttgtgacacgaggctcttcctaagtcaggagctagtataagcccagcctgctgggggttccggaggccccaggtctagaggtgtggagggggagaggaggggcttggtggtcctgaccactcctgaggcctgtccaagggctctgggcccagcactgcagg

SEQ ID NO: 159015 - DNA, 1000 bp, Homo Sapiens
gaaatttagaaacaaattttatttaagatctgaaatacaattcctaaaatatcaacttttccagaaaaccgtggctacacaataatgcattgcctctatcatgttagaacgtgcattagactcaaatacaaaaaccatgaaacaaatcaccatccttcaacaatttgagcaaagatagaatgcctaagaacaacatagatggacttgcagaggatgggctgttttacttcaagcaccataaaaaaaaaaagagcacaaatgcatgggttttcaggtatatacattaagttgaacctttggcactaggaatcagggcgttttgtcacatagcattaacacatattagaaaattgtgtagtgtcaaagggataggaaccaccagcattcaagcaatgttgtcaactaggcaataaaatgttctactgaatgtttcttctttgttctaattactgcatacactggtagcaactttgaaatgagaaaaggagcttacactccttttattttctgtttaaaacagaacggaaaacaaactgaaacataagccctgttatacattaacgattttaaagaacatcaattttacaagaaaaagactaagaacaaaaagtgtttacagatacaggacaaaaatggtgagctgtctgtagacgctcacagggctttgcggtggtactcagcagaagccactttgtaatcactggcagtaaagagagatgcagaattctttgccagatattttaggaaatcatgcaaatagcccaacaataatgcaaggcttttctcatcaaggggcgtataggccaacattgctccaattcttacaaataatctcagtaggtgtggtgctccataaacctgggacattggagcatcagggtgagccaagaggatttcagcatactggggcctctcaaatttgtagagcagctgagtgcccaacatcacattgaaatattcttttattcctgccacaacttcattaaccgcatattcctta

SEQ ID NO: 159016 - DNA, 1000 bp, Homo Sapiens
ttttttttttttttttttacttgaaaaaattcacatttatttactgtcaaaccgtgttaaactttacactggatattagtgatgggctcattattaacaggtttacacaaagggatgaaaaaaaagcagaattttgctgaaacaatttacatttcattagaactttatcataaaataaattaattactaaatataggcagaaggaatatggaagagtaatatttatgttttattttatttttttaaaaaagaataggcaccttttgttcactagaaagtttgtgagaagtgcccagtgccctctttgccctctgttcaagaataaacaggggtgacacacaatcttttctagatttcatcacttttgtgcaaggcatgacataactggcttcaaagagtttgtttctccccataaaacacgttcttttggcaataagaaatttaaatgtaagtaataaagactaactttgtcaaagcagaacactgtatacagtggaaaagaagtgaaaatgagtagaacttaccatgacaaagtgtaagaaaaaacatttcataacatgtgcaaccaagagcttttcacaatattttcttcactctttaaaattattttaatgacaattatatttcagttggacacaaatgtatttattttaccctagcaatagaacaaaatataatttctttagccatttttcatgagaatagttcattgtacagttgaggaaacatatgaaataaggcctgtggcttgattgctagtggttaagcatgttttcaatctttgccttaatgtaaaagatttgcagtgaactgcaaactgatgcagaatatctctcctgcttttccaagtcttgtcaggaatagtaaggtacagtaaatttgtcccacaggattttaaagcctacgtcttgtatataatacaatgcaggcctacaaaaatggtgcagccatatttacaaatttagttcacagactgctgcagtaaaatggctggaaagtt

SEQ ID NO: 159017 - DNA, 1000 bp, Homo Sapiens
cagtgcatttgccatttttatttcgctatgcagaaacatacattcaccatgggctgtgatgcaggtgatcgtgtaatggagaatctctctttttgaaggctatttataactaacactaaatagttttaattacagtggaaattctgtacagtttaaggcttggctctgaactagaatgtaaatatggaccagatttgaaaataaaacactttcttttcaagtaaaagaagaaaaatcaattaaaaaatacacggcacggaaaaagtaactaagaaaacaaagccacaggaagcccagcagtttctcctgaagtgaaatttcataatattgtaaactaacaaaaatacaggttttcttcccaaaataatgacaatttaagctctctggattgaacacagaccaaagcaaacaacaaggaagaaatcgcattaatatgctaaaatcagtactaccttataacaaattaaatgagatacacaaagcaagattggaagcattacatatttccagagggtcagagagtcattactgtttatgggtgagagtaataaaaccagatgaaacaagtacaagttgtttactgaataaacttggttattggcacatctaatctgaggaaaatctgacacaccggacggacctagacagcttctagcatttgagggtaatcttcatttattgtaaatataaggttacctaagaaattgcaattttgtttagactttaataataataaactatgaaaggcatgaattgtttatgtgttacatgagaccacggtttatattgttggttatgaacgtgcaggtatagctgaaaactgagacattttgtgaaaattaaaaatgctgctcttttgtaattttatcgttgcttcatgcattatcggtttagtgatgctgaatcagattgctttattatgggaagatctctctgccagtgtctttattaatggtcaaggtcaattcttctggactgaaattttccacggacagataca

SEQ ID NO: 159018 - DNA, 1000 bp, Homo Sapiens
aaacataagtgactttaggagttttatttatggagcagttatttttttaatcaccaagtgattttatattatatatatataaattttcttcctttcctttgtggtttttcgccccggtgcttggaaagatggaggcaggggttctggtcctgcagtctgagggcaggctctcctggcaaggccgtgtctaagagcagattgtaggacatgcgatggactccccaggttcctctgtcccccaacagagacacttctttcctccacatggaccaaccctcacctctaaaaaccatttcccctcacagtcccaaagaaaaggaaaacccagcaagggcatggtccatctgctgccttttctgggctcccttttctgctgaccaatttacgtgcacggtaaaaatgcatgtttttccaaaccccaaaaaacaaacataaaaaccaaaacccaaaagaaaccattggcttggaaatttctgtggatgaaatgtcccaaagtcagaggcactctcccggcacaatccctgctctgaaggggtctctccacctccccttttataaaaagacaacaaaataaaacaaagtaatcttttcagtattttccacaggagcaaccaaagaaaaaggcaggaagcttccaattataggtcattaacgataataaggtttttgctcaatacccagggttctttacagagaagttcccctaactgaggcactctggaataagtcactggcatttcctcaaagtttcaaccccagattattggggcctggagaccaatggaagtgggcagagggtcatgggagcagactgctgtttgtaaggtgcagtcaaaagattcagcagattggaagaaacaaacaaaatgccaccccctaccaggatccagtttcttctaaggccagttaatgccagggtcaaaactggcctaggtggcaaagaggggaccactctgcctctattgctttggaagtggcaagggtgcagttggcgtctctc

SEQ ID NO: 159019 - DNA, 1000 bp, Homo Sapiens
tattatatgattccatttataagaaatgtccagaaagggcaaatccatagagacagaaagtacattagtggctgtctagggctagggcagaggggaaaaatagcgattgactattaaagggtttcattttggggtatgaaagtgttttaaaatcagacagtggtgatggctgcacaattctgcaaaaatactaaaaaccactgaattgtatgtatattttaaatgagtgaactgtatggtatatgaattattaccacaataaagctgcttctatatttatagtttgacatttaaaatttagtcacacttagagttcaactttactactctactactgaaaatatagagtgtatgaaggatttcctccaattacatgattctaaattgtcatagataaaacactttataataacattctttaatgaagatataaactcatcaagtaaattacaaaggaaacaaaaataacaaggacaaaattacatagtttgatacctcatgagacataattaaattcttctcaaagtttagctgaacaactatacagtaatattttcaaaaacctgtttgttttatacaaaagaatataccctaacacagtagagtctcataatgccttggcgaacaccaatttgatgctttaagattttaatgtattgttaacaaattttcaaactcaggcaagtttagaaatgtcttcatattgaattccttcaactctgcgtccttttaaagggccagtttcaatgacgatagtagctgaaaaagtcttctcattgatggattctagggtaccttcatttcctctgtagcctccatttaaaactagaattctttttcctggtgctggaattactgtctctaaatgagtctggtcaagtttcagcttgtctccagaatcaatcatcttcacaacagctgtatatttgtcaattacttccttaacaatagcctttttcttatgatatttctctcccagtttcttggttataattttcac

SEQ ID NO: 159020 - DNA, 1000 bp, Homo Sapiens
cagggtgagagaattcataaatattagttaaggatctaaaacaaacttctcaaataactgaaagctgaaacctctggaagccaactgtccctgcacaaaggtttacaattgagaaatatctcctgttcctattttgtcaagtttctttaatggctgaacagaaagaagcttcaagtaatggagaaggcattgtctgagtgcagctgctttcctggacgcctgtgccgttcctgtcttccaaatcctatgcttggaggcccctggaggtacatttttgccaggaaccaacctgaccttaaaaagatgagtgtgacacagccggctgggcaggaggatggaggtgccacaggacaccacctgcccacgccctggccagcctggccatgctgccgagtgcggggaggccaccccacccagagggcacagggcaaaccctaagcacgggggtattgcccttgaagccccaggggatgccctgtgccggatcctcatgcctcattgactagcctgcttgctgaaggagcccaggggcctgagcctgcaacactgcaaggggtgagaagggcatgctgctgtgggcgcactggactcaaacctcacattagaagctacaaagaaccccaaatgcgcttcagagccccaccaacccccaagccaggctcatccctgacacagtgaatccactgcagcccccgtgggaaactctgtgccaattgactgcttaaagaactgggggaaatagaaagccgagaaagagctccgatacacaagggaaaccgcacgtgagaaccagcactcccagcagggagacgtcactctccagaggccacagagatggcagacacctctgtctccacaatgacccacatccaactgaaagtgtgcaggaagacaggtctattgacactgaaatctagaaatcaaggtccacaggcgaatggaggcatcttcagccctgaggaggccaggctgtgtctcctgacgcccctgagggtgggca

SEQ ID NO: 159021 - DNA, 749 bp, Homo Sapiens
ttttttttttttttttttacaaaacaacagcattttaattgaattttctaagtgatcatttccggttgtttaaatgcacctgttcaaatcaaagttcatcattttgtttggaacaacttttgtttgagaatcaaatggtcacgtaaatgacaaaacaaataagcatataatgacagaaaagtaagtggcaaaataactacaaactttgttccactggctactgcagtagaataaacaaaatgacagttaaccaaaaacacctttattttcatctgcaaaagaagaagttcttttcttctttttccaggataatcatgattaacttacaaaaatgggtacacatcttcaaagcacttccctttaacgggaaacttagctttatgggatttaaacattagaaagtgggaaaaaaaattccattttcttgtcattataagccaaaacaaaatctagtgtaagtcaaggaaactcattcacacttcaggtccttctcctccaggaaccagcattgttatattatttccatttagcaaaatctgatctaatttagtaatccttcttccttctggtgtgatttcaaactcagtgacatcttccagtaccatattgacaaagtcatcaaatcctagaagagtaccaacaatttccttatcactcttcatcacgatgtgaattcttgatcctatacatttgtccacaagctctaacggcagcagctgcgacgggttggtagtagcgttagccgccat

SEQ ID NO: 159022 - DNA, 1000 bp, Homo Sapiens
ctaccttctcatgtaggagccattgagagactgtttggacatgcctgtgttcatgtagccgtgatgtccgggggccgtgtacatcatgttaccgtggggtggggtctgcattggctgctgggcatatggctgggtgcccatcatgcccatctgcatctgcatagggtattggggcgtttgattcatatagccatgattgctgtggtagccactgttcatcattggctgggacatgctgtacccattcatggcgttgagagtgttcatgttcatgttcacagagttgacattgtaggctggcgctggcatcaggttcacactcatgttcatgcctctttgcatcgttaaagtccgtgcaggaccctgcatggctacagtctgggagcgcccatagatttgtgactgatgggtggcagcggctggtgacagagacgctgacttggttctcatggagatgtggcccttgctggcaatctgggtttgcagtctttggctgtgagagatgccaatatttgatgcagccatgttccgttgcaaaagaggcggcggcagattcattggaggaggagtcaggttggggggtggggtcatggtagcttgtgcttggggtcccccagggacggagtgtggagactgagaaagttgaacaagccctgtgttacttaatggtgtggacaaagaggcactgtttgcataggaagtcacagcagcggaatggctgtaaggcaatgaatgatcaataagtgtattagttaactgctgcagtttggcaaggctgaaggtggctgacggctgcgggtaatgcccagccccaaaatcactctgacccattcgctcgtataagccaatgttggcgttgctcgtctcggggatttcagccagctgcatgggtggggtgaagttagcagccatgctgcactgagccagctgctggctgctgctcggaggcctctccaccacacagccttgaggagacttgacgctgcaggtcggaggggag

SEQ ID NO: 159023 - DNA, 1000 bp, Homo Sapiens
tttttttttttttttttttgagcggttttcttaagtgtctttaatactccactcagggcagcccctccctctactgagaggctcttggctctggccccaagagcagctggaaggccctggcctgacttcaccacttgatgtccaggctgtgtgtgccacgctcctggctctggtacgtggtatgcagcacctctcgggccttgggggagttgatcccctccagccactcctggtacagctcctgcacgtgtgcactggactccggacgccgcacagggatgtcagcgtaaatgccttccatctgccgcagcagggccttatccgcatgtccgtctggagtctgggcttggcctctgccatttaagcatcctccagcacaggcgaggacctccacaaagtggaatgggaacttgcccttcttaagcttcaggatcatgttctggatgtttcgaaagccataggctgcagcaaagcgtaacaccacctctccgttcttctcaagggtgacctcttggaagtctttgtttctcagggctcggtaagtgacctcctccacatcctcgttgaacagctccttggccgcatgtctgaagatgtgtgccaggtgcccgtctgagctggctccatcatgacgcgtcactttgtcctccttcaagtctccaaacagagtgtcgacggcagcatctctcactgagaggtcaccttgctccattatttgagcaatttcacctgatgttaacacgcagtcagcgccccgggagccatgcaaagcagggggaaggctttcctgaagagcctccagcttcttgtcataacaaggggccacaatgacgtggaaaatcttctctggagacaggttctgctgtctggcgaaataatccttcaccaaagagcccatgacctgctggggggacttggcggtgcagaggtgggcagtgatggggcgacccagcacccgctcggcgtatcggacccagccaggacaggcagaggtcagcat

SEQ ID NO: 159024 - DNA, 1000 bp, Homo Sapiens
tttttttttttttttttttttttttttaaaaaaaaaaaaaaaacatgtttttattgtttgattaacaaactggttgggggaagggcaagaataagacatgcggggaaataccagctttgattagtcagaaactcctgttatctgtacaaaaaaatgaatgttacaaaaatcacgtaaaaaaactaggctcaaggaagcagccgcccttgcaagagggctcaaggcacctgggaggctgagaagaggccaacctggccatgggcgtggctgcatggacagctcttccctcctgcccttccccagatgcccttccctcctgccccgaggggcacactccctctccccaattacaggtgctacaaaactgccttgaataccaccgccaaggcactgccagagatgaaatgggccctgagcagagcctcaggctctccctcccccgtagcccaggcctggagaaaggagggccttgttccccaggccccaggtgggcacagattccagagctgcctcggggaaagcctcttaggggaggcccaggctctgctccctggggaggcagaggccgtgggacctacacacaggcacacacagccctggctttggtcagtactgagtgtgggcagaggggccgcagccctgtccagccccacgatgttgactgagaggtgctatcccagacggtccttgttggagctgccatggcaggctgggccctaattggggtagcacaagcagcatcccgtgcctgccgcctccacgctgggcttggcaccgggccccaggagcccatcagtgacagagtgctccatgatgatgtcctccacccgggtgatgtacagcagcgtcagcagcacccccaggaactggggaagcaggatgcccaggaggatgcccgccatgatggtgtagttgtccatgaaccagatgatcacggcgttggtgcagccccgcacgtagatgacatcctgcacactgaaacgctccttgtcgatagttt

SEQ ID NO: 159025 - DNA, 1000 bp, Homo Sapiens
tttttttttttttttttttttgttgtttgcctttttatttggccaaatccatagcgactataactaaaccaaaacatgagctaagtaaatgaaaactactttcttctggaggtttattttggataaaatagttgaagacagactacaatgagacattgtaaaataagactagaaaataatttaagagcgtattttaagcacgggattccgacacactcataaacgtgtttgctcccagctcttacaaaagaaaataaggtttttctccatcaaaaacaacccagttacaccagtaaatcttcccagttctgaaaatctgaagcaactgatactccattaaatgtggaaacactgtctactcaaaatatttgtaatattatgcagtgacaaaaatttcccacacctatatagggttaaccatagttttcagcaaagcaacaagtgctttacttattttgtctttttcagtttatacagagctccaatttcatgaaaccatactgtgccaaaccaggaaataaacagcaacactctagcgaagccacgccaaccaaacggatactatctcctgtcctttttaccagctttcctcttcccagacagcaagtgcttgggcttcatatcaaacacgtgtctatccgcctcccctttcttccccaaccgattcatcttcttctgagcattcttcatcatagtcttggctttcttcaccatcttgacatccctaagaccagaaacgtcacgtggagttcgagagcaactcccactccgggccacagaggacgggggagcagagtcttcccgctttcttttcctagtgatgctccgggatcttcttgcctggactgcgtaatgggcatcgtctttatcgtccatgtcaacaccaagactacgcatctccttctccaaaactgtcctctgaaccttcttagcagttcgcggcatcctgggtccctgtgtattcttttctttggactccagaattttcaacttctttttc

SEQ ID NO: 159026 - DNA, 1000 bp, Homo Sapiens
ttttttttcatggaagaataagcaagatcttggtcttgtttaaaaaagaaaagagaaaaaaaaaaaccaagccacatcctagagttgagaacaaattattaacagcaaatggccatttgtataattaacatgtactgtctcacgtttcccagttaaatttatgaaagacactattaaatttcagacaaaatatatatatttcttttaaatctttacaataaatcaagatgtagaagcttacatagggcacatttttgtttatttaggtactcaattccagctcccttggatgcaaataaccctggtgacagtgtgtacaaagtcttctctttgctttttataattttaaaagcaaataacacatttaactgtatttaagtctgtgcaaataatccttcagaagaaatatccaagattctgtttgcagaggtcattttgtctctcaaagatgattaaatgagtttgtcttcagataaagtgctcctgtccagcagaactcaaaaggccttcaagctgttcagtaagtgtagttcagataagactccgtcatacgaattccagcttcccgtgcccactgtacatgccccagtgaacaagcgagaggatcttatcgttgctgaggtctgcttgtctcattttatcacaggtcagacagcagttctcgtgcccactgaccggcaccatgcattccaagtctaactttgcaacctgcccctttttggaatggtgtccgtgaaagctgtagtgcaaacgggagagcatctgttgccgctgatcctgcagcctcttattttcacttcgaagcatcctcagggccaacataataagcaacactaaaatcagccctccagcaatgggcacggcaatgaccgctgcccggaaccacaactctttggaagaagtcagctcctgcaccttggtgataaggtttctgctaccatcatgctgatacctgtttccttgtcctgaggcctcacccctgggaggagagagaacatcg

SEQ ID NO: 159027 - DNA, 1000 bp, Homo Sapiens
tttttttttttttttttttaatagtccaaatgttttaataatctcaattaatataaatgtattaaatttcccagagctggtttgattaaggaaaatagaagtcaattatagaggatatgagaaaaagtaaagtatttcagttataaaaggcacaactcaccaatagtcatgtaatgcttacatttcagaaactgattaaacgaacaataagataggaatgtagaaggcagaaagtttgaacaattaacaagctaaatccaaaaaaacctgtacccaaaacaggcaaagcacccctctacccacccaaaactcatagaatatttacaaatattgaccatataattccataaagtagaaaccatacaggctatattatatctccttagaaattttaaatacacttggaatctgaaatacccattaaaaataaacaatagtcaccatagctaaagactgtcagacatacagccaggggagtactcaggagtattttcagtcctaaatacatttattatcaggaaacaagaaaaatggaaaataaaactgtttctataatataccttaaggcagtgtggggatcaacaacatccctggagatatggtcatcaatgaaagtagtccaggagtccatgaattcatttattaacccataagccataaaatgtgtatgctaactagtaataaaagtacaaactgggttatattttagaatatcaactcagttgtaacactagttacttcatcctgagttggttgggaatcacatctttgaatatatcaaaattaaactgagttccttgaagtcagacatggccttatttatttgtatacctttaatataggcacaatagaggtacaaagagtaagcactcaacagtgttacatgaattgaattagttaatgtataaggcagataatttcccaaaatatggggctcactggaggagtagggtgaaacagaataaacagatctgtatggtgggtacaaggctggaaaaca

SEQ ID NO: 159028 - DNA, 1000 bp, Homo Sapiens
cagaaaaaaactatttattcacaaattacacaaaaaacaaacatccattactcaaaacaatataccaaatgttgagtactcacttctctagatacctatttacgttttgagaatgttctttattaaacaaaataaaataattaacatattttttggagcactctgaaactaacctctctaaccagagctaattttctgatgatataacttaaggaaataatatcttttcaaggcaagtgctaatttctccaaccctgaaaagagatatgcattccaataaaacaaaagttttaaaaaccatcttcataaaaaatgtagatcattacttataagctccaacagtagtaagatctttaacataaagcgggctactttcatctctaagaaagataaaattaatacaccaatagtatcttcctgagtgtcagaagtaacagaacccaacagttctatattattgtactacaatatatagtataaaaataatagttcagattagcaatgacagtattggtttgtgaatatgactgtggactttcaataaaattttttttaatatagccttttcatactcatgagattgtactataaatcacattccaatttctatgtattttgtgcttaagttatttattcattggcactctaataacagccctacttttttatttttagaaagatataattagctatttaaaattgtaattatttttcatttcactgagtagtttcaaaaaaagttatctagaaaagtaattcccagtcatcaaatggaaagacacaagcaagaagtaagttgtttccagggtttttaaagctttgtaaaataaagaaaagaaagtattggttttgactgggataatatagcagtacaattgtcattaacctatctgtaaaagccattcatttaaaaatgcatattttaaaaatagctcatttgtggtaaggattacttactgtaacaattaaaaaataaaaccatcattctcatatttatcaa

SEQ ID NO: 159029 - DNA, 1000 bp, Homo Sapiens
gcttattacccgatttattagagagatctctaaaaagacggggtgtggcgggggtaggtgggcgaggaacctgggatgcaaaccagtgtttggggccaggagtggctgtatggtttcagaggcgcccaccactctgggtttgagggacacagcaccctcgtctcggcgctttggattgtcacgcaccagaccacggggcggaggaatggagtggcatccctggggggagttaagacacacgaggtttgcagtttcattttgtttcagaatcagtttggccataaaaatgggactgggttggggacaggcggagcgattgaaccaccggagatgaggaggaggtggcaggcgcctctcctggggtggggactgagggctgtggagacagtaccatggtgaaggaccccatggcaatgggagtattgcactgagccaggtttcgggggaacggggacgtgtcgggatggcgtagggggacagagcctggcaggagacacatggaagtttccgccttgtcagtctcagagcaaacgccttttagtctttacagtacaggaatttggacactgcccacgttctcagtggacagcagccatcagaggtgacccaggaggggaagtgggcattggtcaccaaggtatttacagacttctatcatgggggacagcggggtgggtccagcagcctccctcgcgggggatctgagggagaccgagttcgctaaatattataaataggtcttgccgtcctcctgcccccgcccctcggcacagtcagtggagcacgtcagcctcggtttacagttctctgaaaaggaaccaaaaaacacaaccaacaccaagtatatctccaaaagggccttggagacaacacaagaatggaaatgaaatggtatccacagaggtttgcacatttctcctgcaaaggcgcgtcggccgggcactggtgtcccgtgtcactcagcggagggaggctgccctggacgcggtgccgcccgccc

SEQ ID NO: 159030 - DNA, 1000 bp, Homo Sapiens
tttttttttttttttttttttttttttttttttttttttttttttttttttttttttttttttttttttttttttttttttttttttttttttttttttttttttttttttttttttttttattttattttattttattttattttattttattttattttttgagacagagtgtcactctgttgcccaggctggagtgcagtgtcgcgatctgggctcactgaaacctctgcctcccaggtccaagtgattctcctgcctcagcctcctgaatagctgggattacaggcacccaccacgatgcctggctaatttttgtatttttagtagagacgaggttttgccatgttgggcaggctggtcttgaactcctgaccccaggtgatctgcctgcctcagccaccctaagtgttgggattacaggcatgagccaccatgcctggcctagactttatctttatatggcagttttaggttcacagcaaaattgagaaggtatggagatttccctaccctgttcccccacacaggcacagctgcccccatgggtatccctacctggagtggtgcatagaactggaatttgaacccagcgcccacagtccttcattcctatgacaccacttcacatgagtcaccacatctcagaactgctcagtcagctgaggcacagatggtgccacaggcccagagtgtgggtgactgcaggtgcctcagccccctggctggaaacagctagccacacacaaatggcagattgggagtcctcataggaaaaagttgtccctcttcagtctctttccttagaagcagagcctgagacaaggattcttgtgcaaatgctttactgagggagtactttctggagaaacctgtgagggaaccaggaaaactggataggccaaggggtcagaccaagcagagaggtggttccaggagaggcctggcctcagcccgatcccaggaacaatttgagagtgtcattcaacccagacaatcc

SEQ ID NO: 159031 - DNA, 1000 bp, Homo Sapiens
ttttttttttttttttttgcgccatccaggtttgtgtttattcgatacaggcccagaacccagccctccttcagagaagtggccgagctgggggaacagaataaataaaggccgccgaggtgtgatggggactggacgggccggtctggggcgaggcaagggtgcccaggaggcattgaccccaacctcagctgtccacggctggccccactcccagcaggctccgggggcagtgtgagcgcccacaaggagcagggctcggactcctgccacctccaagtcctttcttttccttcctgccctccctctccttcctaaggcaggtccagagaccaagctctccctctggccggggagccgggaggggagggagggtggaggggccagtgtccaggtcccaggccatgaccctggtgcctgtcctgggcaggagcccaggttcgctgtgcgaggacagaggagcagggaggcaggcgccccaagccagcaggcctttatgcgtcgcccccttgcgcggcggccccgccccgctcccaggctccgtcctcccacgcaccctgcccccggcaccacagccgcggggcactcaggagtcacaccagcttccacccttgtccaagggcccagcagcccctcgtgtatccctggacggctccccagctgccgtgtcttcctcctcctcctcctcctccccatctgtgaactcctcctggttgaggccataggccaatgtggtgtgcgccaggtctacctcgatggggaagacgtcggcatcccgcagcactgcgtagcagtcgttgtagtacttggacatggtggacacgaggcgctgcagctggaacacgatgtcctggacgtgcttctggtccagcagctccatcttctccagcacatccttgcgcatctgggagaagcgggcgcgcgcctcctggcggcagcgcaggatcaggcggtactcatagttgccggtgctcacccggtaaaggggctcgcctagggc

SEQ ID NO: 159032 - DNA, 1000 bp, Homo Sapiens
tttttttttttttttttagcatttaattctgattttaatttccataaaattaactctacaaagatttctcaaagaaatctgaccgccttcaaactacatgtttgttttgtattacatgtaatagatttccacatatgaaaaaatcataaaatgaaggctacgttttccaaccgctatttaagtactgttgagaaactatcgttgaatgaatgaacctgattttgcctcatcgtgtttatctaaaagagtctttgaaagatatttattttccattttctttacacggtccctctttttcaatctgtaaataaaaattaatgagcaatttaggacacaatatcacaacacaattattctgtaattgatctgataaccaaagacacataagaataggatgatctataggatagatgtttccacacagcatttgtctgaaatcagattattttaaatgatgccttgacttttgaattcaattctagaaccaattatcctaaactaaatcagagtattacaaatgaagatattccaacacaaagacttgtaggattttgtttagattgtcaatggttgattcatccaaattttcttcattgtcatccatggtgtgccagacttcagggaaaggagacggtatcagatgcagaactggaacacctcttcttaaaaatggaatatggtcatcctgaatcacacctccataactgtaattctggaaataccgcccctccaaagagtgatccttgagcaaacccaattcatgaagttcatgttcaattgcttgaagtctttcgaaccacctggctgagtttggaaaaaaattgggaaacgttgggtttggagctccaatcaaatccaataagaccaataaatccatgccatgcagttggctggtgcctctcgctccaggtgggtgcggggtcgatgccatctttgcagctaagtgtcgagacccatagagagaatcttgaggagaccagtgaagaaaagcctcttcacc

SEQ ID NO: 159033 - DNA, 1000 bp, Homo Sapiens
tcaactcaggcagcttttattagagtattatataccaagtatatgatgaggagtcccaaatgcaaactggatattcaaggaacttaggatttcctgggttaagcctattagcctaattaattttattccatttatacttacttttcacatgtccatcagtagctcccaaactttgctgcacaagttccaactgggaaatctaaaaatcatgatgcctggactgcaccccatgccaattaagtcattctctatggggcgggacccagacatccatgttttgttttaactttttaggtgattccaatacgtagccaagtttgaggaacaatgctgtagaccttactactcaaaatgtaattagaacagccacagcatcctcacctaggaggagcttgtttaaagtgcagaaatctcaggccccttctgtgtatgaacacaggccctgatttataaaaacaagttaactgatgaagcaaataatcttttctatgaactgatgaagcaaataatcttttctatgattaactgtctgagtaaccgcttaatgtgagttcttttaattatgtggcaagtgatagaagttatgtactttcaggtgggagaaatggcctgctttgctagaatatcctaaaatatctgaaagggacaaatgtgtctactgataggtcaggacttcagtgctgactttctgaaattcttgagtaaagatcattcccttccttgttcttccttaatagatcaaacaaaataataataataataaaaacagaattaagtaaaacaaaagatttttaaaaattaatacgtgagatacactgcagtatatatgtatgtctgattacgcatagaaaaaagatctggaagtttacatatcaaattataagttataagtttaccttgagggtgtggaactgtggtagggtgaggggactgctctcatttttaaattcacatacttttgtaattttttttttgaaatttacagtgagaattcattatt

SEQ ID NO: 159034 - DNA, 1000 bp, Homo Sapiens
ttttttttttttttttttctttaaaagcaatttatttctgattacaaaatacaggtgaggagcatgggcgatgcctgtaaccccttggttgtgcatcttcccagtctatttctgcttctagaaataccctgtgtacaacagcaagctcatgctgtccccaagtgcttgcacattctaacagctgcagagtatatgaccaggtggaaagtccaacagatgccccactcacaagatagggccctccaatcagtcttctggctccctttcactcatagtaactggttgctcttcctattggtcatagataaatgacacctgcacaattctccgagtgctttcaagcaacttcgggaggcagtgactaagaccctttccttgctcccagcttcctatgtcccagggctgcctgtggcacctggactgctgctgcccctgggtcccgtacattccagggcaacaatggaggaagggcaggcaacgcatgaggaattaacagtctttattgggctcagaccaggagtccgtgggtcttgaggacctctgtgtatttgtcaattttcttctccacgttcttctcggcctgtttccgtagcctcatgagctgtttcttcttccggtagtggatcttggctttctctttcctcttctcctccagggtggctgtcactgcctggtacttccagccaacctcgtgagccaggcgccccagataggcaaactttcttgtaggcttcagacgcacgaccttgagggcagcaggaaccaccatccgctttttcttgtcgtagggcggtgggatgccgtcaaacaccttgagacggtccagagcggcctggcctcgcttggttttgtggggcagcatacctcgcacggtccgccagaagatgcggctgggggcccggaagtggtaggggcctcgggaagggttggtgttcatccgcttgcggaggaaagccaggtacttcaacttgtttctgtagaaattgccagaaatgttgat

SEQ ID NO: 159035 - DNA, 1000 bp, Homo Sapiens
ttttttttttttttttttgaaaaatacatgcatttaatattttctgattacaaaagtatatgtgttcattagaaaaaatttaagtacagaatgaataagtaaaattctagaaagtcttagttcacaatacagagataatttaactgccttaaaataattgtgttcacctctatttaatttttatgcacacgtattacaaacaagcttccttttgacacagctgggaccatccttatatagttagttttaaaaatcttgctttttctgtttaatcagatgttatgattctctccctttgcccttattgttgaacaatttttttttcttgggaacggaatcttgctctgtcgcccaggctggagtgcggtggcttaatctcagctcagtgcaacctctgcctcccgggttcaatcaattctcctgcctcagcctcctgagcagctgggactacaggcgcatgctgcgacgcccggctaattttttgtattttagtagagacggggtttcaccgtgttgcccaggctggtctcaaactcctgagctcaggcaatcttcccaccttggcctcccaaagtgttaggattacaggcatgagccactgtgcctggccgttgttcaacaatttttaatgtcataaaagcctcatgcagacacaccgtaattcattgaaccccttttccactgacagggatcaggcttttctctgtttttcttgtgtatgcaatgctataaggacaattcctaaacattgcagtttgtggggatctcggataatttcctcaggatacattcctagaaataaaaattctgggccccagtacacaatcttaaggttttgccacctatcgtcaaactgctacggcctttctggagcgaaatttatattcccagtagccatgtgaaagaatgtttatttcatgttactcctcttgcacttaatactgccttaaaaaatatttgcacatttctctttgttacacatggcttctttttgctttga

SEQ ID NO: 159036 - DNA, 1000 bp, Homo Sapiens
ttttttttttttttttttcaccttaaaaactaggtttctatttctggttagattctagagcagtggaactcaggagtgatactataccctacccagtcccaccacagcctgcctccttcctcccacagagataacattgtacaaaactgtatttacaagaaaaccaattaaaaattaagggtgtgtgcaaaagtagacaggagagtcaagacatatcaatgcagggatggctttggggaatgggggactcaggttctacactggaacctggggtcatgtatcatgtaccaggtggggagaagtgtagcaaatctcagtgccaatttgaggggaagccagtcattccaggagaagagctgaggggaaagagctgttgactttcataatgcagtcttaattatccagtcaccctcctgccacatggcagaagccaggtggcagtgatggtggtgggggaaacaaaacacacagtctctggcaagccccaccgggaaaggagggctcagaaggcgtagcgggtccggatatcctcgagtttcttggacacttcgggtggggttcggtccagttcttcagagacgttcttttgtttgttgggttccatggaattgaactgctcacagaggtctccatcaatcacattcttcacagggaagtagtaggagcgaaagctgaggtggtcccgcccacagagagggggatgttcagaccgcaggtgcatttccacatgctggaagaagtcatggtcctcatgggacgtgaatggcacaaggatgccaattcctccagacaaggtggtatagacaagtgattctgagcctccagggatcagcgtggtcttctgcaaggacagcaccgtctccccgacatggtagttcatgatcacctctgccttctgggaggccccattgagcaagccacggtcccacagggctttgtttcctgtaggatcctcatctacttcatcattggtgttaggtgggagcctcaccacacatat

SEQ ID NO: 159037 - DNA, 1000 bp, Homo Sapiens
tgcgcactgaacgttgctttattcattggttaattttcctaacagcgttgtaaacccaggccgggatgtcctgagcgttctggcagaggcccgtgcagcctcggccccttccggtccgcgctagcctggcctttgccctgagctccctcagcttcgcaagatgagcttcccagacggggccggggcctggctctgagggaaaggcgttcccgccaggtctggggccgccttcccatgttctctaaagcccagcacctgtggttcgttggcggggctcgtgggattggggtaagggctgtggtttcgaggccgtctgtggccgcccccagcccctagtctgcgagacgccggccccgcctttgggcggcctcctgcctggggggcctccaggcctggctacgccgaccggcacctgaactccctgcacgcgttgcatgcctcccacagagatgggactgcttagtaagaccttgctcaggtcagtcaggaagcgggttggcgggcaccgcgggacactcagactggcaaacaccctctccgagtgctgctctcttgatcccacttagcatttttgtctcggggttgctcacatggaggactgcttggtgagaggccggtagcactgaaaagggcactggacgatctgcttttagcattcactcccacccccaacctccctggccctccctgcagctgcgatccctgtgggtcatttccctggcgctttgtttgcatggagaacagcgggtgggtacccgaagtcccaggaagctctgagtcactgacaatcattagtaatcaaagaggcaggccgtgtggcccaggagttgccaaagtctcaaagtgagggagaggccagcctgtctaccgagtgggaagatgtgtgctgactcaggccacctcctgagacctgggaaaagccaaaagctaccccagcctcagtgctaaaatgtttggaagagtttctgatccccaccgtaactctagcaaccagctaccc

SEQ ID NO: 159038 - DNA, 1000 bp, Homo Sapiens
tttttttttttttttttttttttttttttttttttttttttttttttttttttttttttagttttatcatattgttaaaagactttcaagaaataatacaaactggagatagtagatacacaggctccattctaagaacaaagtctgttagaagcaggaacacttggacaaatatgggatgggagggatgtcaggccgaggttagagtggtgatctctccccaccctttagggcctttggaggtggagaagggatcctgcctgctagcaccacattggaagggatcatctggtccagaacccccatttctatcaactaggagctggggggagtagctagcccagagacttcgggtcagggttcaacaatcaggaagacccagttcctgaggaaacgacagttcaagaagggttgggaagaaggctgtcctctaaagaagacgtcctctgcattcaatggccccacagcaacagagtagctccttgccttccacactgcccacctcgtagttgtagtcccaagtaagttctgtcccagcccggattttgctggcaaagaaggccacccaggggaagcgaagatcatgggtatccacgaagacattctggacaaacaggttggggctgcaactgtggttgaggtagcggcccaggttgccttcaagcttggcatcaatgatgtagcaagactcctcgccatcatagaattggcgtgtgttcttacgaacaggtgcgctctcccccttgtccacagaggccatgttggttgatttaattgcaatcccatgggttgatttaagagcaaagcctcgggttgattttactgccacttgacgcttcattggaccagtcatgttcttcttgtcctcaaagtcatccccttcagagccagaggatatggtctggatatcatcactgtcaaccgctgtagccgaagtctgaccagcagtgggctttcggctggtcccactttccccctcactttctgtgctgctggacag

SEQ ID NO: 159039 - DNA, 1000 bp, Homo Sapiens
ttttttttttttttttttttttttagcattttgtacacaaatgtttatttctcaattaaacattccctttaaacacaaggaatgagttctaaatcttcataaagatgaattaaaaatgaaatccctccagtatagtgtatataatcactgtgttcttggtcactactggcatttactgtttaacatcaaaaacaaagacaggttatttaaaaatcatgctactggatttctagctcttcctctatgaccagttctacactgatctgcaatgtttaaaagtttacatcaccaaatcaaagcaagtttaaggtgtgaagtagctgtgcattaaacacaaaataaacaataaaattataagatatagtcaagttcataacgaatataggtgttcttatcatcgttgtagattcttgggtaatgtgctatgagagcgtcctgggaaccaatgtagatggagttgtaaattttccaatatacatctctgactttccgggctgggtgaaacagaccctgtaaacaatattgcaacattctacatggtccaatagcaactctcaggccctctagggctcccataactgcctgaattacatgaggagatgtctcaaatacattgggccatacatagttcaacaagtgattcagcgaatcttcacaaccaaatccataaaccccaagtgacatgtgctgtaccactgcactagccgtctgtctgtgtacaaggtctctatccattaaagcatcttcaagtaacggtgttacggcataaatgtagtcttttcccatttcaccaatatattcaaacaagaaggaaagcgattttaacactccattttgaacattcagttcaggaactctgtattcattcattaaggcagggagtactgtaaagggtgaacatgtttctgcaacaatagctattgctacagtggtacaaactctgttctgcctttcttgaactttgaggttgttcagaagtgtagccaatacatcatgaggg

SEQ ID NO: 159040 - DNA, 1000 bp, Homo Sapiens
gtgagcaacagagatagtctttattcaaacgcagagagatccataacatggaaacactgacgcttccgaaaccgccccatttattcacttctcaagtggcccccgcttggatgcgccctcgggagagtgggctcagcacagcctagagcaccaggtctgaggtatctgcaaccacgtgggagccaggcccctggacgatgaaggacaatctcctggagcagcaataacttataaggagaccataatttagagtagctggagccttggggatgactttatcctgcaggaggaggaggctgagagcagacgggacacgggggcccctaagaagcaaggttgggaaaggaggaggctgtttcccaatgcccgtgccggccaccagagggcccttcagtgcagagatggtcggcgcggcctcaccgcggtcaggagcagcgcgaaaccccctgtgcctcggccgcctgcagcatgagcctgcacaggagcccccgacaccccatggctccgggggccccaggggctgcggggctctggtcttagacgcagttatcagggacgcactcagcctcttcttcgagctcggggcaggggctcccgttgttggcgggctggacccggacgtagcgagtcctgctcttggtcccgagcctcccacagtggcctccgcacagtccccaggacgaccacagggagacctcgcagtccagcggcgtttctggaactgaggcgctgtctacaatctcattgtccctgctgggcaggactggggcgggagggatgaaggccctggggctctgtcgcagccgcaccagtgtcaccctggcgatgggaggcagggccttcagccgcgggtagtagaaggagttggccgggtggctgggagaggaggacgttatctcggtcaccgtgtcctgcgggatggtggcgaagttgggggaggagaaggtgaagccgctgtccgtcccggcgtcgtaggggtacaggtccagcgccgcctgtt

SEQ ID NO: 159041 - DNA, 1000 bp, Homo Sapiens
ttttttttttttttttttccttgaataatcattttattaacaaatacaaacttgaaatgttggtgataaaatatatcaatattgaacaaaaatgtgtgtaaacagtaattctacaactgggaacatatctcagttttgttaattttggtgacgtcttcccaaccatgtctaatcttcagtatcttcttcctcaagcatggcaggaatagtatgcttttaaatatcaggacaacaattggaaggaaaacagctatcataaaagttggaggtgtataccatacaaattgttttatatctatccacttattccaggcaaaaatcaatgcgtgtattgtgcccagtagaagggaaacaattcctagcttgctctgaatatagtgaaattctctccatgtcaaagagtcactcacagatggaatagatgtcacagccaacagagccagtattgccaatcccacaattcccagagacacataaatctccattctccaaacatcatgctcaatccaggcatcttctttattttgttggacctgttgatatgcccagtttagcaacttgtatctgtaggatcgcctcattgggtaagacagactataaattgcatgcagtacagcaaaaaagaaactgagaagcccaaactgctttcttgttaacatccacttatccaaccaatgtggaaacttcttatacttggttccattatgaagttggacaattgctgctatcacacctggcaggtaaaccaatgccaagagagtgatggaaaccattggcaagactttgttgatgaccaggattggaattttataaaaatattgttgatgggaagttgctaaagggtgaattacttccctcagaagagtgtaaagaaaagtcagagatgctataatagcagctattttaattggcaagtgccactgtggaaagagttcctgtgtgtgctgaagttctgaagggcagtcaaattcatcagcatgggctgtttggtgcaaatgca

SEQ ID NO: 159042 - DNA, 1000 bp, Homo Sapiens
tctcctccagctttgatggcctatgaccgtgtgactcctgcatatgcatgaacacacagacacagacactacacacatgcacagacacacatacacacttggagcaaagagggatgaagcctgccacactgcaggtggtcctagctgcctgacctcccttcctcacacactgacacacctccctctttgttgacctgttatttattgtgcacccattgggtgcatggcctagccctaggccctggccggagacccaaacatggcctccaagggccaaccttactttgtggaggtgcaagccccagagctggttacaagcatgggaagggaggagggtggcctagcaggaaggctggggaggcagtgtgtcagccggcaggcagcagcgggtagcagaggccccctcttggcgggcagcctacttgcacacttggctgaacagagacaatggtggctggtccctccggcccagcctccttcctacaggcagagccccaagtccatgagtctccggaacctccctcagagaacaagcccagctgggaggcagccagagggcaggatgaggggatttcccaggggagagcagcagagaccctctgagctgccagagatggggaaggggtccaggcaccccacaggaaggaaggtttaaggcatgtgtagaaaggagcacagaaaagtctcccgagcctggcctaggcctcgcctggtcgccagcctccgtcccatccctcacaactctcctgagctgtggctcctgccaggcagacccctaagggaaactgtcgccaccttttacctctctatcctctccagtggtctgaacatagagaacctccttctctgctctgttggaacaaaggctccttgttcctagggttccagggttccctgcaaagctctggaggccccaccccgcccagccctcactcatgccatcagctctgctctgttgatgagcagttgggtatgtgagactgtttcatctacttcgggg

SEQ ID NO: 159043 - DNA, 1000 bp, Homo Sapiens
tttttttttttttttttttttgcctttttggctctggaggaatttccactccacagccgtttattgggcaacccaccgcatcccatccccgggcctcggcggcagagcaggcagaggctgcagtgggaggcaccgttccactccgggaccacgtggcgggtgtccataaatgtctgccacctttgcattgagcccattttccagatagtgaaaatgcggctcccaggggaagtcactagggtcactcctagaggggccaatgacccaagggctgctgtaggggaggtaccggcctctgaaccccctttcttctctccccaacagggtgacgctgggggacccctggcctgcagggagccctctggacggtgggtgctaactggggtcactagctggggctatggctgtggccggccccacttcccaggtgtctatacccgggtggcagctgtgagaggctggataggacagcacatccaggagtgaccaccacgtgactgcccaggccgagactctacgtgaaagcaacaggagcagcaggccacccaacaccccaccccaccgtaccctacccaaggacgggtgtgggggggctgtgggtcatggggatgcattttggtaccaccctttgttccaataaacacagcccctccaccctagctcactggctcagcacctcagtgtcacagcgaggaccacctgcctggtgctccaccaggacccggggtggaacgaagcagggtcaaagcaagccctgacaaggggaaggctgtcccccttagcctttggggcaggggtggcagcagcaacacattcctcgtgactcagcagcccggtggcactaaggggaaagatggacttctcccaacccaggggaggctgagaccctccgagctggggttccagggacacgcgtcacctcttcccagagacccctcaggagggaaataaagaggtttctctccgtcctccaccaatttatttgcccatccgcaggagg

SEQ ID NO: 159044 - DNA, 1000 bp, Homo Sapiens
tttcatcggcatcatttgataatttaatatgagggacaaaaagcagtaagtccaaactggccttgggtaacatctcatcaagtagcacacagaatctgtactgtaattgaaagggtttaattgtaagtcacggctgtgtcaacgctgttcagctcatgccttgaaatcagctgcacagccacgttaaactcagcacctccagactctcagcttgtaacagaagtgccaagctctctacctcgaaacaggatagaggaggatgcgggcaaatagccttttaacgtgtatcactcacaatgtcaagaaggtgaaaaaaagtcaggtttctttttgaaaataattgtctaaaatcaaactaaaatatgaaaaattaacataatttgcaagaatataggtcaaaatgttcaataggactgactcaagttcacaaaaaaccaaatgtcaaacagatgaatttaaactaaagattataaaacaatggctattaagaattagttttcaactgatctaaacagtgtttgaaagtttaaattaactcaatacttttatcagaactttagctagaaacagtctgaaagtaaaaaaagtatcattagactgttctcaaggataagtgcaatctcttcatggtaaaatatcttcatttatatttagactgttctcaaggataagtgcaatctcttcatggtaaaatatcttcatttatattttgttacaaaaatatacaaaatactactttttacctttccttcactcagtataaacccttctggttcagtgacatcagccaagctgtcactaaattcaaatcatgtccgcattatatcttctacagtcacactgggttttaaggctcagcatacaatttatcttccaaacatacaattatcataactggttttatgtaagggtaacaggataagagtctttaaaaaaatatacaagtgggataaccatttgttgtatgtcattttatcccattgtccccaattactaaaac

SEQ ID NO: 159045 - DNA, 1000 bp, Homo Sapiens
cttggtgatgtggcaggtggggctgcatggagattcagggacagctcctctcaggcagaccctcaggaaccttaaaaggatgcaggaagcccagcgtggtggctcacgctggtaaacccagcactttgggaggcctaggcggggggatcgctttaggccagcagttcaagaccagcctgcgcaacatagcgagacccccacctctgtatcactgcagctcccagagagctcccactcagggtgaagctctgagtcttggtgatttttaggagtttatggaaacagcccttctggtggatgacgtttggagacacatcgcgtccgtcacaggacacacttccgatggatttacagcaactcctggggtaggtgtggcccgttgtcatttcgaaggaagagccagaaaaatctgtgtagttattcaccccacagcactttagcttctccatgaccaagttccactgtgtagaatagtcgtctggctcgttgtaacctctgtaattcttcctcagggtcacgaaggtgtgttccaaggccacatctccaacaattggaaagaaaagaaggaccactgtggcagctgtaacttccatgatgaggacaataaccattgacaggatgcaaaacaagagcgtgcctctgctctctttagtcgctccataccacccggcacagccaagcagtaccgtgatgcatcccatcaccaggcacaggttgccaacgtgaaggaggtatgcggaggacagcccgaggacattcgtcagagaggcccctccacatttaccaccaatgcccaggccaactaggatgatgccagacacagccacgaagccattgagtaaagataacagtttcttcaaggaagaatacggagtgtggatttcagccatgctgaacagactggggcaccccgaacatttaagttaacatcttcctgaacctctgggctactgtttcccaagatgatagggatctgaggaaggggcgccaatgctgactt

SEQ ID NO: 159046 - DNA, 1000 bp, Homo Sapiens
tttttttttttttttttttttttttttttttttttttttttttttgacaaataactctgtgtttatcccaggaataatatgcatatggtctctacaccaaccaaaactggacctggtgggtctcagccaatggcaacgcagccagatgtttcaaatcagcggaggcacttcagggttgtcttcaaaggttgggtcttcctcacttggtataattttgggttcaggtcgtcttctgggtgtgtgttttttctcttgaactatgttagtcacatcagggaatgagtgcttgctagggtctacttctagtttctccatgtgcttgcttcttgtatttgtttgttctctgctcctgtccgaggtagttttcatagatttgaatgctcgctgaccacctgtgattacttctcctaccttgggcatgcagatgaccaaatgacccgttgtctgagatcttttagcagaactactatcgggtttcacttctgcaggaaggacaagctgaaatggctttcctttgatcattactcgcacgtaagttggttgcacatcaacatcgattaaagaggtatccatatacctatagacagcaaggtccaggatgatctgcttttcgttatctttcaaagagaagtcaattttgggctcattcacatttagggctttcccatcttcagtgatcaaagtcctgggtggtttcactttcttctttttttcacttaatttttcctgtttcttccgttgtttttccatgtgtctaagagtttccaatcttgattcaggagtaaacaaacagggcttattccagaattccaagtcatcttcactgttgtctaatttctttgtgttgtgttcctctgtgtctggtgcctgtaggtggtctttgctctctaaagaggaaagagtagcattgatgtctgtgtaccaacgtccatcaaagcctgcgttacttctcttgtcttcatttttatcctcttcttggtgtttcctctgagcctcttcc

SEQ ID NO: 159047 - DNA, 1000 bp, Homo Sapiens
ttttttgatggtgcagacccttgctttatttgtctgacttgttcacagttcagccccctgctcagaaaaccaacgggccagctaaggagaggaggaggcaccttgagacttccggagtcgaggctctccagggttccccagcccatcaatcattttctgcaccccctgcctgggaggcagctccctggggggtgggaatgggtgactagaggggatttcagtgtgggacccagggtctgttcttcacagtaggaggtggaagggatgactaagttctttatcacagacctacaaaaaatgagataattagatattactctcactagtttgggcttcttttttctttttctttttacaaaacagcagctggaaagagaaatgtaggtggcagacgagccaggcacgaggtttcagattggaagggaccaagatgaggaccaaggtgtggctgcctgactaggaacgctgtgggctggcccaggctctcgccacacatcctgggagaactgccataggccctagaaggagggatgaaaggcgtatgggagggaagacagcggtccccggatcagcagcagcaccaccatcctctgatggcccctgggcagtccgccagctcggaagcactcagggctggagcctgggctctaagcatgggccccaggagccagacaggagggaggcagcaggaagggctggcatggaagggctgagttctattggggtcccacgcgggcaagggaaccaggactcatccctgcttgtcagccaatcagcttcttcaggaaggcctccaactgatcctcatccttgatgcccacaaacttgtccaccacgtccccattcttcatggccagcacagtgggcaccgctgacacctcatactcaatggcgaggtctgtgtggtcatcaatatccaccttggccatcaccaccttcccgtgctgcttggccaccatcttctctaacctcggccccaggatcttgcagggtccacacc

SEQ ID NO: 159048 - DNA, 1000 bp, Homo Sapiens
ttttttttttttttttttgctggttcacatctctttaatgagatcaaaggctcctgtgtatgtcctgcgggggtaaagctagcacagtcccccaatactgcccctctccagccctttcaggcagattctaggtaggcagggaggggccaaaggaacgcaaggagttgggactagggctgtttctggtgggcaagtaacccatccaccctctcaaaactacttatgggatgtccccttcactggaagacagccccatgggaaagatctgcggtacagactctgggggtagtgcacacggggagtagtcctccagatctggcagggtggcactaaccctcacctccttgactggctcaccctcaccggaggcaggacaagggcagagctcaataccggagtcgccagttaaacggcgatagcggcaggaggggggtgtggaggcaggggtcacccctgccccgggctcaccctcctgatgagggggggcactctggtgggaggaaacaccttccacatttgttccttcaaagtgggcagggcagctggatgaggaggaacagcaggtttgttcactggaagcagtcaaggggcggcctggggccacagtataaggggggggtggtgtgcctgggcggtgaaccacatcctcgtaggctgggggcttgaaggtgctgaggaagcgaaggtcaagcagtgaaccggtagggaaaggaccagccccatggcatgccccatgataggccaacaagttgatttcacgctgccgctgctgttgttgcagcctgagtttagctcgtcggtggcggaaggcgcaacagcagctaaagaggatgaggacagtccagagcagccagaaccaccagagctcatagtagtaggtgcagcagccagtctccccgcagcagtgaccactctcacagaggtagggctggttgttcactcctgggcacagctctcgaagctgctgttgcggcgcccgaagtgccccccaggcctcctc

SEQ ID NO: 159049 - DNA, 1000 bp, Homo Sapiens
ttttttttttttttttttttttttttttttttttttttttttttttttttttttttccagttatttcatttttactatttcacattttcagcaaacaaatcgaggtgcaaacagggtttatttcacattaatatattaactggattttttgtcaaataaatagggaattctctttaaataaccatctcctcacttcatggccagtccagggacaaacaagagtgaatgttagcgcatccaggggcacaaagcttaaggggaagaagcaggctggggggctggtggcaggtcccggccagcacacagggtcaggggcccttgttcccggccccacccagcagccaccaagtggacagacatgcattctctggttccagtcaggaagctccttctagaaggaagtgagaggtgagggaaagcaaattccagaaacaccagcaaaaggcagaagggcttcctcccagcctcggcggccctgccccgacgccacccaagccctggaagctcattttacagcttcaaaagtcacacagggtggcaacaacatgacccaggacagggaagggaaggaagggtggcgggggctgcagctggaccctggctgagtggaatgcgggcgcggtggccttctgagaccagcacagaccagcagagggaatgtgagcagggtctggcagggcccgggaagacacctggctggtctgaagtggctcatgaggctgagtgtagcagtgggtgccagactgagggagctggactgcggtggaggaggtggccagagagtcccttcgaggggagaagctgagagtgaaacaggaacaggggatgctccgtgctcccagaagagccccagacggtgagggaggtacgctgggcagcactgtgggctccgggctggcatgggaagctgggcggcacctctcccgaggccgggggccctaatgtcccacaatgctagttcctggtaattgtttatgatcagacctggagggagaacaag

SEQ ID NO: 159050 - DNA, 1000 bp, Homo Sapiens
ttttttttttttttttggttaaatgacttactgtgtaattttatttcatattacacaaatgttaatcaaatgctgagtagacatgcagatgacaagcagtatatgacaaactctgaagaaatagttacatgtagagtttctcagatttttagtgtatctaagaattaactgaagagtttgttaagaatgcaggcttaaaggccaatccacagattataatttcatacaaacaggatggagcctaagaacctgtaaattattaaacaactgattaaaaatagagaggtttctatgaagttaggcttgtccttatttcttatttgaactggacaagtagaaggataataggtaggaccaagtgagcattatcagaatcaaagtagaggcaataacaagccaaggtgttttagcctagctaaagaagctcagactagaaaagacctccaggatcaagctgaagaatctggggtttagactcttgaaactaaggtttcagaacaggaggataataatatgatactgacttttaagttgatgagatgcattctaagctggaaagccagcgaaagggttcagaatgaggtgataaaggtgagcattagggaggaggtatttgcaagaaaaaataaaatgtcaaaagacactttggtaaaaaatgttcctttcacatatttaaggattggcagttaaaattaaatacaacattataaaatacccatgtcaaatataataacagcaacatcaataacaacaagacgaatgaaataatcttcaacaggtttctcagatgtttacttccatgattcttgacactccataggagctcggtaacagtttgtattgccttcttttaatggggtcttcagggcaaaattttctttactttcatgatgaaaagcctttgaaggatcaaagtgtttgatacctagaactttattcaattcctcttgaagttttgtctcactttgtttttttttagcaagctgacagcggagttttg

SEQ ID NO: 159051 - DNA, 1000 bp, Homo Sapiens
ttttttttttttttttacacgtctaacattccctttattgcttacgtcacatattccaatgaatacaataaactcctttttaaaaaagtaaggcacatgaaaagccttttgtgtaagttccatgttattttaaaattcctattggctaataaaagcatttgcactatagaaccagagacatctagaaaagcacatgatagatttttttgcaagcagaatgcctgaaacattacatttacctcatggcacaatgagacagtcaccaaatccaatgtctgcattagaacgatacagctactattacagttgcaaaaccattaatcagcttatccacatatgtacagctgggtccccacgtgacaaaatctaaaggaagaacagcatctaactgcacctgtgctccattccctcacagataggaactgtgacattttggctctttccatgttgtgctgctcttcacgagaggccagggtcatacgatactgaagaccatggacaggtactgttcgtacgacacctgaatccagccgtcctgatccgtgtcgtaacgtctgaatatatccgtcaacctctgcaggacgatgcagccctggatgaagtcgtcgaaggcaatctgcccccgtccctgcctgtcaaactttcgaatgaggatgtcgtggaactggtcagagagccggtagccgaaacctgagagggcctgcttcagctcgttcttatcgatcatcccggagttgtcccggtcgtacgtgcggaagacgttctgccagtccgtgatgtacttccacacacccgtgaactcgctgaagttcacgccggccttgttctcacggtcaaacatggatatgatcgacctgacagtcactggattaaagggagtccacgtgccgttggagagagcttgctgaagctcggtgtctgatatcactccactcctgtctttatcgaccctctggaaaacgttccacaggaagctctggtccggcagcgccgcgcctgc

SEQ ID NO: 159052 - DNA, 1000 bp, Homo Sapiens
ttttttttttttttttttcattcactcaacaaatatttattgggtgccaatgtaacaccaaacaagacagatacaatgcctgctctcagaaagctgataattcatattacttttgctgcatgtaccagaaaaagagggatacattttagcttggccttcagctatgcctagactttgggcaggtggacatctggggattgggatggcattcttaggtacaaggataacaggagaaaagtgaaaacactaaagcatgagaaaattagtaggacacgtatggggactttaaagcaagaaatatattttatcgacttcaaggttccatcaatttaattcaggatcattattttataaaccaaaagaaaaaatagtaattaaagttttactgaaatggttctcaactgggggcgattactgtcctctaaagggcatttggcaatatctggaaccatttttgttgtcacaactgatgagaaacgactagtctttagtagataacaggtcagggattattgctaatcatctaaaacgcacaagagacctcccacaaaaaaaattatttggcctaacatgtcaataatgccaaggttgagaactcctaaactacagaatgttagaagttgaaagatgcatctaggatatctaaaaagtattttaagatagaaacaatgcagtagttcagtttacctggaatgaacccaagatttgtaaaggaatactgggaaacaatgctggcactctatctgaatctgttctctcacctttggaatagtaaagtgataatgatcagggactatgttctaagaaattaatttaatgcagtgtaagtcacagggctggcctttgatgaccactctgtccaaaccttgctttccagaaaccctgcactctaatcactccgattgatatatctatttctgctaattctcatctcagaataacacttacctcaccaatcatatggtatcggaatatttttcttttctaaagcctagctcta

SEQ ID NO: 159053 - DNA, 1000 bp, Homo Sapiens
acattaaaattgagaaatttatttttttccatgaaatagtaagcagaattaaagaaatatacagcttaaaacagttgaaatgaccttagaattttaatgacaattacacatttatggccaaaggaaaaaaatgaatagtttttaataatgaattcactttaaaatgtttgcttaataattcatctgaaattacatggatacaaggataactgggatctgggcaccttgtaaaataaaataatgccactttatccttctcaaaaaaattgttatcccagtataacagtggtgcggttctgctccccactcacagtagccaccgttctaccatttacaaacgtgtcaagtcagtcttcctgatttgtaaggatgcctattttggttccacttaaaaatatttccagtaggcggtcagagaaaataacttatttagccccactcagagtagaggatcagtatgtcaacatattggtcggtcatggctttcttctcgtgatcactgaggtcaaatttcctcatataattataaatgttaaaagataaaattacatcttcacagcagccaaaaatttgtatattttttatgtatttacaatattgtacatatttacacgaccacatcaaatactgaattgtagaaacaagtgactatctataaaggcattcatttaatgcccaagcgttattttcttgtgcaaacggaaacttttcttaaacttctattagaaagctaaagacagtcaacgttgcgaaggccaccatccatggttaaagagccaaacctttctaaaatgtggttattttcagcaagttctttaaccaccccttccatctcttcctttaatttcttcataccaagagtcatttctactaatgtgttagaacttggataaattggggtcatggtatgtttgattccactggaagctgtaaacattttctgaggcagagtttcttgtaactcattagtatattcttgatattttgatacttcttcttc

SEQ ID NO: 159054 - DNA, 1000 bp, Homo Sapiens
ttttttttttttttttttttttagcatccatatataacattttattaagaaaatgaacaaaatacattctttctccatatgtacattacatacaacataattctacaattgccatttttagcagatcactcatttatttattcacaaagtagaattaacacatttaccaaagctgggatctgaaaattatttgtactataagaaaaaaaaaatcctaaaaagtccatacagattggataaaagataagccagagatcatgaggggaatggggaagattgcagaacacgacagagcccaacaatgatttgaaacaattgatgtcagaagagatctgatacccataaagcacttctgtttaaaagctccaaccagctcatgccagctttccagagtcccatgatttccatttaagaccatgtggatactttaggatacggccctgaccccacattgccacagaagagggggtaagagtagaaccaaacaagttagcagttttctccacacattgagtctcatctgaaatactactgaggtgcaaaatgtgtgaatctcagctaatgtgcacagaaatacaattttttttgagagacatttgcttaaacgtggtaaagaactcttgttttatggactccttgcttcatgttcattttgtctgtttttcttttggcttttgacaatagctcatcctttttgagtgtgagtttaattatggccatattaaaaagtccatcataaacaaagactcctcctcatggtatgaatatgctccatatgcccataatggtgcataacggacttagaaattccaatgagtcttagggttgaaatttccaatgacctgagcaaggcagctccctatagcttctggataacattttacacccagagttcaggcttaaacagacctatcaacacaattattttcggattgtctgtctagaaaacggcaatgctcaaaggaatataaataagggtggggggacatatgcttccagc

SEQ ID NO: 159055 - DNA, 990 bp, Homo Sapiens
ttttttttttttttttttgcttcagatcatgtttattgtggggccagggggtagggatcctcgggtgagagggctggctggccggggtaagttgctctggacgtgctggcggggagcagtcctggtggcgggatggcgggggcacttctgggtcccagggtgcacgggatccgggcagtgctcagggtggcaagaggcggcgtgcaggcacctggggcgccggggtctctaggcgtttcacacgcagcagcgcccccagcacgccctcagggggcagctcagagcccacatcgtggtcggcggcacggcggaggcggcgcggggctgccaccccctcggagtccgcgcttcccgcaagaatccgtcccagcaagtacctcaacagctcggggtccacgtcgggtgtctcgtcgcctgcctcctcagcatccgggcccgcggggccgtcgtcgtagaccgggggccggggtcggagcgccgcggcggggacgggcgcggggacaagctgggctgcgagggcggcagggtcaaggcgggcgcggagcagagcgcgagcgagctgcgctgcaggcgcgtcggggtcgtcgtccaggcccagagccggatcagagttgcggggggcgccccagacgcgcagcagctgcgccaggacgcgcgcctgctgatcctcagcctcctgcgcctcggcccgcgcccgctcctgacgttcggcctccagcagatgcgccagcgcccgcgccagctcctgcaccgcccccgccgcctcacctcggggcactgaccgccggaagcggcgaggagcgccagtctcagccaagggcggagacgctgcgcttaggccgcggggctcctttaccggccgcgcgcagagcgcggggggcggccgaaacaggccgagcagcagcagcaccaaaaggccgacgcccccggcccgcggcccccagagcagcggcgaccccgccatgctgccccagcgagccgggctccgga

SEQ ID NO: 159056 - DNA, 1000 bp, Homo Sapiens
ttttttttttttttttttttttgcattttaattaatttatttatttctttacacataactgaaagtgatgttacagtacataagttatttacaactgtgcagtaatgtgttgcaaaataaattatctagaaggcagcaaaagtacattgtgaaggtatataaaactgtacagcgtttacggatacactttttatatgattattggctctgtagtgtttcaagttacgttctcagaaagagaaacaaaatgcccaagattaaaggaaagaagatacaaaccacgcggatttgactccatttcaatacggctgggagtcctggctctgtgtccctccgcctggctccgcaccaggtctgaagcccagtctgaggccgtcgcagctcggcggcaacagaaccacggctgggatggggctcctgcccctccgacctgcaggtcactgtttgtgagaggtggacaccttaattttctttagttgatcagaatggaacaaaaaattttaaaaatgtactccgttctccaactcctgaaatgcctctgcagttgctggagaaaagggcccgaaggtcgccgttttcaaacagaagctgccgtgtgtgcgcgcccggcatggtctcctcatcccgccggggccagtgaggctctgggggctttgcccccgccgcggcagctggtagagaagagacgtgtttcacctccccgacgtctggaccagtctggaagggatggaggcgctgtggccaagtgcagtctctctcggggtctctccccgcccgggtggacagggcgctccctcctccgcccctggggctcagcagcagtcctgggcagccgtgcggccctcgcctgcgtcctgcggccgtcccgcggtgtcatgccggcaacaatacaaagtcgtcgttgacgtcgaccatgggcacgtagaaggagggcacctcgttcacgcacagggacttgtgcccggcggggtccagttcctgcaccttcagctgccactcc

SEQ ID NO: 159057 - DNA, 1000 bp, Homo Sapiens
ttttttttttttttttttactgcatgttttcaaaatattttttaatgtgatgagtggtctgggaaatcctcgcctaacaaagtggcttttgattcaaggcctgaagaaggggagggcccactccaggtagatgacatggccagggcaaaacctgaggccagagtgtgcctggggatatgagggacgtggagggcacccatgtccagcccacctcagtgcttctgcctcagtgagaaggggagggagttggccacaagggggcctgggtgcatcaaataggaagccggtgagtcaagcagctcggggccagtggggctggagagatgccagagccaggggctatgtgtggacttagggtttggaaccattaaagggctctgcgacgggagtggcaggatatgacctatttttgagacattgtgctgagaacaggccttaaaggcagaagcacagagcctggcttcggggcgctgcagtactgaagccccatagttgaaaattatcttcctcccagctcctacccaggccctctccctctccagatgcctacagcacaccagacagtaggctccttgctggcacgaaccacagcctccagctcatggctctcaaatgcagtgcaggtatgcatggttctcttctgggcattctgggcagggtgccctgcaggagccacagttaactgcagtgcaactaatgagacactgcacatcagggaccacttgccattcatgactgcaggccccaccacagctccacgatgtgggccccactcacatcccatccagggcaggaacgtgagccatggggaggctaagagcagacccagggtcacacagtgatgaggctggcactgagggctcccacctcatcacaccctgcagcacaccagcaggggctcaactgatcctgcaggcacaattgacctccggaagagccaggccttggcggggagggttgaaggtggggtcagggggcagcatatttgcttggagacatt

SEQ ID NO: 159058 - DNA, 1000 bp, Homo Sapiens
ttttttttttttttttctttaatgtaaagtgtatttatttaaaaaaaatacaaaataaactacaagtctgtctttgtttatggcctttccctattttcttttaccgaagtggggtgtgtcccttttttgcagctctagccaggccatagagaagacaccttccaggagaggcaaggagagcatgttctgcccacatagagcactccagggaggaaagtagcttatactcacagtgtctgcccctgccgtgtagctctctcatggggagggcctgtttttgtaagggtaatgtggagagagaggtcagggctttgttccctgtggacgcagctctctgttgtcatgttctggatccagcaggctgctcccaagtacagatttggtagaactggaaagggaggtattctgggaagttttggaggatggagttggcaaagctaaggagtgaaagcatttcggccgtctctgtagctggggcagcggccactaatgttttctgaaagggattgtgacagtggacttgagcatcctggcaggttaggggtagtggagcttgtctgcgtttgtagaaagatacttcagaggcccctaaaattggcctatggttaaactgtgtaaccaccaggcaaggtaccagggatttccaccttttcactcacccgccccaccctgttttccttcccacaataaatagaagaccatagtctctttcttcctttgattttgcccaaataacagctgctcagtttgttacataggtattatccagctaaagtgacttctctcccttaacagagagaagaggggacaaatttggttgtgaagtaaacaagaaacacaagacggctaaaactctccaggggcaggtaaagccctgctgggctcagaagcactatagaatttgctgtacacactgaagtgggtctgtgtcacacaggtatttcttggtcctctggagagcagaggactcactcagctctttgcttcatgcctcgcttta

SEQ ID NO: 159059 - DNA, 1000 bp, Homo Sapiens
tcaagcaaaaaatgtttttccttgtgttttgtacaaaaagggggtgggaggtagttccgtgtgctggtggtgacggcatccacggggctagaagtgggcggtgacgcggtccgtctccagcaagtcgtccaggattatgtctggtgtggtgccgatcttcttggctagctcgctgcgctccatggtgctcaggtacaggtagcggttgagcagctccccatccagcacgttgcgcacggcattctggagggtgcggcggtccacgtgcagcatccggaaggcgcgggggttgaggccggcgtggtgtggcagcatggtggtcagcgcgttctgcagcatcagcagccgccggtaggtcttctcctgcatgggcagcagcagcccgatgccgccgtccagggtggcaaaccacgtgatgtgcttattctcccacacgaccgactttttgctgagcccttcagtggccccccggcacggggtcctccagaacgtgttcacgtgggcacccacgtggaagtctgcccgacgcagcaggcgcatgcccccgaaactctccttggcttcgggcaggtacatgtacaccatgaggttgcggtcgcggtcagacaccagaaaacccagctgggcattgtccaccatgaagtccacgctgtacacctccaggggcttggcatcccgcgacaccaggctcagcgtcttgctttcctcctggtagcgcagcagcgaaatgctcttcatgacgtcggctgccaggatgaagttcttgacgctgatcatctggtgtatgtagagctgcgtgtcgatgaaggccatgcccgtcagctcgctggcccgcaggctccacaggaaaatcttctggccgatggccgacaccaggtggccattgcagtggcacagggcggtcacgggccccttctgctccttctcgtaaaggactttgaacttgttcttggtcaagggctggccaggctcgggcaccacctcaatcacatccatgatc

SEQ ID NO: 159060 - DNA, 1000 bp, Homo Sapiens
tttttttttttttttttttttttttcaaagaaattagcttttatttgagactacttttccccacatgtatcttttaagaattctatgctatgtgataacctgcttatccactgtcccaataccaaaatttctaacagcgaattatacaactgctctaggtaataaataagggttgtccttcactgattaagggaataaacttcaataaacttaacaacaacaaaaaaaatcacactttagtttttaagttttaacagatgtatttcaaatacagcatgttttacaggagttcacaagcttttcatctctaaaaaaaaactttcaactacctgactgttccattccaccccagacaaacctgacatgactgaactacttcatgtgttactttcccaaaaataaagttaaaaaaaaaaaggaactcatgataaatgcagatctctaatacagtatctaacacaaaagaagctttaaaaagacagtttctttccttatttgattagctagaagtttatctaggtaaaagcaaaaaaaaaatttacaaagcataacataacattggggttctttttatactcaagatgtttaactgttcaaaatgacaacaattacatcttttaagagtataataaaatgggtggaaaacagcaacacaactgacaaaagtgtagatgctaaataaaccaaagtttttttcttaaggagtaggaacaatccacagcttggggaaatctcagaattaaaaaaaaaaaaaaaaaaaaagaggaaaaaaaatgtccttaattgcaaccattccgttatcaatagcgtcttgggctgtaggaacgagatcttgatcgtgatctatatcgactataataaggagaaggtgatcgtcttctgtatcggtaatcatagtcttcatatctgtcatacccacgatcatatcctctatcatagtaagaatctcgacgtctgccaccacctccacctccaccgccgccgcctcctccaccacccc

SEQ ID NO: 159061 - DNA, 1000 bp, Homo Sapiens
tttttttttttttttttttttttttttttttggaaagaggttttagtgcggccgcagggagcaccacctcagcctcaggcgctagtgaggacacaggccgtcctccggcggggagcacggtggggtcagggtgctgtgtggtcccgcaaagaggcagctgagcttgggcctcaggtcgttccacaccttgctcatctccttgtgcccttggatctgagagttgacgaaggcgcggaggatgtgggaggtgaggggcaggtagacgtggatgagctgcgtctcctggtgcaggcagtacagggagaagtagttccgcagctccatcgtctgaatcgcgttctcctgctccacgatgcgggactccagctgctccacggactccggctcgcggttctgcgcggtggcgctcatcatctgcctcttcatcaggctgtacttgtgcagggcccgctggtgcttgtgcaacacgcccttctcatgccgctcgcacaggtccttataggactgcagcagatccaagaagaggttcagcttctccaccacgtcgttctcttcctgcttaccctgttgtgcagccttgtcggcgagcagcgcgaattccacagacaggcctttcagagcctgcttcagggacccccacgtgctgctattcagagcggcccaggagggcagcggggtcgtgtcagaccctattgcacttagctccttcccgaatatgagaagatctgccgcattgtcgatggcccgcgacgcgatccgctcggccctgtcgcgaagcttgtgaaagctattgtagatgttccggatcagctcccggctgatggcaaactgagcctggatgtcagctgggaggaagtccttggccctggtagccagcttacagttcaggaattcgtccccgacgcactgtgctgactcctttaacttgttctgcacatccgagccgctgaaggacaggaagagcttgaggaccacatcctcggagaacagggggtgtcgc

SEQ ID NO: 159062 - DNA, 1000 bp, Homo Sapiens
aaatacttgcattttatttcaggccaaagcccctccactctgaactaaatgccatgacagtcccacagcataggctggtagtaaaagagcccacagacagggtaggatagccagaggagggaggagtgggcgacagggaggggaaggatcacacacacaaacctaagagtagagcaatgcagaatgcctgtggcactcggctcctaccagctctggctctcagtggagatgaagaatggcagcaggaggacagaatgcctcattgtctgaaggagagcgtgttgtttctcatctccatccccagagccctctctttcaggcaggcagaaacaaagcccttgcaccccactgcactgcgcaacacagcagagacgctggtggcggaagccctggaggcagggagctgctaccaaaggagaagaaaaggattccaaaaagaaaggagcccactctaaccctgcggaaaagatggccacatgtctgctttataaccagaagagacagtaacagcccgggacagcctttcccaaaataaaggcccctgggctgttactgttccctctggctgtggccagccacttctctctcatgcatgaccatgagctgttgtgcaggtctcaggctccactcagccaggctaaggtctcgggacataaatccccagcagcaggagtcacagcaccagttccattcagtggtatcagtgaaagaaaaagcaaggaggtgggaaagtaaatattcatccccctgtccatgcaaggaggtaggcaagaggccagcctcccacaaacaaagtgctctagggctacagcaaaaactgaagccagccaagatggggatacaacataaccactcccagtgggatgatgttcaatatggcagcttagaatttgccacatacgggtccccaaaactggtcacctgaggagatactcctggtcctacatacaaatgacctgcagaaactcagatcccaggagagtaatatagggttctgttc

SEQ ID NO: 159063 - DNA, 1000 bp, Homo Sapiens
atagtttaaagagctttattaatgcaataaattaactttgtacacatttttatataaaaaaacagcaagtgatttcagaatgttgtaggcctcattagagcttggtctccaaaaatctgtttgaaaaaagcaacatgttcttcacagtgttcccctggtgtgaaattggggctccctcgcaaacgctggtttcgctgttcaaaaaagcggaatattgtatagaaaagcatgttgtcttcagtctgctttgcagcatctaaaaattttcgtgcagaaatgttgtcatggccaccaatgccccggataaaccttaaggcagctaacacttggtgtttggaaaggagaacttctactatttcatcatttgctgttgaaagtcgcttcagcatgtccagagatagctgatgagcaggaggatagaaactctctagggataacagcagacaagccaaaggtttggagtcgctgaggacgtggtactgcaggaactgatgcagcatataaaagaggttgtgctggacaagggttttgataacaagttcatgtaggtaatgctgtactgcaatctgaaactggttaagagaacgaatgtattccatcagcacggctatcacaaatttatgaggcatctccttcttttccacgaaggctgacaggacatgggtgtacacatctgactggtccagcaccgcctgggtccgcaccggcctcttgaggagcgggctgcttcggctctgccctgcttccaccgccatcgcataactctgctcggcatccaggtactttttatactcatggttgagtttatcaaaaacagtggctatcacgggcagcgatgctctgtctgactcacttaacatctgtgaacagacagacaggatgaccatcttgcattcctttctctggaggagaaagtccatgagtcttcctttgtctggtaagagatttactatgggctcaagtttcacttggaggttccagaggtaaccttggcttgcgc

SEQ ID NO: 159064 - DNA, 1000 bp, Homo Sapiens
ttttttttttttttttatttaaaaataaactttattaaagcagttaaacttagcattaaataacactctttaaatggtacacctatgaagcaagagttaaatataaacccagtctaatcctgtacacttgtgattaattgtgacaatcttaagttgctcacttctttcccatttaccaattcagagaaagcccgtttcctgttttctcctcaccactttgccttggcatcacaccaaccctgcctcgggcttcagctgcagatcctccccagcccctcctcccagctgggctgactccagtcccagccccagtctccaccaactgagcagcgtacgcagggttgtgtctggcttccagcatctaccaccccttcagagcaacttccaacatgggacaggagaggaagctcgcattgcttggtctgaacagatttaaggaggttttatcacaaggacctgaaaacttcctaagcatgctttctccttgcacagctgaggaggggcaatggtgggagcggggcaggggggtggcaggggcggcaggggctctcaactaagggctctgaatcacagaggggacagatgctgccttagtccttcttgcctcccagggccaggcttcttgtgaggagcttccctgggctggagggggtcagtgtggagactgtgggggattccagcttcactctgtctaagagggtcttcttaagggcagctggggagatcttttcttggtcggccatggactgtagctctcgtgttcggatacaggaggcctcaactgcattgatgagcagagagcggaagcccccactctctagaaagtgcagggcgtggatggtggctcccccaggggagcagacattgtccttaagctggcatggatgctgctccgagtccagcagcatcttggcagctcccagcaaagcctgggccccgagttggattgccaggcgccgtggcaaacccatcttcaccccaccatcagccaatgcgtcca

SEQ ID NO: 159065 - DNA, 1000 bp, Homo Sapiens
ttttttttttttttttttgaaatatatattccactttattagttagaaaaaatcatttaagccacatggtggccacaatgtccataacttgagcaggctttggcatcccaccacccccttcagaccaatacacactatgttggaggaacgactttaaaatgtaaaatgagaaatgggcactgaacactccatcctcactcccaacagcccacccacacaacctcttcaactgctatccaaacatggaggagctcttgtggaagagaggctcaacaccaaataattgagcataagacattcaagactaaaggaaccccagacagatgtttaggaagtagggttgaaaatatcaccatctcccaacagctgaagttgggacatctaagagatgtcagagccatactgctgaggaaagcacagcatacaccagaccccggggtaagggcgagatcaacctatctcatagccataagcaatccactcacacctgtgcattaaacaggctttttcttttctttttttttttgagatggagtcttgcactgtggcccaggctgggtacagcagtgcgatctcggttcactgcaacctccgtccccgggttcaagcaattctcccgcctcagcctcccaaggaactgggattacaggcctctgccaccacacccagctaacttttgtatttttagtagagatggggtttcgccatgttggcgaggctggtctcgaactcctgacctcaggtgatccacccacctcagcctcccaaagtgctaggattacaggcatgagccaccgcaaccggcctaaacaggccttgcccaggcaatgagcatccagttagacaggttcttcaaggcctagtaatagttctctggttacaacggtgctcagcttgtctgctaggaatgggactcccatctggacatgtctaggtcagtgttccaaaatatggccagtatggaaggaggtcttatcacatgcttctggatggatggtct

SEQ ID NO: 159066 - DNA, 1000 bp, Homo Sapiens
ttttttttttttttttttttttttttttttttttttttttttttttttttttttttgccaagcccgtgggaattgccatttattcccaaagttgccaaaatcatcaccaaggattcaccgagggtgcgtgagcgggtgcgtgaggggaacgaggaggctcaaacactgactgggggttgggagtttggagggagggggaatgggtgggggccccagccacccctcccccttctaatgccacgggaaaggggtcctcctctggccagctcccctccccaggccccatgtccagtttctctccggggaggtggggtgggaaaggaagagggtgtagtgtgagtgggccccaggaaggggaagggcactgggggtggggatcccccatttcacatgcactcacaacactgatctcccagggagccggaatggggcagccggatggagccaggcccccttccgccctggattataggaggaagggattagtgttgggggccggggggcccgggggcatcatggggggcaggccagggcccccgccaaggggagagatgtacgtgggtggcgctccagggacgggaggcacaggactgagacggagctggttcagggtgagcgtcgcgggaggcgcgggctggaaggggttggtgacggaagggccagtggctgggcctccgcctggcaggaaggggttggaggccttggctccaggcggcgtggggcccggccggctcaccagcgagtccaggtcgacgagggctgcattgggccccaggaatgactccggcgtcttccgggtggggggcgtgggagttggtgtggctgcaggtggggggctgcccacagcctcagccagagatcccctgaccccactcatgtcaaacgccccagggcttcgggccggcacctctcctgccagcagctccagctctcctgcgctgctcccggaggtcggcagtgccgtgcggagtcggtcaaagtcagagaactcgtcgggctc

SEQ ID NO: 159067 - DNA, 1000 bp, Homo Sapiens
tttttttttttttttttttttaccttgtaaaaaactggctttatttgtcacttattcaccttatctcagttatgccattttggcgtccacagtgacagtcccctggaagctggggtcagcccccacccacccaccgtgaccatcacccacagggcgtgagtgtgggccttgcagggcccagccgatggttacaggctgcaggcgggactatggggctcctcctgaggcctggtgccttccagccccctgcccaccagcttgggtacagctgcctgcctgccagaggccaagcattcctaagcgtgggctgggggaggccctgcccctctgtagcagcagagcagacagggcagtgggagaaccatgtgggtaggagggcatcaggtctcaagagcctctcccctgctcaggactgggtctagacaaggccacgtgtgatagggtggtaagccctgggccatatggaggagcctggggcccatcttggttctgctgctgagttgctgggtggctttaggcaagtcccttcttgtcccttggtcactctgtttcctggctagcactgccagcaaggtctccagagtgtgcccctctgccgggctgtggcggtggccctgtgctttgcaggctgccgtgtgcccactgtcagagtggggtctccccgacaggctgcacgcacccccaggcccccttcttaggatcagggcatcctgcaaaacatccttggtcccaccaatgtctaaagccagctcgaaacctcgagctcctcaggatcttagcacccaactctgctgcccttgctgctgggcagtgcctgtcctaagaggggactccctaaaggccagagagagggtgctcatctccaggacctaggccacctgtcagcacaaacagaacttattccagacataaacatgagtcttcttatttcaaacactggagcaactgatcaacaccaccacagcccatgcaccccgaacctgacttcactaccaacctt

SEQ ID NO: 159068 - DNA, 1000 bp, Homo Sapiens
ttttttttttttttttttaaaaggcagacaatgacaagaagtttatttcagctttacttaaaattttagtttcaaatgaaatgaaatgtgacactgaagcataagaacacaactgaagactgcaaacaacctaattcattttccgagtttgctcaagcctccaggcaccagtcaaatatcgaagtcgtataaaaagtaggtctttacccatttgtagccagctccagaatggaactaatttagaaccttcaatttctgtccagttgacagcaatttctgctattggaattttaaagaactgtgctatgtacagtagttctacatcaaatgcccatcgttcaacgtgtagagatgaaaacgtccgtgaagctgcttctcgagtaaataatttgaacccacactgtgtgtccctgattcctttgacacaaaggaaccacaccagaaagtggaacccatacatgagaagagtacggaagtaagaacgctgagcaattgattctttttctaaatgagctcgagatccacatgctatagccatttgattaggccaaggctgtagatcatttagccccttttctaatttctcaacatctggaaactttgtggctccatcagcatctgccataaggatcttttctcctcgagaactgaatatacccattctaatcgctccaccttttccacgattcttcaccagggttatcacacgtactttgtcacttccatatttctggcaatatttaaaagctacctttgaggtctgatctttactgccatcatcaactactatcacttcataagtgaacgcaggatctcgtttctgtctcttctctagatagctcagagcttcatccatcatcacaggcaaccgtttttcttcattgtatgaaggcacaacgacagaaagttgtttggtaggtgagtcccatatgctgggtaaagtttctttctggcctttggcatttaagaagaatttctcttcttcatgtcgatggagtgc

SEQ ID NO: 159069 - DNA, 1000 bp, Homo Sapiens
ttttttttttttttttttttttttttggtctttggtctccatatacatttattttgtgtagacaacaatgacttttcaccatttcctttcctgtggttccatggttctcaaaatggtaatttcatttatacatagcaaaaagttcacaaaacctttcagcactgttcacattttcacatttgtttaggaaacaatttgtttaggaatacagctagctgattttcttctgatttcttccacttttggaatcccacataataataatgttaaagtataccaagaagaacaggaagttcaagcaagatacaaaacacaccaatacagaaaacaagtccggtagtttctgaggaggatccagtgtgacagtcatcaacgtcagaagcaccatagtgatgactgagataagaaacaaatattgtataattctggaaagaaatgtaaaacatggaagatatttcctcacagaaatggaaaaggatttcaactgcagttcttcttcagaagtcttttcaaatattgaaaaggaagttacacaagctataaaaaatgccattgttgtcacaacagagggcattaggagttcatccttcaatagaagaggtagcatactaaatgttgacacaagtaaaaaccaagtagacataaaaggaatttcacttaaaactaagcagactggtagtgacaccaagagaatggatttttcatgtacttggaaagaaaataaaaagaatgatagcgcacagctaaccagtgtaaatttgaatcctttggaagagggctgaagtattaattttatgcatgcaggaagcaggctcaaaaacgtagaacaaaagctcattattaattggatgtgacgtggcaaaatatccttaatcttcagaaagacattgaagctgcaccaaatattggctactttatcctcaaataatccacgatcaaccgggaagagtcttcttagaacctgcagggtttgttccctttctgtaaagaatggcagcca

SEQ ID NO: 159070 - DNA, 1000 bp, Homo Sapiens
tttttttttttttttttttttttttttttttttttataagaaaacattttgaagcctttatttacaaaagctttaaaaacaaataataccctctgttttgcaaataatgttttgtttaaaaaggaccacccagttacagcactgtaatatcatgaataaagaatgtacaagggagacaaaccaatgtgactaacatttggagatttgctaatattactgattgaagtgtaggtaacacacattataacttgtagtccatcatttcggggtagagttaatgattaccgtaaagtcttcctacacatgctctggtctggtcacatattctgcatggctaagtatttcacagtctcttttgtcaatatatataaaatagattgcaaagatatacacaaaaaaataagcattacactcctcaggtaattttatcagctatatatatatatatgagaatatatatatattttgttgttttgtaccaaatctctccattatttacctttgtagcaactatgaaagcacaatttttgtcttctaatttaatttggtacaaaatatacctaaagacttatctttggatttttaataaaattgatttgtgtaaccaacaaatcaagagcatcataagaatggctacaaaatttaaaaaaaaaaaaagggtaaatggtgatggaataaaaataagcagatcaagggaagtgtgctatcataaaataactgtagcttcaacatcttgagtaccagtttcctggcagatagtaaacatccaatcacaagggatttttcctgaagggtgtaaagctggtttgaaaattcttcagtcacagagcagcctacacatgccaattagaaactgacagacactagatgtgcttggaagattaaacactacgtacagaaacagcagttactaagctcctcagtagtttcttgtcttttttaagtttcgctgaatcgacagtttgcacaacgtgctatattctgtgggtcaaaaccaagt

SEQ ID NO: 159071 - DNA, 1000 bp, Homo Sapiens
ttttttttttttttttttttttttttttttgaaaaaataaaatttactgtttatttctttgttacacaaaggtggtccaagacatcttagtccatctcctatgtccttttggccataattacacacacaataatggcaagctagattaggagtctagctcagggtcaagtttttccactttaatgactatctctggagctaaagcggcagcaccagcttgttggttctctgcctctgactccgacaacacttcttcctttatttttacaggcttattactggcctcctcctcttcatctgaagactcatcgagctcccattcatcatctatgtccatttcaaatactctcacatgacgaagatttgagcttaacacacaggacacttttcgaaaaccattcccagcaacatactgtgctttcatactttccagtaatctccagtgcttctcaaaatgcatggtacgggtgggaatagcactacactgttcatctagccttgtagaataagtcccagtgaactgatattctgcagaatcttcactgttatatactaaagacaaaggcagctggaccaagagtctatctcttccttcacgtcctacagtgtctttaagaactactgttacagtttcatcatcataaaactgtgcatctaaacaactgtagatgcttcttctgactttttctgttgtggcatatgtaaagctcccaaatttaatagcaattagtccattactcacagattgagaaatatcagtatgtctccttaagatgcacattttataaagtgaatcttctagaatagtaaaaagaagataatgtagatttgaagttttattattccacagaaaaggaaatttgaacaatctacgtgtagaatcctcacttctggtatctctatacaatggaatacagattgcttgattcatcgattttccaattacatctgctggcttttgcaaacactgatcaataatattctccatccgccttttcac

SEQ ID NO: 159072 - DNA, 1000 bp, Homo Sapiens
tttttttttttttttttacatggccaggcctccaggcgtttattcagccccttccctctgccgccagctgcttgagtgaagcccccactccatgaggagccttgagacccctccagtcctgtgctcagaggctgagtctgggccccccacgcagagctggctgctgctcacgcctggctgcctttacccactcgccgatgatggtggcctccagcttccgcgcctcaaccacggaagcaggatcttctgggtgggaggctctgaggtcgaggtggtgcgctcccccctggatggtgacggcgatgactgaggcactcaggttcctccgaatcccgccccctgcccaggggtccaggttcccgttggagaagatgatgttgctggcggctctgagatcacccccccagaagctggtcagcagccagtcgggccggggccacacgccccaggtgtccaggcagtaccgctggcggagctcgtcagtgaagggcaggtccgggaacatatcggtcacattgttgctggcgaaggtcaggttgatctcggtgcaggcctggtagtcccaggccctggcgtcggggccggtgccgcagccagtggggtcagcacagctgtggtagagccggtagatgtcgtagcagtgctcggagcccgaggcgttgtagaccagccctgccagtgctcgcagccccgtgatcctctgggcctcactcagcagccgatcacagcccaccttgacggggttggcagggaggggacccaggaagtcagtggggtaggggtagtccatcatggccagcacggtgaaggcattccgggcgaacatgaagagctgggtcaggtccttctcgtctgacagcggctggcaggtgccgaactcccagcggaccgtgtcgtaggctccctgtaggaacaagtccttgatctgtcggaacgcttcccgcacaccctgggtgcatttgggactctggccctcaaagtccgccgtgacgtcccggaa

SEQ ID NO: 159073 - DNA, 1000 bp, Homo Sapiens
tttttttttttttttttcaaaacaagtgttatttattataaaatcagtggcttctgattagaagactttttttttttaaaccaaataggctcaagaagctggctggaggttgaattggctgacgaacatcttcttcctccaccagcagtttgtgggacacatcacgtttctgccaagtgctacagctgaagcccatattcatagaagcaccctgacagcccttctccagcaacttccagaaaacagaacctgagcactcaaagctgcatcagcccatgtggccttgctcccagagaagcatctgccagtttgggcatggaggaacagaaagtgggcagggaattctccttggctccttagaaggcagtgggagcccagggaagcgttcggccccagtgcagcctaattgggagggagggatgggtagaggctggctgggcttctccttcctcaccctcatgcaaggtggctgcccctctggctccttcagagctcttcccttccaagttcctactgagaaataagaaggcacaaaggaaaatcagccacctcctggaggtcactgtgggccacctgctttgctaagagccaagcacagacccctgcattctccctgcaggagagcccacccggctcagaagaaagcaattccgcctgtggggaggagaggaagggaggggaggggaggacacacggtgaggtggaagcagcgagcagagcttctccatccctcctctccttccctgccagaaatgcaattaagcaagtggcccagactcagccgcacagacagcgcttcctgctgggggaagtcaaaagggctgtagcagtgggaaagggaggtcatcgggccccagatctaattaaccaacctgccttgcttttgacgttgctgcatttcctctattaacattaatgatggttggtctgaatgcccaagcatggccagaagcttccctccccaccacccagtaggtagcacagcctgtccctgggacca

SEQ ID NO: 159074 - DNA, 1000 bp, Homo Sapiens
tttttttttttttttagcaaaaagtagacttttattacagcagcaactgaggcgaatcgaatggccccccagggccaccactgcagcaccacctttctctcccgccccggccgccccagcgggattgtagaattcggctcccctagtgcccgtgggcctcctttccacacaggctgggcgggagccggcagatcagcgactagcccccaactagaaggcggctgctgagaaggcccaggcccacgtctgtgcaaaacaagtaaacaaagtgcagaggggaggaagagaggggaggggaaaggatgatgctcagaaccagggagcccccccagccctcctgaataataaaggagggaaggggcttcacagggtaatactgactggggggaagggacaggagggctgcagcacgtccagggacagccacagcgcagatcagggcctggcccgagtgagctctaagaggagacggtgacagcggctgagttgagggtactgttcctggcaaaattgaacttgttcaaggtctcttctagcagagaagtcaaccggctctggtcagcctcactaatgaagcccagctgcaccagctcagccgccaactcggggatattctcatttggcatcaggtcacagctcaggtgccggttcagtttgtcctccaacttcagcagaagtgtcaggtggtgtttgactccctcctccaccgactcaatgttgcactgcatcagcaccaccttgcgagtctccacctcagctggttcaggtgtcggagtcttgacagaggggggcacgacaggtgatgtcacctcctcctgctgtggctgctggggccgaggcagcccaaaggctgtcagaggatagatcccattcctgacatcttcaaggaatttatctaattccagagctggtgactgagagtacaaagtctgaactggttctcttcctggtcctgcagggatttcagccagtacggcactagtatccatgtttttggtga

SEQ ID NO: 159075 - DNA, 1000 bp, Homo Sapiens
catgaagactgagtgaagactttattgcaccatcacatcactaaggtttttctccaacatgaacattctgatgaagtcgaaggcttgaggcctgactaaagcacatatcacactccctacacttccatgttttctctcccatgtggaccctctgatgcatatcaagattcaagcgcctgttgtagcccttcccacagtcctcacatttgtatggcttttctacactgtgaactttttcttgcactttagagaatgaattctgtacaatgttcttcccatgctgctcacatttgagaggtgtttctctgctgtggcgtctctgatgggtcagacgagttgaggaccagctgaagcccttcccacactcatcacatttgtatggcttttctccagtgtgcactctttgatgagaatgaagctgtgaattctgagtaaatcttttcccacactcttcacatttgaaaggtttttccccactgcgcagtctctgatgtttcaaaagacacgaggcccagccaaaactcttcccacattccttacaattgtatggtctctctcctgtgtggaccttctggtgcatatcaagattaaacttactattgtagccctttccacacttctcacatttgtatggcttttctccagtgtgaactctctgatgggaatgaagatgtgaattttgagtaaatctcttcccacactcttcacattggaatggtttttctccactgtggagtctctcatgtttcaaaagacatggggcccgactaaagctcttcccacattccttacaattatacagtttctctcctgtatggacgcgctggtgaaagtcaagatccaacctccttttgtagcccttcccacactccacacatttgtatggtttttctccactatgggatctctggtgggaatagcattgtgaatttgtgtaaaatcctttcccacattcttcacatttgaatggtttttctccactgtggactcgctgatgttt

SEQ ID NO: 159076 - DNA, 1000 bp, Homo Sapiens
tttttttttttttttttttacctgtaaaagttttatttcaaaaagggttaaaaagtagggaaactctttaaactactgaccaagactgccaccttcataattcagatgagttagtgcagagatggccagggccagaggtcgcccagaacctgcgtgtgcagactgcgctctgttagtcttctgcctgtcagcctcagcccagtctgtcttgcttaagggtgcgcctccccagggctggatgatgctgtgctcaagcctgcgggtaggagggctccagcttgcagatcccatgcgtggatgccatatatagatggttgaaaccagcatcagaggaaggaaggtgaccttacagccactgccgagaccaacgtgtgccctggcccagtcacagctggaaatcccagggctggtctacacccgactctggtttggtttaattaggtccttacgtgttggtgttgtcccaggcagttggcatggcatcagcactgagggtgtgagaccctgaggactcagcctcccgtcctgccagtagactgcctgcagccccaccctctttccctcaaaaaagaaggaagccaggcaagagagcagaggcccagggcgggggagtgaaagggccaagggggagtgaaagggccaatttaatgagaaactacaaactgagactgggccacgattcacagtgacaggaggccatgcagtggcagtgcgagaccaggaaggacagtggcaggatacagtggtccaggtgagcaagttcacaaaccattcaggaaataaagacagggcgaggctggtgtccaccaaggcagttctaccacttgtggctgctccttcctcgtccctagcccagtgtgcctgcaggagcaggtgtgagcaggcacagcaacagcctgtcagctggggtgaggggcccggcacttacagggaagaaaatccatggagaaggctctgcacatccaagcgcacccacaagggggaccctctgccatctctt

SEQ ID NO: 159077 - DNA, 1000 bp, Homo Sapiens
cttttttttttttttttggtcaaaattaactttatttttcaacttcatagggatgtgataacaaaattggcacacacaaaaagaatactgatattgggcctgatttaaaaaatgcctctggccaggttgtaaaaaagtgaaagtaacaaagataaacatagaagttggagttgtaaaaaagtgagttggaattcatgctgccatgatctacttgaccagaggcagcttttcctctctaagcctattttatatctgtcagtggatttgagatcactcattttaccattgtaacattccgagccttttgtcactgtgtgtccctttgtggccatgtaagagaccacactgctgtaggctgagaaggccacagtggttcaggtgctttgaggacttggtcttggctcaatagagcctcactggtgtttgctcagattgggcagcctatgcccaaagctacttggctaaacaggctggtgacaccacacccaaaaggtggcaaagaataggaataggaaggatcagcacctattttggagtgaggaagccaatggaggtacaactcctcaattctaagtttttgttgtttttttttttttttgagacagggtcttgttctatcaccccaggctggagtgcagtggtgtgatctcagctcgctgcaggcttgacctcctgggcccaagtgatcctcctgcctggacctcccaaaagtgttgggattacaggcatgagccactgcatccagcttgcttctaattttcctacccaggctgttttaaacctagttctccagctaagtaaaatgtgcccaaatggaaaacatctaaatcttctgcagcccattcttcctgtgtctttgtgttgacaaacctctaatcttccatgtctttgtgttgacaaacctaaccttccatgtctttttgttgacaaacctctaaccttccatgtctttgtgttgacaaacctctccatgggtggtgcatctgaccctatcccaaca

SEQ ID NO: 159078 - DNA, 1000 bp, Homo Sapiens
atatctgagtttgtttattgttctgatttactgaaacttaaaatattccatcaaattatccaggaaaatccaggtggcagaaatatataatatgtccatttcatcaagaggtctcaaataaattttaaaaggccagaaaatgatatatatactatgccatttaaatcacttctatcttctgtacttaagaactcaagaatagaaataaactgtgggctgaagtaacattgtaacctgctcccaacatgactgcataggtgtctaaggttaagtgtgaagattactgtgaggtctcaagttacttgactaatcaatcccatttgaatttcaatccaagcagcatattttacacacacctgaaggaaatatcttcagtgtgttcatgtgtgtgtctatgtgcatgtatgtgtaggggataggtgtaattagggaagggctgaccgaacaacattgataagtacatgctagaagtctgctgttgttggtaacacagaaacatacacagtcttcatattcaaagtcttcacggggatgtcttctgtaatttcctgcgtttgggtctcattcagaaacagctttagcttcctgctccgaaggccaaacaccttggctgcttcatacagaagaccttggtgggtgagtccattctgcccaagtgggttttcaagcaggagagtgcccactgtccccattaaacactcttgtggctttgcattcaggagctgtaggttgatatactgacaaagaagagtactagaactgttgatcagagagggagccgatcctgcagtcacacaaagtgtttttccactaagactcagtaagtcagtttggttttgtatttctgtttcatcatggaagacagccagctctgtatttttcacaccaaaaatgctagtgacaacactcttcagctttaaaaggtccaacctattgtcaccttttggattttccaggagcaatactccaccttgttcactgccatttgcacaaatgttaa

SEQ ID NO: 159079 - DNA, 1000 bp, Homo Sapiens
tttttttttttttttttttttttttttttttcacaagaaactgatctttactcaacaaagttctacacaagtggaatctcacgccacctcggcgccaatccccagcacagcacagtaacaaatggacagacccgggagcccgcagggggaagagggtgaggagggaaagagggactgtggctcaaggccagtctgggtccacagccctgggtaggggagaaggttgagaagctgaaacttcattgtgcaaaaaacaaccaaaaataaattaaaaaattaaatagtttttttttaaaaaaaaaaaaaaaaaaggaaaacgagaagaaccaggctccccttccctgaaggtgtttgtatccccccatcttgagtagcgaggggttaccaatcccatcagacagccaatccatccacacaccccaagacccagcagaggatgcttcaaagaactggaattaccagaaaattaaaaggtatttttaaaacttttttttttttttttaacaaatggcttccagagacctgctcgagtttcatggggtgggcgtgcagggacacccagctaatttatggaatgtgtactgagtgccccttggaatagatgcagggcctgaccctgactatggaaagacacagggcttggatggagggtctggcgcccaggagggatggatggagcaggccccaggatgcgagactccagtcagactccaaaacacaaggggctccccaaagaagtagaaagcagggaaggaaaaaaagggaaaaaatgctaagggggtctgcaaggcccagttttctggccaactgggaagtaactacacccccaccctctctaggggagccccttccaccttgaccatgttcccagactattccggaaggttctctagaattgctgacccagtctagtaggatctctgggctcactgggtactatgatgagcaggaagtcccagggagatggaatagggaacaggggacacaccacctttccctt

SEQ ID NO: 159080 - DNA, 1000 bp, Homo Sapiens
caagtgtaaaagctagagatttattgttattttatgattaataaattgtcaaattagttatgacactatcccacactgaataccaccatttgccagtacagaagtttttaaaccaaactgaggcataaagcagaaagagcaaagacacatgaatacccttcttaacaatctcttctacttatgcctccaccgtaacctttgtacttgttttcctcctggggaaagtgtcagaacagtgcaaggactggtgggtaacctggcctcttaacctttttaatagcaagcaacatacagaagtaatgcaatcaacttgtatttcccttgattttattggtctgaattcattttaggttactttaacattttaatttcctgtaactgtacatgagagaatataatcacctaagagaatactgaaccagagtcagccaaatgtatcactgaccctcaattatgttttaattggtcctaaaggaatgtaccaccccaacagtttgggagttaggcaaacagaattctttgggggagggaagaaaaaggctataaaacagccaaatgtactcaacatcattaaaacggctctttgtttttcacccctgaatgatacttctttactacactatatgcacagaaatcctaacagaatcttggttgccagtattatttaagctggccccatccaggacagattccgctgccccacccccccaccccgtccccctttctctgaggctctgaaaagcacaatatttaactatttcttaatagaactaccaaaacacttcagaaacaattggctcacaactcattttaaatttgtgtattgcctgtgcatgagaaaacagataaacccaaaagatagttctatttttttatggcgattaaaaataactgaaacatcaagacactttttcagtgaaagcaacatttcaattacaaattttaatgcctgttaaactacctatgggagaagctgagaagtcctaggcaaatgcacttt

SEQ ID NO: 159081 - DNA, 1000 bp, Homo Sapiens
gtctacgtcttggtgtcttatccgtgagtgggaagtggtaagctggtgatggtcccatatttgctatgacaggaacacagaggtggcagcttaggaagctggggccacatctcacaaggcaggacctggatgcactgaatcccccctttgcttccagcaactcagccagacatttaggcgggagcactaatgaccctttccatcccacacagagggtatggaacaggagcccctgttgttcccttgcctgtggtctcttaagccagtcatacctatcccaacgccgtctccccctcaggtgtgtagaagggaagatgaatacacagagtcttttgaatctctatcaaatgtggtttttttattcaacaactgacaagcacttttctacagctgcacttgtggaacatcacatggcaaaaacaggagttttttcgctagactttttttttctttttaaccttattaaaaatgaaattggtcctaaaaatatagaaagaaataaatttaaattcacaaaaaactgtacattatcaaaaagtcactaaaacaccacatttggttatataaaaagtcccttttgctgtaaaaggaacacagaaacttgttggtgttgatggtgtggtttcttcctgtcaaccagactgatgggagggaagcaaaagggcagggggtgggttgtctttttattttaaacctgctttccctaccaaatactcttgtcatgaagagaaaatccacctagctcaagggggcagtgaagatgaggaaagaaaagcaagaaatggcccctttgatcatgccctatccctaccacccccaaccccgctccagcccccacttcttcaaactgaggctaggaccccaccccgccatatgagtgcctggtccctagggaaagagatggagctgggagaggaacacaaagcaggaaccatggagatttcactcccccatccacctcacaatttcactcccccatccacctcacaatgaaattaat

SEQ ID NO: 159082 - DNA, 1000 bp, Homo Sapiens
ttttttttttttttttagtttgtaaaagtcttttattgtatccgtgccacacatagtgaaaaataacactcctaaaaaaagaatgctaccttttccacaacattttattttaaataaaacttcaagtactcttacgtaggtacaaaaaaaatctgatctatttgcctccaacaggccaccacaacacacagtagataaaacacagtggttacaaacgtcttttaaatttatttctgaggcaaggcaaatgggagggaaatgtttctatgaaaaaatactgtgtgcgtaggaaattgtcacaattttattccacatggatacaaatgattatactttaatttaggccctggtggcttaaaattatataacaaaatagaaaaatggaaaactaatatcccctacaccctgtttcaaaggcaggcactaccaagattaaggagacgccacagtgttggtagaggataattactgtacagactgtatagctatcattaccttcagacgaaaataaaatgctacaatcctctaaggcatgaacaataatgtctgcaaacaatatatacacataatacatatttaaaacaagacttaatataaacaagaatgaacagtatatacatgtcaattttttcactgttttgaaatacaatttaactacacaagtgatgcagcaacatatatatataaatgtacttgtaactctacagtaaagtttctttttggtgcttttatagcacatcagtgtaaacagtttaacttggctttgttttatattttaaaacattccttgtattttcaagatttaaagcaattttctagttcttccttttcacagaaaacgaagattctggatgtggtttaatcataaataattcataaaattaaatacattcactaaaaaataaactacaaagtaaaaaaatgaaaaatagatatttattgagagggaaaggagaaccatttcccacattagagctctggtgttgagtattcagtgcga

SEQ ID NO: 159083 - DNA, 384 bp, Homo Sapiens
tcagcttctcaaactttattttcattgcccaaggttgagagatgtagcttcttgctactttgcaggtatttcaaccattatttccatgaattcctcctcctccatttggagggggttgattctgttctctcgggcgtggtcattcagcagttcctctggagatgttcttttaaagttcctcctgtagcgaaccactagtatggtcgaggactcagatgttttcatttttttaggagcaggttgcgggtctgagtccccagttggggtctccggcatcatctcgttggcctcgttggaatcacaggggacgctcctcttcaccccgccggcactggattgtttgtccattgtatatattggttcttcaatgtcagtggcaggctt

SEQ ID NO: 159084 - DNA, 1000 bp, Homo Sapiens
tttattcaaggaatgaccaggagttttcatcacctttcttcctacctcttctctcttccctccaccagatctggcatttaagggcacgatgggagcgggagacaggaggggcatccggtcctggaggctggactttaagtgctccacgcagcagcggcctcccatagtgcacaatggtggaaggaggcggttcgtatgtccccagggcggcatcccaatgccagaccttcctcccatggctctgttcaccctttacaagccagctacttgcagaaaagtggggcactgtgttccatccaacctgcaggcaactggtgcaaaacggaggggtgtgtggctcagcttagcagcctagagctcaggaaccaggacagatcctgaaacaggagctgaaagggccagaactggcacctttgggatctcacaaaaatggaaagagccgctttttcacaatatagaggaccgtagcaagaaacaggcgtagcgcaaggaagatgagaagcttgtccgtcagctcccggcgattgtattttgtgataagcttccggcccagctggatggtgcccgacatggacttaaattcttcatttgcatccaggatcgttcgtgaagaagtgactagagactgcatggcctcctcgctctgctggacctgctgggccatcatcctgctgatccccatgaggctctcagtgatggtactggatgtctgggccaggctctctttggtggttttcctttgccttaagagatctcctccctgaagaagttctgctttctctagattgtcgattgcaattttgcaggtgagattagctttcctccatgaggcctgattgctgagcatctgctttttgtgattctccacttcctggagtagaagttgtttctctgattctttgtcttgctctttagccaactgctccaggtcactgaaggtaacaggtgtagttggagagttgaagtcatgctgagttgaagaaaagtctgtcagggaata

SEQ ID NO: 159085 - DNA, 1000 bp, Homo Sapiens
aagaatctttattgttttagaagcaattttgagcaaacagacaggcaaatatctaaagataccatacatcaactagtggtttaaacatttgaagaaaaaacatggaaagtatttacatggaccagtttctttatacaaatgctaaaacatgaaaaacacccaaaaccagatagagcgttaccatcaaggtatgaatctagtaatacaaataaaactacaaaaggtacaaagaacatgtagctataggaaataatagtgtaaatagcagtatataaactggcccatgtaaaatacaaaaatattcactgaagtcaggttttctataaaacagtgtttattagaggtattttactatgaatcaggcatataatctgaatgtagaaacttttagaaatattaacagcattcagtcagtgccatgcattgtgcttccaattatttttttaaagctgctttgttttgactcatgtgaaatagttaaggcctacattcttatacacattatccatcttacaaggttaacaattttacactaaaacacagtttaaattaaaaacgattttgaaaaattacatctatatttaatccctaagaagtgttttaagctggtaatgcagctcgctgtagctctaagagaggggttagtcaggaatctgatcttgagccataaaggttttcaggctaaacaaagaacaaatttaagtgacggaaaatatttataattccaatataactcagttatatggttataaaatacccatgctaggcatgcaactgcctatatatgtgtgcatatatatatatatatgtctgtgtgtgtgtattgatccattcaatgtcaatattttggaacccagacaattttctcattttctagtgaatgggaggcacataatcccaccacaaaaaaaaaaaacacgaaaaaacaaccccacaggaaccttccatatatggctgcatattaacaattttaatatttgctcagccattccaacacaca

SEQ ID NO: 159086 - DNA, 1000 bp, Homo Sapiens
gcagaggaactactcatttatttgggatccaaggcccccaacccacagtaccgtccccaataaactgcagccgagctccccacatgctggactatcaccccatataagggttgcggtcagtgggcaggggtctgggtccaaggccgcagcaggaggaactggacagcggaggaagtagctagggcatgtgcttggccactgcctccagcaccccaaatccctgcctgaggctggggagagacctctgccggcggctcctcaggcctcccggacccggcctaggaggccagcgttctcctggcggagggctcggtagtcctcccggatcttctccaggttgctgagggtcttcttgcccagctctgtctcgatctgctcctcgaggtctcgaacctcccgcatgatggtgcctgtgtcctcgatggtctggatgagctggctgcagttctcgtgcagagcagctagatacttataggccttccgaacagcatcgtccttcttggcatccttgaacacaagctcatcagtcaccgcaaacgtccggtccagcttcccagatagggagttgatttccttctgaagctccttcgtatcagacaagatcttggtgatctcttccttctgcttccggatgttgcccacgatctccaggatgcgctgggtgtaggccagccgggacacatctctgggcagagtctccagctctgacatcagctgcttatagacctcctccttcctgcgggcctcttcagcagccgcccggacactctggtgcagttcttggatctctgccagccgtcgagaagattccagctctctgcaatcctgcagctttcggaggtggcggtactcagcgaggagtgggacccggtgcttctcccactgacccgccaagtggatgacccgctgggcactattctccaccacaagctgcagcttggcaaggttggcagtcccatcgggcagcagctccaccgcgcggctcttcaggcgcagggcc

SEQ ID NO: 159087 - DNA, 1000 bp, Homo Sapiens
ttttttttttttctggattagaaaacctgtttattaagactgggtcacatccagctagtacatttcagtgccctttctggtgctgcctcccaggagcagacactgcaaatttcagaacccccatctagagaaacccctaacctgtgatctagcttccgaggctcagtgttggttcttgtggtagtgctgatgtgtgggtaccactgaggccaggccacagtcgcatgtaccctcctctgggctgactcacgaggctacaggggacagcacacctaatgagcaggtctgtcctccagacatactcattaacaagcacgttcctggctaaaaaataaccagatctttttggccgtgccctcaggttggagaaagaaaacttttaatttggaatcactacaaagacaaatggtttctacaaattattttattagaatgtcagactcaaaagaactaccaggaacatgcctgaaaatgctatatatgatttatgcttgacccatgacacctgctgtcactggatccagagtgagcaagggaaaggaagtggaggtaggcggggacagcaccagccctggctggccagacctgaggcccacagacctggtccccacaaccaggattcctacaatgtacacattcctaattcaggctcaactctcctttacccaaaagtaaatgcctcaggactcaatctgaatcactgtctgtctcagcttctttcacatccacgctgaatttgtactcctggtcacatcccatgtaagcgtcactcatgaagtacagagtgtagttgtgggcaccagtggctggggccacaaagtccaacttcaccttggccttctgctgcaaggtcagcctcttgatggagatgaggctattggacttggcatctccaatcaccacccaccagccctcttcacgtttctgcgggaagagaggcgcaatgacagggcctgtgacttcctcctctcgctccagctgcaccagcaccacaactggc

SEQ ID NO: 159088 - DNA, 1000 bp, Homo Sapiens
tttttttttttttttttttttttttttttttttttttttttttttttttttttttttttttttttttttttttttttttttggagttgcatacatttttttttaatccaaagaagtaagcctcctaagtattgcttagacaggtttatcagaattaagtaggcacaacactcatactttcagaaaagcatttccagccaggggagtaacgtggcactcaccagcatgatgtctgttttgccaacttgctgaagaacgagtaacctgaaatgaaggagcgagaatcccaccctcagccccccaacagcttcctcagcttctttttcttctgagtcacccctgaaacagtcgctgcatctaagaccagcctcgggctaaacccagctggcctgaaggctcaactcacatcaaacggagctgggagtcgcttttgcgtgtgtccgcagtttgaagtgtcctctccgaaggtgaagtgggggaagcaggtgcgctccgggatgaagtgcagggaggcaaactctggctgggttcctgtaaacatccatcgcagctgcaaataatcagaagccaaggccaggccatcgatttgacactgcaggcagatgaggtcttgggatgcctcttgcgttcccccttctgtgggagcaggtgccttcccaacctcagcactcagtcccaatctctcttccactctcctgggttcaaacaggaacctctctgttggcacgaagcttttgaggggagcaggtaggcctcggaggcaggggagggtctcctcctggggaaccatccccgtccagatggtgcccccaaccagctgcggcggcatgatctgggcggctggtccagggcatgggttgcggatcgtgtagggaagaggggaacagcagtcgagaccctactccaagtacgcatcaaagacgtcgagctccgagtcagcatcgtaaaggcccgagccggggtcggagagcacgccgaggtccacgagcgcctggtccatg

SEQ ID NO: 159089 - DNA, 1000 bp, Homo Sapiens
tttttttttttttttttttttttttccttgttctgtttttatttaactccaaatagctaataacataaaaacattttaaaaaaatctccaatacccaactattacttttggttgacaacatttgattatttagttcttgcttgtttcccacatgtagtacagaatctatcataatattttaaaagtttgcagcaggcttaaaacctgaatatttagatcctaatcaaaaaccatgatgtagttattagttttgattttaaataccttgctcccacagaacttactaaaacgaataaccataaataggctagctattaattagatctcaatgaaatgcccacatacagcacatacatataggtagtatatatgcttttatcctttactactcaaaggatgatgtacagtggagttatatcatagacacatttaacttacattaactcaacaaatgaggtcagtgaaaaggaagccgtaaggaaaataacatgaaatcctgtggcgatcccacctaaaatgaatgcacacccttgagtaaacccaggtgggtgctgtccatccgctgggtgggcgcttcactccttgtcagttcacatctgccactagcggggcaagcatcttgcgggctgattctagtgttaaaagttatgtgctttttttttttaacaaaatggcccctaaacaaacaccaacaacttcacttggtcttcaaacaaagaaacagtctttttttccaacataggaggaaaagctacttgttgtgatgtacaggtttccaacatggcacccttctaaagggctttcaaggatcatcctaatagcccattttacctatgtactgaccttggaagctaacccctgagtatgatgcaactccactctaatgtaaattaaaatgccatgatcttaaaaatgccataatattgtcagtataatttaatttccagtttagttccatcttcacatttagcagtgtgtgtctgtggccgtctcctggtgc

SEQ ID NO: 159090 - DNA, 1000 bp, Homo Sapiens
ttttttttttttttgttcccagtttcaggtatgtctttattagcagtgtgaaaatgaactaatacagactggaagccttgtgacaggaaaactgaacatctgagacatctataggaaaaaaagatctgcttacatccagtccttggagttccagtagactgatttattcaccaacagcattgctcctccagctccattccaggagacaggcaccccagaagtagcaggactggtagacatcactagtattgtatatgtgttgtgcatgtatgtgtgttgaggaagaggatggggaaaacaatgatggtggtcaccaggtaagatgggacccaggaagggattgcaagtccaggccccatgaacacccccaaagaatgcccctcctcttggaaataaaagtggttctggatccagggagatcaacagttgcaagctgatattaagagttgtctattggatctgttctaagggatatgttatgtgaagccaaattaatgaagttaggaagtcacattacaagttgatgggtactttgtttcatcaacttgtagaatttcttccttttgaacctctttactgggtgttagctggtgacttaggggtagggatgtggaggctgtcataggcccgtctccgctcttgggcctgaagggaatcctatgtatgcggcagtatacaaagtatgcagggatggggaggatgacaatggcaaaaagggtgatcatcaagagcagtgcccacggtgggtatggtcgaagcacctcttttgaggtgcttgagtcccaggacatgtaggtgatcggcttcatacaaagatgaaccatcatggtcacaaagatgattagcagcacaactggacacagatggggccacagccaaccaaagatgggagagatggggtggcccaacaggatcgtcaggtctgcaaggaacctcctggccccataggcccaggatacagccatggtttcaaatacgacaacgacgatgatggggaaga

SEQ ID NO: 159091 - DNA, 1000 bp, Homo Sapiens
ttttttttttttttaaattaaattttttattcatttttttgcatcaaaatagtgcttaaaattggaatttatactcacaagacatagctaacatccaaagtagacaattaaaaaatattatttgaaaattatgtacttagtactgaagacttcctaaatttgcacattagctagattgccattagcaccattagagagttgatctttggctaatgattattcaggaaaatttcaaccattacaatcagtgagtataattttatatttcagcaacgatagtggtcacgttcagcaacagcttcacttacaaattaaagtaagctcacttcagtgttgcactctgatgctgtttttttaccccttctcttgcaaataaccagtgaaataaaaattgcttctaactggcaatcgaaacaagggaggaattatggctagccaactagttgctaatgtttgtgttttttttatttaagaaacattttaaataatagagatggggtctcaccatggtgcccaggctggtttaaactcctaggctcaggcaatcctcccactcggcctcccaacatgctgggatcacaggcttcagccaccatgcccggactgctaatgtttgtgaaaggcaaattgtaaacttctatggtttaacttcaccagaagggtaaagggctccccacctgccaccttgttctataaaaaaagtatactctgattactagaatggatttttaaaattcaattcaaagattcaataactatcaacatttctaaacactgatttttctttttctctttttcaaatgttttttaatatcctgcaggtaataacactgatttttctaatactcagaaacatctacttagcagttgtgatactaatttgcaaaatgtaataatgttatacaaatataagatactactaaatacatagtagaaataattgcatgattcctgatatttatattcaaggtataaacatgactgatttcgctgatactac

SEQ ID NO: 159092 - DNA, 1000 bp, Homo Sapiens
ttttttttttttttttaagaaaagaacaacaataataaatctttattgagattttttaacaaaataatttttgaaaacaaaagctcccacatgtaaacaagaatgtaaataagttagatggcattattatgtacattcaagaatcaaaacatgttctggtaaacattccataatccggtaaaatgttttcacccatcactgttaagagaaactgtgtatttaatactatcaataacaaaacctaatctttgaacattataaaatggtttacggaatataaactatacagtttagtttttcattcctcctagcaatccgtgtcacatgtatactagtcctaagatgtattttgtcagtattagcccaaaatgtccaccatcccaaattaaccaggttacacatatctcctccagtttttatggtaggatgtgttagaacccatatattacaacatcatttttcaaaactaacctaatcctaaattctattctaactagtctggcaatccttcattttatctccctgtctacacattcattagataccaaggcaatttcaccttaaaaaatactgctaatacacatttagatagtaatttctggtaaaactgtagtttatttatcaaaaaatgtgaatttttattttagaaatgtaggtcaagcattgtcatagttgtagtacttaattgagaataatggcttcaatttggaagattcaatatacacattaaacaaaattaaacagtttaaattataattcatataattataattctcatttttagatggccaaaatatattgttttcttactataaagtgttatttattcatcgtctatttttactaattatattcaattcacagtagtgacatcaaagggacaagtcatcataggtctgagaccaggaaaacctggtctgttttaacagaggcgtgtctaaaataagagtacatatttcaattaggcccacagagatagaaaagagccaggataatcttt

SEQ ID NO: 159093 - DNA, 1000 bp, Homo Sapiens
ttttgagatgtatgattcctttatttttgacctcaacttactgagcaatgccgtagctatggaatagaagcatttgttgcactctttttgtgagccaggccctgtaggagggattgtggatggcaaaacctcaggttctgcccaaatcctccccttgggggctggagggtctctagttaattggcattccggtgcttaaggccacttttgggtagaggtttggcaaggatggagtgtccagacctatgatcctctaagaactttactttttaaaaacagccacccaaatggtggtggcgtggggagcaggtggtggtgaagggactggggtgtctggccatggccacgtacagaggagactctgtgagccctctccctgcctgagggacacttaactttatagcagctacatagggtcaacgggaggcccaccaagtccctgaaatccagggacagggaaggaagtggtggaggggaggctgacccacctctaaaaggttgtgccactatgagtagagcccccaggggagaggcctcagtagagcccccaggtcccctcaggtaagcagtggctcatcctctgcctcagctacccacacccccggctcagccagtggcaccagtagcacatcgtcctcatcttccagggccaggactgctgtgtggggtccaggggggctccgggttggtcctgggggccccaggctgggcaacaggcggcctcgcagggcctgcaccactccagacaatagtgatggctctaggggcagtgagggcagtggccctggggcttcagggacagtagtgggggctggagacgtgctagcagatgggaggggagccttgatgggcagtgggggtgcctgctccccatcttgcccacccactgccccgccctcacgggctggacctgtgccaccatctagggcctcaaggggagcagcagaaggtgtgacctgggatctggcctcagaggcccgagccggggtgttggttcgag

SEQ ID NO: 159094 - DNA, 1000 bp, Homo Sapiens
ttttttttttttttttttttttttttttttacccagagacagtagagctttattgtgtaaaagctgagttggtagaagtatgaaacggcaacaatgtttagcccagcccatctatttacaatatataggggttggggtttcccatacacatctgtaccacccgccctcagcctcaagatttatccctatcagcaacattcatttcctggatttgtcactggccacaaaagacacaactcttcagggtgatatcccatcacataaacctacatacacattatctcctagtccctctagctctcttcccagtctttttttttttttttgagacagggtctagctgtcacccaggctggagtgcaggggtgtgactgcaactcactgcaacctccgcctcctgggatcaagtgatcctaccttagcctccccaatagttgagactacaggtgtgcaccaccacacccagctaatttttgtattttttggtaaagacgaggtttcaccatggtgcccaggctggtctcaaactcctgggatcaagtgatcagcccaccttggcttcccaaagtgctgggattacaggagtgagccaccacgcctggcctctcttcccagtctacagctcctacagagcactctgagggcctgtctgcccagtggaggaggcttccgctggtgttctagggggcatcttgggcattgactcaggtggggggccactctcttcttggagatgaccctggtaaagccggcgaaggcgagacagttctctctccggtggctgtttccagttgtaccatgggtaccaggggtcacctgagaccagggtgggggctggcggagtagcactcacagccccatgagaggtactgaagtcaaggtcccgtggttcaacctgggggatgtggtaaatgaggagaccatgatccctggctttctggatggcctgggtcaaccgcttgtgctgcttcacacagactcctgtgtatggagcatagaa

SEQ ID NO: 159095 - DNA, 1000 bp, Homo Sapiens
ttttttttttttttttttttttttttttttttttaacagtacacagattgtgacattttatattctttgttaaatggttcctggtacatgttttaagtgcctctgcttctagtttaaatgaatgacccagacagagctttcaagctgtttcttagagaatgtgtggttgagcagaaatggctatccacacctgacacaggtccccacccacctcacaccctggaggcagcagcataagccccagtttccactatggtgtctcctcaatgaccagaatacccgccagttccaggggtcagcaattccattctctctctccggctcagttcagaagctgtgatggtcctgttagagagcactgcctgcaggtcaaaacctggaagaggctctcccaggccaggcgacaacccttcaggtgcagacggggaacaaaaggcttaacctgtgataatcccaacaccttctgaaaaaagagtaacagtcatccagcaacgggccatgggtaggggcgggcggtagcaggggacactgtcccctgcctcagcatgtcctgtccagagggtgggcacagatataggctcgcttctcaaggatctgctgggacactttcttaatctgctcatctaggttttctggagcatacttgtccagctgagagaggctgaagagattctgcaagtaagcttccacgcagaaggtgttggccaagagaacctcgtggtcgtggttgcggagcccaatgcggatggagcggctggcccgcgacagcacggccgtcatgccatacaggttgatgaggatgttggccacccgcttcagtaccagctgctcctccatgatggtcttgccaaagcggagcagcagtgtctccacggtccggccgaagcagtaggtgttctcctcaaacttgttggcactgtccgcaagactagggtgcacaactccatggttgcctgtcagccccaggtccacagttcggcccagggagtcccgaagcctc

SEQ ID NO: 159096 - DNA, 1000 bp, Homo Sapiens
ttttttttttttttttttggtagttcttagttttattataaccttgtattttctggcaaaaatataaatctaaatgcatgatctctgggcacacagctcaagtatcagccttgagatgacctaagcagcaaaaatttggcctatttaattaaatgcacaggaggttgcagccgcatttattagaaaaatattatcctttggaaattcctttcttgaagattggctccagggcgttgttctttctgtttttatgcaattgcacttccttggcaggcagccaggcgctccggtgctcacaggccatgggacagtccagttccctgcagacccagcggggcatgggcggacagagccgcaccgtgaagcccgcctgttatttccatcgggtggtcctggagacgacacggctggggaaatgggtcaccggaactccacggcggccagacgcccatccaatttgcctgcgggaactcgctcttcaccttttcttcacaaacttctttctggaagcgttgggatttaagcgtctccgcccagctcccaaggtgctgtcccggacctgcagggtagctgagcggctggagatgtcattctcgacaaagggtgacaccccggcgatgtagtcaggggcgaacacgttggttttctgcctggccttttgggagagtcgcagctgagggaagcgctgatcctcggtgagatgggggttgatggcgtatttgccccctttgggagtgggaagcgagtaccggaggccgcgggggttcagcaccttggggttgcgggagaagtgcatgtgcagggtgccgtcgtcgctgacggtcacggacactttcttcagggtcttgttcccacagtgtgagcagaacactcggctcatgtcagacgttgtcttgaaacagccatggcagcgcaagatgtagctccgggcctcacgaatcagcatgccgttcaccgccagcacgtgcagccccatctgcagcagaacattctgcatggc

SEQ ID NO: 159097 - DNA, 1000 bp, Homo Sapiens
ttttttttttttttttttttttttttttttttttttgccacaacgagatctttattaggctcctcgggggcggggcgcggagggaaagaaggggtggccaggcccaggccaggctgcaggctttggcgacctctcagagctgggagcggggtcccgaaggcgggtcagtcccggtcagggtgggctgcgggagcctcaggccacggggaagtagtgggggagccggctccggtagatgtcctcgtccttctcgaggaacacgcagatgatcagccggtccaccttgtccttgtgctgctccagccactctcgcagcgtggccagcacgatctcggcggccgcctcacaggggtagccaaacacgccggtggagatgcaggggaacgccaccgagcggagccggtgctccagcagcaggtccagactgctcaggtagcagctgcggagctcggcagcctggctggcgctgggctccccgtaggcgatgggccccactgtgtggatgacgtacttggccgggagccgatagccgccggtgatcttggccttgccagtcttacagctctgcagggtccggcactcgtcggtaagcagggggccggcggcccgatgaatgcagccgtccacgccaccgcctccgagcagggagctgttggcggcgttgacgatggcgtccacctccagcttggtgatgtcgctgcggagcagggagattttctcattgagctgcttgtcctttttatacctgggctcctccaccttcacagccacccctttcgccatctccttccatgtcgggatcttcttcagcctgacaaagtccttgcagaagtaatgttcctcccgctgcttgtcactcaggcccttcagaaaggatttcgcctccttccagtcggtggaggtgctcaggtccaccttcgccgccatggccaggggggcccaagtgcgcaccccggctgtccgccccaccgccgccgccccccacgccccaactcccgcc

SEQ ID NO: 159098 - DNA, 1000 bp, Homo Sapiens
aggataattaaaactactttgaattttttatttatcaatctggtttctaatataattttagttaaatgaaagacattcacaaagaatattaggcatacgtacataatttccttctttcattctagtttacatgctgttgcttttagagagtgaaattttgtgttatttcacaggggatggaatcctgtttgactttacagaaagaatatttagcccagcttttcacagcactaacctctgcagtcaccacgctcactgaaaaaatttaaaaaacctgacaaaataaaacttagtaaaatctagaaacttgaattcaatttaataattgctgccctttttttgggaaaattgctcaacagggtggtgaaaagaaaaaatggggggtttcaaattcagtgttgtttggaggcatgagacataaacgggccattaaaacgtttactgcgtaagagcagggtataatgtggtgaggagaggaagagagaaaaaagtaggatagaaaagaacagattccatcatagaaggaaagaaaagcttcttgacacaacctgaacacttgcatgttcaagtcccacagctgtgtgcttgttcctgaagtgcttccaatggcttcgcctgtgcccagctctcagcctgcatatggtggccgctcagcagattttcaaaagtaacattaagacagactctttggctcatgccaatgctttttcttgtgcctctgaattcctgctcttgttagtaaaggatgcttgtttgtcaaatgcagggcagtaggacattttctaggaatggctctctaaattcttgttttcagctctttaatgaaaactttcatgtaacaagtctctttttttgagcaggtggttgaaagccacaaggggaaatacatttttaaatattaagaagggccagaaaataatttaacaacaaaatagctttttcaacctcctggaccagctttcttgagctctagggaatatgctattttgagagcttagga

SEQ ID NO: 159099 - DNA, 1000 bp, Homo Sapiens
actttgtttcatgtacaaaattatttaaaatactgtatagagttaccttcaggctacatgtataaggtatatataaaacatgaatgaatttcatgtttagacatgagacctaccaagatacctcattatgtatatatgcaaatattccaaagtctgaaaaaatccaaaatctgtaacactcctgtcccaagcatttcagataagaaacgcttagcctgtcttgggaaacagcagccactggatggaaaggggcagccagtagcagaggcctcagcccctgccttcatcctgagaatcttctgtaacaaaagctgccagctttcagggaagaaaaagaattctgtggccttgacttaagcccagagaaacaggaactgccaaaccttgttacccagcagaacagacagagagctgacctggctccatggcaaagcaacaggagagcctggagaggttcagttcggggccagcagagccaggctgggtgggagggctgtcactgaagcaaagtgacacacatcctagaaagagacatcaggggaccacaagagtattctctttttttaaaaaagaaaaagataaatgggcacatatatacaaaatactgtcaatttctactgggccaacacagtagccactgcaatgtttctccttcttccggagctttcctcccatagtctcacatgtactcctggcacagccacaataccagtctctgggaagcatatgtcacctactccacgtgggtcccattccagtcaccacagatggaagcacctgagcctccttgccagtctttccctgcagagtcactgcactggcagggagctggagtggagcacgtggttttcctgtcctatatctcctccccccaccgcagataatactgcttcctcgggtggcccttggggcaagtcatcaggctttatgggccaggagggtggtcagcttgatcttgccatccatggaggcggtgaggcaggtcccacagtccatggca

SEQ ID NO: 159100 - DNA, 1000 bp, Homo Sapiens
ttttttttttttttttttttttttttttttttttttttttaaaagtcattttattgcaaaacatgaaggactgcctctcattaagaaatatgtttgcccttccaaagttggtgtaacatctattgagtgcctattttgtactgggtcctctgccaggtgggggatcttaacaatttcttaaattagataatgtgttaaaatacagtgaagatatagctttttaacaaaattctgccgtcaaccattccgtcaaacaagtatcatacttcctcagatctaagatgctgccaattatagaatgcaccatcattttttgtaatcccaagaaagaaaaaaatgctgcccgttaaactctgacatcaactgattaaaagacacaccctaatttcaaagatgttgatttctaactgtatcttagactcaatggaatattctaagctatttctactctaactgaccatcttttaaaatctaactgcaaagttcaggttggtttttaactgtgacacacctctaaacatgccttcatttttgaacagaattatgcttgcacaccatttaatggtgacccgtccccatagaatcctctgtcttggaaatatgttctcatgtccagaggtcttcaaagccacaattcccacatgtagaatcaaccaccaggttcagaatctgcctatgggtttccctgaaacccaacaaaagcagaatcactctgcactcacccatcctgcctttattctaccactgtcagggcttttgctgaatgtcaagggaaaagatcacaaaatgaaagaccccactctgggctgtggccgctcccttgggagatgaggtagggtagctccagaggggcacctggagctgttcgcctctgcctcttgtgcttcagaagtcgcagcccctacgggattatggggaagagaaaaagcgtatatgctgtgcccaggtgggtggaacagtgacctgcaaaaccacgccatagctgaggacatctaccaat

SEQ ID NO: 159101 - DNA, 1000 bp, Homo Sapiens
caagttctttaattgattttatttttttacataaaaagttcagtaaaaattggataaagtaaagtgattttaagcagtaaatcaatcttatcaacatagcacaaggctggccaaaaccacaaggcagcctgctttggaatatttacatgataacaaattaaaccttgcaggagaacttaaactgtccttacaaagtcttcctgtgatcctagcatgtagaggctaaaagcaaaacgaaaaccaaacaaaaaccaggaaaaaacaaattattttcaatatattcacatatacattaaaatataatacagatcatcagggtaaagggttgtgggtggggatgcgcatgggtctgtgcgctgacagcaccgccaaggagaagacccaggtttaagagtggagtcaggtctggccagggtcttttctaagcccttgcacctctgatggcttctaaccacatgccaacagctcacaactaggtaatcacttgtagatggagttcatttttgtggccttcagttgacatctgcagggttgaattccccagggtgatgtatcatcagtagcacagtgctgacaggggtgggacagaaaggcccacaggatttcctctccctagagtctgtcttacctgaccacccatcctcccaccctggcccaacagtcactctaattcagtgtcctctttgggtttgtaaacagccccaaacttctgcatgtacttcttaatgtactccttggttttgtgtttcacattctcattgcactccaggtcctcaggattcttacagtacttcagctccttattcataacaccgtgagtcagcttgcgagccagatgtttaaagtcttcagttgtggtaattcttcccactttgcagtcaggtttccggtaagggttcaggcactggacgatgaactgggacatctcttttctgaatacttctttgcttttctttgctagttcactggaggtgtctgcttctgctgtcttgggcttttt

SEQ ID NO: 159102 - DNA, 890 bp, Homo Sapiens
ggcaaagaccacagtgctttactttttgtcttagcagaggagataacttgagggacagcccccaaggcgccaggtagccttcaggggcgggcagggttgggggaggtaggagactcggaccggcagccctggctccagcttcatcatctgtgtcttccctctctggccaggctcttcgaggggatgcaggaggctgggcacggtgagctggcagggggcttggtcttcgggtgcccagcaggttgtcagctcctgtttctgatggactcacctgcaacgattccggcataaccgggacagctgcctgcacttgccactggtgaggatgatgatgcctgtgatgaacagcacagctgcgaccaacagcccccgtttccggagggtgtgttcatcatagaagaaggggtcatcctcatgaaaaccagatggcttgagggtctgggggtctgtctggacgtctgtgcttggggatggtctctcagagagcgtcgtggtgtcatcagtgggatgagctgctttggtgctcttgtgtgtctctggatctgtcactagaggcccatccgttccttccagttgctgggtctgggtctggggttgtggtgtttcatcagcaggccaggttggggttggagaggtgggctggagttctgtgtagactgcatctggggctcgtgtcgggacctgaatgtccatgatagttgagtctgctgaagaactggacgtggtatctttcaacgtctgtcctctggtggggagaatcaggccaacgatggtgagaagacacaggcgaccagagggcgacatgtcggagctgggggtcctaagccggcagcctcgtggagagagggacgcggcggtggctgctgcgtccaggcggagggtgtggccag

SEQ ID NO: 159103 - DNA, 725 bp, Homo Sapiens
tttttttttttttttttttttttttttttggtaattaacataatttattacgcaaaaaatgagaaaatatacagcaggagggatgaggagtacacataggaaatttctgtgattttcttcattttgatcgtattgctttcttgtcttcaggagggaagatttcgacttcaaaagtaacaaaatatttaagaagagaattcacatctttctgttctaactggtattcttgcattattttctcagcagtccaggtttctgggaaaagcttatgattattgagaagtgtcaatgcttctacaatggaaattttgcctttgggaatgctcttaatatttatcatatcaaaatgatggtctttcggcaatctgaattccttcggctcttgacatgtttcagcagcttttacctgcaaggaagacacaggatctttggaatcaacatacacatcttttagaaacgacagcagcttttcatctttacgagcaatctctcctttaacttctggatagagactaatctgctctcgcaggaggctgttggtagaggggtgtctgggagcgacagagggcttcatcttgctgatttcccgttccgctcggttctctaggttgaaattcctgataccgcgaatcactagtgctcccatctcctcataacattatgcgctcaggttcaggccgcacgtgggaacaccggcgcaggacaactctcgggacacccggagc

SEQ ID NO: 159104 - DNA, 928 bp, Homo Sapiens
tttttttttttttttttttttttttttttttcaacattaaatgactatttatttttcaggtttaaaagatttcaaaatacatatgtacaagataaataaactacacaaaaattatgtcatcaaatatatttaaaaaaaaattcaaggtaggcaacttagatcaccttggcaaagaacacattaactaagatgaaccaggacaagtcccctaaacatcaggatgaaatttcttttctatgcctactagctgactggccttccttttctgtgttgagttgtgtactctggagtcaccagcctctggtagattatcaagcatctcttcctcatcagccttttgtttctgtcttgcatgcttctctgtccactgtctggcattcttgaggaaggctggcttattatatttaaattctgaggatatgtcagccatgagcgggtcatcagggttgggttctgacatgagcagctgaatagaggtcaacacagttgcgatgttgagggatggtctccaagcaccttttggtggcaatttgagaacatccagacaaatccttccagcagaatcaatgtttggatgataaattggagtgagaaatcggatctgaggaggttcaaatgggtacctctcaggaatgataacttctagcttaaaaacacctttctcataaggtgtgttggctccacctaatatttgagctcgcaggtcatccatttggtctttatcttgccaacatgtgatgcctgggggtggctctgtggctaacatgtgcagctctctcttcagacgtgaagctctctgcatgatccccaagtagaaggaaccacacacagttcactgctccacactaagagctgcctgggatgcactgagctgacacccctcacaacgcagcaacgcgcggaccaacggggtaccagcgctgcgcgc

SEQ ID NO: 159105 - DNA, 1000 bp, Homo Sapiens
tttttttttttttttttttttttttttgtcaaaattaatcatttttaaaaagtagattcatgcccactgcccttgggtgagggggaagaatacgggggttcccagaagcccccatgtgatccaagggtttgtattttttttttaagtttgttcatatttgtatgtacatgactatttaaagccaggggattatctttctataaatgtataactggcaacctgtatcttccctctttgttgcccatatagccggagccctttttctcatttgagaatctcttccctactaagtgttaagcttagagtgaagggcacctcctactggaccaaaggagaggggattggagaattgttttaagttttatacattaggtcagtattccatcttcccacccccagccttatgaggacagctctctacccatcctgattaaactgcagctatagctgaaaaaaattattgtaagaaaaatacacagcaaaacagagctggaaggtggtaagtgtaaaagatatggaaagatgtaatcaccaaagaagctgcccaaatggcttcctgctatggaggagagtgatttggcccttacctcacctgccttcctgattcaaagaaacttgccactagcaggactgggcccaggagccccatttgccaatctcttctcttcttgggagtctgggaaaggttgtatagttctcaggctttaaaggtgtagaagacagtatggagaataagagaaggatgttttatagtcctctgtttcagtgccttccccatgcccatggagctgtcccaaaacccatccctcagtatttgttgatgccaaagacacgaaccccatggaactggggcaacttcggcagcagtacacttagcaatgaggctgtgttgatgaggaagtgcgcagcatcatacttggtatagaagctggccaggagatagagcacaataggagagatgctgaggaacttgcgggaagaggtaaactggagcccatag

SEQ ID NO: 159106 - DNA, 652 bp, Homo Sapiens
ttttttttttttttttttttttttttttttcctgttttttaaatactttatatggtaaaaatacagcaaaaatagttttttgttccaagaggaaaatatatactgctatggtcacggttctaaggatgatttaagaagtctctggctcctcaactgtgcactgtagtgtaggctgacttcaaccacggcttctccagcttcagtcatttatcaaagctaagatcatactataaagatacatgaagaagcagagcaagtggaaaccaagcttgatcatggcttctttcatgtgtgacttcagctgccctcgattgtgtatttctgttggatcaaacactcccatgttaccactcggcaccataatgtatcgatatatattccaagtggcaacaggtaagttgagaaggaagatgaaccagtgcaatgacatgagcagtaatacagtgacaatggtatggccaatcaattctggaattacccacttgtttaattttgagcaacatgatctagcattaatgtaatcacattctaaatcagacaatgtaattatgaagtagaccgagaggaagatgagcgcgcaacaatcgaggagagagaagacgaacaccaccgcctccatcctcctcctccgtcgccgccgctccttccgtcc

SEQ ID NO: 159107 - DNA, 849 bp, Homo Sapiens
ttttttttttttttttttttttttttttttttttcacattctaagccatttattcaacgaccctatagagtataagtatacccaatacctcagactgcttttggcccctggactagaccctcattgctccaggcatgaggggctgtgcaccctgacagagccacccagggccagtggcctgtggccacaatgtcaatggctataaccgcttcatctgccgccgctcctgtcggcgctgccgtttctcattgtgctctggtgctggggtgccactgtctgcagtgaaccaggggcccagcacattcacccacaggaggtaaagggcccggcctggagccagaagccagaaggaccagacatagagagagaagcagctgagcactgcacgatggctgtcagtaggatcacatccttaaggtgctgggctgcgtgggggacatcactctgccatgcctgtccatgttgaggtccgtgccacccatccatcagggccccatcctcagagaacgctgctcgtgccatcgagctcatagagtggtagctggccccatacactgccagactaaagcccagggccaaccaggcccaaaatgaggcagatgagtaaaagaagaccaacgtcacaaggcagtaaatggcattggcccccagtatgatccgcaggtagaacttcagagtctctctgttctcttcaaatatctgcttcttccctctcgtgcccactttgcccttgggcgccatggtgcgaggcaaatacccagcccgggaaacacgggagagcgaccgaaaccgcaatcactaagcaccacatcggcagctcatgcacttccggcgcagaccgaagtcgtc

SEQ ID NO: 159108 - DNA, 1000 bp, Homo Sapiens
tttttttttttttttttttttttttttttttgctgaaagaattttatttgtgagtaaaacatgttacactggagaaaggacattcaggacctgtcctcccaagtcggtgtccatatatgcaactatatttcatgttgtaatacaaaggattaaactacaaaagtgaaaattaaaagtcattgcatatgtggggtaaaggaggggataaaggaagagtccacggttaaggacttttcattctgccttggcaacaaaacgacacagaagagaggcagcacgcttgcccgcgtagcaggccctgcggctcagaggaagctggaagcggcggtcagtgccatgcagcagcctggttctcgctcggctggccaatcagtgggatccgaggtggctcggcccatcatgcccaggatctgagcccacatctggcaccagctctaccaagggcctgttgggcccacacaagcttgcctgtacctagtcaggctggtaccggcacctcctgaaatgggtcaccctccggttcctgctcagcagctctgagcccttttccagcctcttggagggaagtaacaacaacagcatctgccgaggagcacacggttcaggctccatcaatgacggtgatgtcgaggggccccagggctaccctccacctcgagttacctttgatcacaactagggcatctttctggctgagttaaggtgagaacagtcccctgaagcctcccccaaataagtgaaaagtgctctactgtggggtctggaaagaagaaagcaaaaagcagcctattcacgttcacagtcgaaaaatgtaagctaaattgtaaacctgctcaaagaaaattctagaaaggcctcttcccctcctgatataccttccctatgacaggaatccagagacccaagtgaaaaagaaactgagctcctgaatctgattctggtcgagggatcgtcggtcagacatgcatagcatcacgttgggtgcacacaggcccatctg

SEQ ID NO: 159109 - DNA, 1000 bp, Homo Sapiens
cgttggtggtgttagtcaattagttggttgtttccctacccagaaggtgtatgaaggacttttaagaactcaaagaattgtagcccggtatggaactcttaccattttctccaaatacagtgaacggtgcagggctgggtcctgtccaaaggctgacccagtgcaagggactagattagtagtgtcctgtggtgtatggatctcatgcatgacttctgatcacggcatgccatcatgcaaatcatttctacgcattgaacgagcacaatgtttggaatcggcctgagcaagtcctcctcagcctgaagaaacctgattgttttcccccacccatctccaaaccacgtgaagcccatgtggagaagatgcgctttatgtcaaagaaactgacaattaaatgacatgggctaaatgtgagtgtgtgtgtgtgttttctttttgctgcttagcttaactaatgtaagaatgcaaatatagtttgcatgaacaaacgaacttttaaagtgatgctttctgcttctgagaatcaataaaatgaaaaaataaaatccatttggctgcaacggaaatatgctggtcccggcagcctctcttctgtttctgtatctggttagttttgtcctaagttgcattgactgatgtggaacatgcagtaaccacctgcccaagcattagaaaatctgtaagtctagggagcggggtcctttgcccttggcaggtcactgctcaagatgcagctgtgttacgtggtaagcagacgacgtttggtatagatcttcaggttagagtctccacagctgttctgcattgataatattcaggaagtttgtaaacaatctttcacttgcgagttttagatctgtataatactgaatttttgttctcctctaacacttggattctctgacctctttttgtcttttggctctttcccttcttccttcctctgcccgctgctgtttctccttttcaggtttagttacactgtcataggacggga

SEQ ID NO: 159110 - DNA, 1000 bp, Homo Sapiens
ttttttttttttttttttttttttttgaccagtcacagctttattaatgaccagggtaacccgttcagctagggagctcctcaatgagagttcttggggcaggtggcacggggcctccccaaagccgctccagctccccagtgagggcggccacctcctcggctaccacagcatgggcttggtgagccctggcgcagtctagagccaggggtgtgagggccgcctcattttcgttggtccaggccaggaggaactggcactttttccgggcccggtaaagatgatctcgctcttctctagccacggcctgtttccgggcacggcccagggtctgtgccaggtcccccagtgctgccagcgtgtagcctttctggttggtcgggccctcgcccagcaggatgcgggcgacctcgtgcatagcccctcgtgtgcccaggggccccggcgggtgctcgcctgcttccagcacgtgggctgccgcctgcagggcttcttccgcagaggcgaagacttgctgggcacccagggctccggaaacgccgagcagtgtggcacagaagtcagagagcagcgcgtcgtcaccgccgtgatacagggcgagagtatgcgcgtaggcgaacagcacattgggcagctggaagcgcacgagcggcgagactgggccgcggctcaggctgactatcgcggggatgcgggtgggtacgacgggcgtgcaggcccccgggacatctccaagaacccgctcggcggccgcgggctccgcggcggaggcatctttcacagaatccggcggggtcctcgcaggggcgagctccagctccgcggcgtcactacccggggcattatccagctcctccagaagctgcggtccggctccgcggttccaccaccacggccgccatggaggcagcagccgcccggcctcaccgcggctcagcagccgctcgaaggcagctttttcgcccggcgccagccgctcccagagtcccgataggccgcc

SEQ ID NO: 159111 - DNA, 1000 bp, Homo Sapiens
tttttttttttttttttttttttttctcctcaactaaactctttatttttggtttggtttttaagtaggccatggttgctttgaggccactgtatggtggccaaactatagatgaaagagcttttattaaaaaaggcactgatgggagacactggctgcccccgaacctttgccctccctaagagcagcctctcagttcccttttgaggagccccctcacctccaccagatatgggaagacaaatggggtccctgtttctggattcccagcatggtcgggggaagatctgtgacctgggcttggccacgggggctctcagaaggcaaggcctggttggagggtgttggtgggggcagaaagctgagcagattctgggagcagcccaccccatatcctagtaactcccttttgctcttccagacttattatgcggcttggaccattgatgcctgtgctcccaggagatacagcatcaaatggcgtggagaaaggacctgtcttaggatgtgtcttaggatgtgttcccatgttgcttcaccttcttagaggccgcagtgagctgcgcctggcctctcccttgatcagacccgaggctcctgggtagacctcctcttctcacttgcagttaaggaagccgaggccccatgggattaggtgtacgtccaagatctccaagtactagaggagtctgttttcgtcaagggagttattcaaaccaaaggaacatgaccagccccatctctgactcttgggttagaagatgaactgtgatggactgaaactacctcagcttgggacttttaattgctgggtgaagcaaaaaaccaagttggttaaggtttactaggcgcccctttgtgcagggccctgggtggcactggtgccctgtgggcttgacagccagtggaaaggaaggtgtctttagatgagggggttggggaggggagtcataagacagagggagtggggtgacgctgtgggtcagggtggtgcccaccc

SEQ ID NO: 159112 - DNA, 1000 bp, Homo Sapiens
tgcggtttgatttcagtagtttattttggagacaaagcagtgcaagaggccagccacgctttcctgttccccagggctcagggtcagaactaggaaaggtgacgtacagacattaatcggggttcaaaactcaagtcgtgtaaacgtggttagttgttgggtcctcagtttccaaaaaagccgggcagttctgatggcctctgcccctcgcccaagccctgtgcctccctcctcaaagtgggcatcctgcagcccagctgagccaggccgaaggacctccatgcactggctcgggggcctctctcgggacactcagcactttctctagcgtcctccatctcactgggcagaggacagcccggaagcctttttcactttttcaaagtaaactgctatcttaagacacaaaaacatacttgtgggggctgatgcctctcacccagcaccccacatcttccaggactgcagaggcttctccccaacccttttctctgcagagggggctgcctggatcaggggtcagacggcagagccagtgctttgctgccaaggtgatggggtgagtctgaggtgtgcagaagcgatggggggcgggtggctccctggcacctgctggctcagtgcttggggcttgcaatgagaggtggaccaggcctgctgggtgaggagggacccagcaggtgtgaaaaggagtgaacccactgggaagagggccccgatctccatggtgtcatgccgaggctcccgcgcctatcctcacctaggtgactttatggaaaggcaggctgcatcccaggggttagggcacaaagccagccctgtggtgctctctgatctcaaatgtccactagagacaagggggtggaggcccaaagacctggaatgatttgcccaaatcacagcacaaatcctcagcacaggcgccatcggctcgggcctccagccaggcagcctccttcccgggctccagggagcagcagtgctggcttaggggaaggag

SEQ ID NO: 159113 - DNA, 1000 bp, Homo Sapiens
tttttttttttttttttttttaacatggtagtgaatactttattttgttgtaaacaagttagttttgagggtatttcctcgtggtcctcctgccgtcactcgtccccatgttccaatgatgctgatcaactgctttattcagtttcccatctttcttcttgcccagtcatcgtagcctttctttttttaaacacatgatccctagtactcatctttggaggacaaaaggctttccatatgttagaaaaatttgaatctcatagtactcacaacaatgagcagcattgtaagttgtgatgcattcatttggattggaacattctcaatcagtccttccactctaagtaaatatttgtttctcacagaacacaaggcagttcaaagggcctcttgttagagatttataggtgtatgaatgggaaacatcatacaagcagtgaaaacaaaaatctttccaggttgtcggattttctccttcttggtcttataaaaagcaactagacatctttaatttaaaaaatacatgcacatatatacaatagtgattggaatgttatttttatccaaaacattatagagtttatctcagatatactgagtactgtcactcagtctgtaaattacccccagagggtggtttgtttcctcattccttaaaaaaaaacaaaaacaaataaacaaacaaaaaagaagtttactaaatttaaacactgacatcctgtgaagatgccagtctttacaggcgtttgtaaaagtagactgtggggagtatgttacactaatacaaagttttacaaatgaatacaagtgaaatatataaattacaatgaaatagaggaagattgtggctctgtcctgggttggttcttttagcagtcatattgctgttggtgagagcagcaaaagccacatatgcctccaagcactccatttattacttgaataagacacaagatgaattcaattccaccaagagccaagaggatagaaaacagagata

SEQ ID NO: 159114 - DNA, 1000 bp, Homo Sapiens
atctaaaatgagatttattgcatttcatgcagcttgaagtccatgcaaaggagactagcacagtttttaatgcatttaaaaaataaaagggaggtgggcagcaaacacacaaagtcctagtttcctgggtccctgggagaaaagagtgtggcaatgaatccacccactctccacagggataaatctgtctcttaaatgcaaagaatgtttccatggcctctggatgcaaatacacagagctctggggtcagagcaagggatagggagaggaccacgagtgaaaaagcagctacacacattcacctaattccatctgagggcagaacaacgtggcaagtcttgggggtagcagctgttcccagagtcaagaaataccgtacacccctggggagatttgctcctaaaaagaagtggcagtaacaaacaaaaaaaaaagaaaaacaaaaggagaaatatttcttcaaccacactcttcaagaaaatgccataaatatgttatttaatattttaatttcatagcattggacacacactcaacatattgaaatattgattccttagagaaaaaaatggaaaaaaaggaaacaaaaaatattgcatctttctgctggagaatctcggcccccaggcatggggtgtagtgcaccagtgtcctagcctgcaggaggcgctgaggtcggccgggtcctctggggaggaaggctgtgcccattgcctggggctgtatggcaaaaattgtgttgggtgtccttggccttgccagctcaggccctcagtcgccggtcacctggggggcctgcccgtcggagggctggttggctgactggatgaacatgggctgggcgaggtcctggcccgcaggcatggtgacttgctggatctggtagagctgctgtccatctgtgaactggctgaactgctgctgtccttgctggacctctgtctgtgtaatctgttgagcattggtggcaagtgtctggatctgtccctgcacaacttg

SEQ ID NO: 159115 - DNA, 1000 bp, Homo Sapiens
catctttgccttttaatataagatttggtttcatcatttctgagtgtaacatatttcttctaaaaatagagctctctgcttgtctgaaacttcttagcgttcactgggaggtgaaggggaataaggctgaccgtaattctggggtgacgttgccagtttcatagtcatagataaacttctcaagggctcctggatgctcacagcaaggatgagttcatttcaaatccatggtactgaagaagcatgacaaagcgtttcaaggccccatctgtgcctggtgtggactcctgaacgcattactgaccaaaggcaatcaatcacagctcacagggcaccagacagcagcggcccctttcccaggaggtacaggagacaggatgaccctgcacacatttaccagaagacaacagggtgctctcctgacacgctgcttaagaacgtgtacagacacaagatgtaggaatgcagggccgaagatgttaaactcttgccccgggccaatgcagacctggatttaatatcatggaacttgctgggattttctcacaatacagattaagagtcagaatctcccccgcccccgaggaagagcctggttagctcctgaatccaaagatgcccttgatgtatccagtgaggccactcttggtcttctgttccaacttgtcctcaaggggtgggaaagccacatggttgagggccaggtcaaagaacaaaggcttgcagggaatgggctggaagcctggtgggaagtgcacaaggttggcttgcttggtgacaagggaagggtccaggcagaatgtctcaaaccgttcaaccagaggcttattgtccttgacttgggaggaggaggtctctgtttgatgagcgtcgtttgcatcaaggatggctgcggcctgcagggagcacttctctgaccgcacttgagtgatgagctcttgcacatcaggcaggtcctttaggctgttcttgaaggcgccagcatcagaatttacttcat

SEQ ID NO: 159116 - DNA, 1000 bp, Homo Sapiens
tttttttttttttttaatggtaggaatttgtattttttgcctttgttcagaatacatgacattggtaaatatgccacatgcctttggtggaagtacaactgttgttattactctatacaagtatgagatcagggttaggaaaaaaagacaaagaggtgatgacagacacacagtggaaaccccacatcgtctcatggcaaaccgaagaacgggatgtgggaagctcagcttcatttgactgcaaagtcccagggttttgttgcacatttgctcatgcacatgggtggtgggaggaaagggggatagcagagacacacagaagagggtacagggtgggtgagaaagaaagtagaagggctaatacccccaaagaacaaggccaactacacctggtgagcctcagagggacagaaacccaggaatgattcctgtgatagggctgggagagccaagaggacggattcgctccaggcttgggacacatcgaggacagtggtggttcttctccagcggtgaccccctgcattaggcaaggaggagcccagaggagagtggagaccttcgaggggggccgttgggagggtactgactgctttcttccagctcttcagtcccgcccttgggcaggacgaagggaatgtgggaaacaagggcgaaaggaaaggaaggatggttttgagcaatgaaatgctgctgcatggaaagtgggcatccagaccctgcccagcatggcctcagcctcttcctgttcgtggaccgagggaagaaggaataaagggccatgggcattctccgctctgttcccagcctgccctcctccccttgcacctgggcttatcccacattaatagcccatcctgaagctcagcaattgccccgaagataggctgagcagatcccatcctcaggttccactgtctatacacacaaaccatgcaaagaggaggaagagaaaggaggcaaagtagaattcagacaggaaagggtggttcaaagggga

SEQ ID NO: 159117 - DNA, 1000 bp, Homo Sapiens
acctggttactcattacacatttattgtacattttcacaatctggatgcgccacagaattgggggcatggggtgggggaagaggggggcaggggacactgggataatatggggggtctagaacacagcacccccacctccagcatctctcctaccctttcacaccacagcttagatatccctgctccccctccacacagaaaaccagaagtgtgggggggaagaaagtttgggggccccctcccgtggcaggttaagggactgtaccctcaaacccttaaaattgtgccatttaaaaagacaatagacccttcctcaatcagttcacccaatgagaggacagctctctctgggctcaatagtcctggagaggggcaagcatccccgttttccagcaagtcccatacacacattggcagtgactagtacccccaccctaaattcagggggggcagtcagaggagctgggcagtgatggggcaacaccccccaaattggggaggagggttttcagtccaacccccagcaggggtgaggccagagatttcaggcaggaattggggggattctctgccctgccccactcctccccaaggcagtgatgacccccacacacacactggtagccacccctctacaagagatcaattgtggccaacaattgatcttgtggtgggaggaggaggtggatcaggcagatgggagggaaaccccatgggaatgtcagttgagtaccccacatgaaaactggggagcaggaatgtagggagaaacccgaagggcagaattattggtccatcataacatactgaacttcaagacacttacataccactgggggagggagaggagggtacaagaggtttggaaaatgagggtaagggaggcaaactggactagaggggctaggaggaggcaatgctggggaccagagcagcctggttccccaaaagcccaggctccccaccacctgcgagtaatgtcgtgcaaatgaaaatgtg

SEQ ID NO: 159118 - DNA, 989 bp, Homo Sapiens
ggcagggaagaggacttggaatttattagggtcacaagcacccctgcttcccatattcagcattcctgaaccatacactgccaccccttttgtatcctgggaacttagagtcctcatcagcaggaggccaggcagagtggtgggggggtgagcagagtccagggtccttgaggcagttacatgaaaagacctccagtgacttccactgaggtccctgtgatgtatccactatcttcagatgccaagaatgcgaccacatctgccacatcctcagggtcccccaagtgtcccatcgggatcatttcagtaatcttgtccaccactttctgtggcactttctgtgtcatgggtgttgcaatgaaccctgggaggacagagttacagcggatcccatgtcgtccaagctcccgggctgcggtctgggtcagcccaatcactccagccttggatgctgcatagtttgtctgccccacgttccccacctttcctacgatgctactgatgttgatgatggaaccacgacaaccattggacaccagggcttgtgctgcagcctgagtgactaggaaggtgcccttgaggttgacagctatgactttgtcccagtcatcctcagacatgtgcagcagaaactcatcctgggtgatgcccgcacaggacacaacgacagatggtgggcgagaaaagcaggcctgcacttgttccagcaggcacctggcggccctggcctcagacacgtcagcctggaaggcagcatggttccctcggggcggcccctccttgctccctggcccgcccagcagccgcaccgtctcctgtgccgctgcccggtccaggtcgcaggcagctacggtggccccctctccggccaggcgtacactgaccgctcggccgatgccgctccccgcacctgtgaccaaggccagtgcggagcggagtcggttctggagctgagacgccatggcgggctgtgggtgggtgggaatccc

SEQ ID NO: 159119 - DNA, 1000 bp, Homo Sapiens
tttttttttttttttctgaccaacgagaagagtgtttatttgctgggggcatctgagacagcagaggtggtacacagagaagatgctgctctggcagtgagggagggattccgtggaagctgcaggcagccatcttttcatcctcggaggtggtggcctgggatgtagcagataccaacgcagagggaggcagaagacactgggtgaaattgctcacctgctgccaatgccaataccactggacttttcactttcataagccaagaaatttccgttaactgattaaacaaattgcctttattgttaaaccaatgattggatatcagaaacagcctagctaatatagctccttttggataaaagtagaagcctcacattcacctttaatgttatttcactttttccaaaatcaatttcctggcaccacacaaacaagaacactggtaaatgtatcacctgaactgcaggccacacatgctcacgagtgtgtccctgccgtaggtggctttgaagccatatacatggctctccagctctcgtggggggccaggggcttctgtgtgctcttcaaagccttcacccattgggcctctgtccatctttccagcctggggacccaatatttgccccacaaggcccaggcaggagggcctccagcacgcgcagccctgaccacactgtgagcagctcacttggcaagggtgaagggccggagtggcgtcctcctgatgtggcttccttccagcctctaccacccctgggggcctcctccaaggagcaggtggttagatgtcctcttgtgcccacacacacggcagggtggaggaggatgaaccggaacccagcccatgcttctgcccccaccctggcaccccaaggtttcttctcaggcaacaaggagcacacaaagtgagcccctgtacacaggtggctgggatatgttcatcttccacagggaggccagtgctggggatgaggacaaaggcctacgcccagtccc

SEQ ID NO: 159120 - DNA, 1000 bp, Homo Sapiens
ttttttttttttttttttttttttttttttttttttttttttttttttttttttttttttttgcacagactgtttttattattacctattgtaaaacatcaggttcactcaggagaaatatacgtgtaaacatttgctgtctgtcatgacaggtttggttgttggtggtgtcattttaagaaatagcaggtgcagctccatctcccgagtggggtttatggccaacagtctgaatctaggacgtgtgctcctggtttgcagcgctgggcaggcagtgtttttttgtcgtggtggttgttgggatgtttcagaaacacattttaaaaagaaagagatcagcagcgaaaaaccatatggctggctacatctttggattactggactccaggacgcccaagccaaacctttcaaaccggggtacaactttgctgctgttaatgctgcaaagaggaacaaaaacaagaattatagccccattgatcttcatcagaattagggtaacactagctaggaaatgagttcagcagaggacctggcctccaacaagaaatgaaaatgactgattggccaacagccctggcagagctgcccctggtcatactgcgtccaaggcctcagctacactccaagtagtcctacttggagcagcaacggtggctcattcatctccaagtcccaagctcccagcatgctcagtactgctgtgggttcctaggaattgttttctcatttgcagcccaggaaagctcttgctccaagtagaactgagagagaagagaaacatgactcccaggataccaggagtgacagggcatgttccttttagcaataaactctaatactggggtgcatcagggccacctgggaagcaggttgaaatgcaaattcctagggccccattccagagatctgggttcagcaggtcttgctggggagggagaacagaaacctgcatttggtaaacagtgcattgactgccacaggggactcagcagccatg

SEQ ID NO: 159121 - DNA, 1000 bp, Homo Sapiens
tttttttttttttttttttgaaccttcaagtggcttttattggtagagcctagaaaaagtgtcatagccatttctgagcaaaaatctgtatcccagtaaggtattcagtgttatgtttaacacactactgaaccagaaagtttaagttcctgacacagacgcaaccaggtcactaagaggctccaaaatcaacaagttaagccctgctgctctgttaagatctgaaaggcaagacacagtgctggatgtgtgcccttgttacggggtgactaaaaaggcaggcaacagtatcaaggattttttttttaggtggactcctgtgcactcccacattgcaaggatgtgcttcagcagcaacactcaagtctcctcttcattctgtatctgcctaagcaatctgcttaggacacgtgtggtcggtcataaaacatgatcatcaggatggtagagttcactcatcaggcggtagatgtaggaaggtgcattcccaccaatgttggagataaagagggtaatgagctctgggggaacgtagtcaaacacagggcaatgcacgctgaccttctccagaatgtccccttctgtgaatggcaggacttcttcaggagccacaaacttatgaaatgagtcttcttcattggggaactgtggagaaagtttgaacataggtgcacagacgatgagtggggtggaatggtgttttgctgccagtgccagagtgtgagttcctgtcacagctctcagggccccattggccaggatggtcttcgtgccaatgatcaccttgttgactcttgacataacggcaaaaatggcagcatcagtcatgacagttgtctcaatacctgctttggacaaattcacagccatttcatgaccctggcagaaaggagcacactctgctacaatgacatggaatttcctctttcgggcagcctctttgaggaaggcctctactgttcgggagaagccaatggtcatgatcacctcattggagtga

SEQ ID NO: 159122 - DNA, 1000 bp, Homo Sapiens
ttttttttttttttttttaaggtaagcagaataaaccatttattaaaacactgtgtgataaactttttgatccaatgctacactggtaaacattttccctcattaacatgttacctaaaacacagttaaattatatcatctgggccaggtgcagtggcccacacctgtaatcccagcactttgggaggctgaggtgggcgaatcacctgaggtcaggagtttgagaccagcctggccaacatggggaaatcccgtctctactaaaaatacaaaaattagccgggtgtggtggcacacacctgtaatcccagctactcgggaggctgaggcaggagaatcacttgaacccgggaggcggaggttgcagtgagttgacatcatgccactgcactccagcctgggtggcagagcaagacttcacccccacaaaaaaaaaaaaaaaaaattatatcatctgaccagaactagaaaatacttctgtcctttaccactcaatgattgaacagtgaggtgagtgcagatctaggttttcttgatgaatcaatgatacagaatagtaactttaaaggcaatcaaaattccatatgctcaaaagttaaattttatttaccctgttcactggcccaaacttaaaatccttatatcacataaagatttcatggaccgttccctctccctgccaaaaatacgtattaggaacaaattaagagtaagagttgggttttaaactgcactttatttgttactgtaacattcttttttaactgatcaaccataagcatgcaaaaagttctctgaaactgcttccactgcctgttgtatagaaatgggtaaattataaaggtgattcaatttggagctctttccttttttatagcacttctaagctgtgtgcgcgacacacaccacagaggtaggaaggaccacctttaataaattatcttcttaatcgcagagaatttctgaagataaaactgacaaaatgctaaaccaaggcttt

SEQ ID NO: 159123 - DNA, 1000 bp, Homo Sapiens
gaacagagcctcagggaccagtgggaaaacatcaagaggtctaacgtctgagtcactggagtcacagaaggagaggagaaagatcagtgcaagaaaagaaaactgaagaaataatggcaaaaaaaaaaagtcctcaaatttggtgaaagacaaaaactgcccatctaggctgtggcaggcctactagggaatggacaaaaagttccggcacgttccactggctgagggagcatgggacacggacagctcagctgcacgtccgtaaaccgtcccttccacggccaccctgggcatggggaggggcgggggtgtttgtggagaaaaaccagcaccgcagaagtacaaattcaaaaatcttaatttattgtagactcttctcatttgtaattccagtgttttgaacattaataaatacacgttctgttaaaaacctccagtgtctaatctctcccataaagtcttaagtaataaaaataggtttacatttttcccatctcaataaaactgacagttgttttttggtaacagttctgatcaaattaaaaattacacctcgtgatgttggctgtggagtacgtggaaaaaaatagaacaaaaaaattacacctcagggggcagaatcctgttaaagtcatgaaaggagactgttcgaagacttaaaaaccttttcgtacttaggaaacgccaggggcaaacgtttaaagggactagagttttttatcttcgaaagaccactcacctggtaaggcacatgtataattcattcaggtgtgaggactctgggatctcatttcatcctcctgtcctggaccattttcagatacgcttttcctctcccataggcatctgctaacagtgctcacattttcatcagggtcaagtttaaaacagtgtggacatctttgcattttacttgattttcatcctattttatggtttctcctatttggaagcagctgtgctgatcacttatttgggcacctgatttgaagaacaaagg

SEQ ID NO: 159124 - DNA, 521 bp, Homo Sapiens
ttccagaatccaactggactttatttgacacagaatacaatatggctacagaaacagcaaactgaaaaaacaaagcagaaaaaaacacagttccatccaatttgtaattaggtaacagcagggaaagtcattaaatgaataacaaaacaattaagcttgatggaagaagtcttttcctagtgcccatacttttggaattcccactctctgttgtccaatggacacacctgtcgtgttttgagccagcgagagatgcagtggaagtgaaaagcatggttacagactccccatgcgacagtacactcttctgaagtagcggacgcctggttagcttgacattctatgcaaagatccataatgtggttcctgcagatggcacagttatcaaccacaatatcccaggcccagagggctactgcattccactttttcacttcaaagcgcttcttgcccgcgccgctgttggtgccgctcggggtatccacatccatcgctgccgccattttggaaacacacggtct

SEQ ID NO: 159125 - DNA, 1000 bp, Homo Sapiens
ttttttctggttttttttgttttttttttttacttttttattgaggtctaacaaaataaagtgcacagctcaatgaattattacgtatgaatacatttgtgaaaccactgcccagatcaaaatcaacatttctggtacaccagagggctcccatgagccccctctgtatcaatcccccaccacccagaagtaaccactattccaacttctattattgtcaattagtcttgcctgttcctgaactctgcataaatggaacttcggcctggcttctttcattcaacttttatgtctgtgaagtttacctgtgttgccacatgtatccgtaattcattctttttaaattatttttcattatatgaatataccacaacttgttaattcatcctaccatcaatatacagtttggggctattatgaataaagctgctatgaatattcttacaatatctttcggtgggcatttctgctgggtacacacacctacgaggaattgctggggcaaagagtaggcaaatgtttcgtttcagtagattgttttccagagtgcttggaaacatttcacctccacccccactagtttttgaacatatcacaaaggagcttctccattggagtattccctatggtcttgcggaaaaagaggagctcgatgcgttccgcagtgataaacctcaaagacgggaggagcaggagcaatttcccaaacctcacgggctggctggggtggtgggccttgctgtgctggctcagcatcacttgggactggtcctgcaaggcctctacgtgctcaggatccttcaggccccgcgtctctggcttgaagaggaccaaggccttcatgcaggcaaactccgtggggtccaccgccaatgcccggaaccgagagatagtttcctgcaggacacgcgtctccatgctggccagcgtgagccggccctgggcaccaccggcagcagaggcctcgggcggtgccagcagaggacagctgtccagaggc

SEQ ID NO: 159126 - DNA, 1000 bp, Homo Sapiens
tttttttttttttttcactttacaaatagtttatttccaccttcacaaattcatgcgcctctgaccattatgcaaggcaacatgaattaaatacttatgtcagaacatatttgtcttacattattcaagataaagtggattttaaaagcaagtgggtaccaatgatggggagatgaggagaatagggcaggcagcaacagggcaacatgcatttttcaagagtgtttattaaaataggcagtaatcagtacatgtacatcatatgagcagtttttcaaaattagcacttccaggagaggggctacatctcagttttttctgtctgtacagtaaaatgccaaaagtacttccctaaagtacaaaggcatttccctagtagtcttggtaccagtaacaatatgattactaaacatctccaatgtggttttcattacaaagaaacatgtttcacataaaagcttcataatataatccagagacagaatttgtgcatgcttacaatttgaagccaggctgaatatatttgatatatattttttcatttctcccagtgttttttatttttataaatatgcacctagtttcctaccagtttaaaacacacacgaaacactgctctgagcaccatgattgccttacagtagcctctttgggactacaatcctagttcaaggaggggagtactaatttctattctgacttgctcctttccccaaatcatgttagtgttgaccaaatcccatcaattttcagatgcaaacaaaggtttctgggcagagggccaaataataattatgaataatttcacaatgatctggttaagaaaacacccagaaaatgaatgatttcacatgataaaaaagcctggacttgaatttaaacaagagatggacgtaaaagggatgaagcattgcttcattcccaggagggatgttctttactgcagtacccacaaaaagacagcactatcccagggctgatcttcctatgggcctccacc

SEQ ID NO: 159127 - DNA, 1000 bp, Homo Sapiens
agctcaaaaagataattaacttttattattcattaaaaatgagctttctaaaatattagtaaatttcattttaagctctgtcttgaagtgctgataccactgaagtaacatttttcttctttcaattttttcttgtaaaattatagttttctctttttctaaaacagcagggagttccttccagttcttgataaagataaagggagcacccatggacttgagtaactgcagaggagcaccgtggtgcacagatgtattcccacagttgccagctgtcatcacgtcttccaccacaggaatggagccataggagcaagcctcatagattcgatagcattctgtgtttactccgaccgggcacaatgtgagatcactctgaagcaaggcatcttggtaattcttaagactttcatttgtttcctgaggctgccagtgttctcttgctgaaacccaacaaagcttatcgttcccatcttttttcaaaatgttcattagtgcctgtctggatgaattttcataaatcgttcctaagaaattacataaatatggcctctcatcatgcagcattgaccaacttgcctccaccacaggaaaattcctgtatgttgctactcctaaaggccactgaaaaacatccacgtcattaatccaggggctgtcatatattatgaaaagcagctccacgaagcctccatttcttttgaggaatgggtttatccactcattatcacaatgttcatttccgagcaaaacaacagcaagatgctggagtttttgaatttgcactaaattttgtgcataaagtaaccactgggtggcataaaagatctttgctttttctcttccatttaaaatgagtaccacattattcacatcaacggagaagtaccctggtattacagctggaccagtgatgaagctgtactgtgttcttcctacgattgactttccttctctccattgagcagtcacatcgctgggatcaagtaagccttcaaaa

SEQ ID NO: 159128 - DNA, 1000 bp, Homo Sapiens
acttttggtttcatattttttcagttaatttcagtaaaaacataatatataaaaggcattgccaccattttcccctcctgggggtgatccatcaagccagtgtgggctgctccagtggttcatagctcatcatgcgatatgtgcagggcatggtcacaaagatctgttcgcttactgcaaagtttgtctttaacattgtcagcctctcgggaaaagaattcaatgagttcatcctcgtattcctccacaatgctctcacacgcaaacttgagggtgccgctaatatctgagtcgattcggatgccttgtaggtccagttcactggattctccattccggcccactacacgtacgtagttcttgcgatgggtggaaggatcaatctgttccccatactccttcatccggtcacatatctcctccagcagctctgtgaggtgggcctctgagcgggcataaggcacctccaccactgactggctgccatctggattgatccggaaagatcccatctgaatggtcttcttggggtccacctgggcaatttcccattctagttcatccaccagagccctgcatgctccacagtggagatcctggctcctccgagcccaggcggttcccagcagggcccccagaagcagggccagccaaccccagcctttcatctttagcgtaatggggtcgctccacctctgctcccagggccgccgccgtggcccaagcgctggaagaccgctggactctcactttggccccagtggctcccgaaactacacctggctgcagggagcagggctgtccgggattctccagagcgcttcgccgcctgccacacacggggtgtcccggcgaccgcctgacccagctcccctgacgctaactggtacctaagcgggactccagcgtgctgcggtgcgagccccaatcagacaccgaccccaaacccgcccctccaaactctcgcgcgaacaggcagcttaggagaggctcccgaaca

SEQ ID NO: 159129 - DNA, 1000 bp, Homo Sapiens
ccaagtcttcacaaaattttatattccccaaggctgccccatcacaatgcctgtgaagcttgactggcagacactgaggcctgaagctgggggctgcagggggtcactggctcacccggtccccccgtaatctgtaaaacatactgggtgagggaggctgctggaggacctgaatctctcccttctccaggcagtagtgaggcatatgcctgttggccttgggcccattaaagatcattccagccccagtgctgttctctgaattcttggggaacacagggatgggggctcctaatgaggaccccagaaactctgagctctcacaactttcaaaggacacttgcctccctcctctgcccacacctccaccattacagcatttgatcccacaagtaaggagggggcggtcctattccaccacctctctggtatccccccaaccttctgagttgtctgagacccaggaaagggttaagatcaggacccctctctcctgggctgaaagatatttctcacgtcagctctatgtggacacaggagtttctggctggcctggaactgcagacggagcttatctgccattaaaccactgcaggtgcactgcttagcatcccgtctgtgagtaggtgagagcagggaagtaagactttgactcaaacgggacggatgcatccacagttggaactctagcacaggcacttctgccattagcagccacaaaaagaagatggatattttctggagttcctccagccatccagggaagatgctggaacagtaccaggtgggttttgaaggatgtgtaggagttcgccagccagaatattcactcatcaaacctcaaaccttccctggcactcccttatgctcagaccacaaaggtctcagcttcctgggaggaaggtgtcgccccttcctatggaaacaggagcccagaggctggggaccctgatgctgactcagtagatctgtgtctgattgccgcaggtgaggttgggct

SEQ ID NO: 159130 - DNA, 605 bp, Homo Sapiens
tttttttttttgccaggtgtttttacattttattagctacagtatagatcctagagctgcctcattccctcccctcccctcccctccccccaccatggggtcaggccttgccaggagcccctgcctttgctgcctgggcccgctggaactcctgctgcagctgagcaagggtctccctctgttgctctgactgccgctcaagatcccgaagctgggattcgtatcgcttaatttcagctgtgatatagtccagcctcttccctactgtggcccgagcctcccccagctcctgtttgactagcaccggacccagaagtttaaagaccacgttggacccatccagcagggccagttcctctttcacgatattattttctgttagttgtgcttcaagtttctgcctccccgacatggatttacttaagtccttctgtagctgttgatatttctccacttctccctgtagcttcttctggatcagctccgccatggcggggatgaaagcctactgggtgcgagacaagggcgctgggtctcactctctggaaggtacctgagctcccttttctgatctggcctactcacgttcttccttcagtagtaat

SEQ ID NO: 159131 - DNA, 1000 bp, Homo Sapiens
gagagatcttcacgacctttattgcacagactgggagagaggagcagggttatacctcccaaccccaccatcctcttcatttaaagcatcagcctcctcccctgccatttctgttcagggaggcacagtgttccccatctgtccagggctgcaggtccggcagcggggccccgtcccagctccccaggcctggtgagctccaggctagcctgtgcactgtcctctgagtccaggcccttgtaggtccccaagatggtgggggtgcagggacagagagcttgctgttctgctcctgatgtcacacaggggcttcctgtgtgtcctggcatcaagatggccttccacaagtcaagtggccacatcctcaaggagctggctcagccactcacagctcctcccgaacccgaggtgcccttccagtcttgtcttggaccctctggtgcctgcggctagggggctctggggaagggtctttgctgggcatttcttcctcttcctcttcctcctcctcctgtgactcctgcagcagttctttggcttctatccactcctgctccctgtgctcaggtgcccacgtgtgccacagtgccagggcacagcgccgtccccgagtcacggcccacaccccatggggattctcgacaccggagctgaaggccacaaggcgcccacagcgaggacgcacccgagccgtgacagtgagggcgttgggctccgtgaagaacaggtccccaccctggaagtcatcgttgaggtagaggagtccgctgtagtcccgataggtgtaggctgggggctcccgccagcactctcccgtgtcagggtccaggacgcagttgtctgcgtgcactgggtgactcaggtccatgcgctgctcttgctctccttctatggcgctgcggcacaccaggtgggtgaaggacagatgcaggggccgttccggggagaagtaggcctgggtcaaggtccgcacccgctcgctcacctccagaagcagctt

SEQ ID NO: 159132 - DNA, 1000 bp, Homo Sapiens
ttttttttttgtaagtgcaatgtattttaatcttccttggttcttccgaaaaacctccagctgtgactgctttccattaacaggttccagctcctatgtggtttcctctaacgctaaagcacagccccggggtatctactgcttcctaagagtctccatggagtctattttacaacctccggggggtccatcttccgcggaggagtctatactatctctatatacacattttaaacattattcttcatttgaaattccttcaataaaaacacagtcaccattcttcatcttcttgggaaatggcctgctctcgagcctctggagaagcccctctaacagctcagcccaaaaaagtgaacaaatttacatgacacgggaaaagcaacatctattgtcttagagtctgactcccttggcccagctggaaaagtctccccacaggtgtgcagtgcagctccgcggtgctgggaaacagggctctttcaagacagcgcagggaaatcttccgggtcatctgggttgggggcaacatcttgcatcaccacttctgctctgggatagttgttctctgccctcctgatccttccccggcctccccgggtgcctcctctggctccacgcccaggacgagggaggttaccaaaattaatctccagctgggatgtgatgtcattggcgggtttccggaaaacatgggaatcgtcctcatagtcatcttttaccatatcatctctgtattttgacttgtgaatcaccacggctttggaaggaacagtggattctggtttccggatgttaaactcaggctttggtctggtctgttcttgaagatttttccactcatctaaagtcatctcttgaacttgggtttcttcttctacctccaactcaggaactttggctggagactcctcttccggggtgccctgggactcctccaccactgtgggttcctccatcggtgcagttggctccacatcactggtatctttacccgatc

SEQ ID NO: 159133 - DNA, 1000 bp, Homo Sapiens
aataaagacaagtgttcagatttatttggaaattcacagtttctaatggcactacagctccgtagttacatattgaaaattctcttcccacaacacacagatcacataatttctcactgtatctctgctctcatctggacctcttttcaaggggcttctataaaatcaggccctcttgctctgaatagctaattgtgcagacaggaaagaaatttaaatcttctaaaacacgctgttaacctaaagcagcaacttaaacaaacaaaaaaggcgttaaataagtcacattacaaacaatacccaagaaaggtattaggcaagtttaaaaacagttatcactactaaaagtgctcaataagttataacttaaacatcacaacaataaatggtcaattctctccctttcaaaaagaaacatgttccactttcattcattactgtacaatcatactaagaaatcattttattcaaatacagttgctgccaattattttttaaagacaaaaaaaaagacagagacatcgacatcacatatgtattacctctgcacatttgtagccaatacaaagcaaacatcaaggaataataatctctttagacttaaccaattagattaagcttgacaaactcactaactggatctgtgcatatgtatgcaggcagtgattatatcatgagacttgtactaattggccaaaccttcaaattttatattcatactaataaaaacagtgaaagtttggaggattagtgtttattgtgtatgtttaaaatgtaagctaaagaaaaccttcacaaatggttaagtgtgtttaaaaggtgaatttgtcaaaaatttgtctgcatatatcagttgtttgcaaaaaaagatcctgtagggatttttcctcattgagttagtaactaagtaagaagtaatccagtctgaataagtgaaaataacaagagcatcaccatctacctaacagaacagacttaaaaattccattaagtgttcatt

SEQ ID NO: 159134 - DNA, 1000 bp, Homo Sapiens
tttttttttttttttctcgtcaccaatgaacatttattgagtgtccacatgtgcacagctttgaacttggcgatcacagaacgcactgggggagggaagcaagggatcaagagtgtgtgtgtgtgtgtgtgtgtgtgtgtgtgtgtgtgtgtgtgtgtgtgtggtccccctgggtttataagaaaggtagtccctgctggagccgccagtcgcgtctctgcagagaggagtcatagcaggggtgggagttaaagccaggcaccacggtggcagtggagtgtaatcactggggaaacatgcggattctggggaagtgtccctcctgttcctggctccagccaggccagatggcaccagggggacaggaatcagatgctcaggtgtccaagcagggataaggacaggcaaaataaataaccccccaacccccatcgtcactctgctgcaacacgacacaaaggtttaaagatctgggcccaaagactctgggtcccttcaagcaagctcaggtggaaggaggtttccccaccccccaccaggcctgtctgccccaggttgccctaggatggaggcagttcagaccctgggtcactgaagctgataggaagaactgcgatatcaatggcctaagcctgctgtctgcccaagggagccaagggcaagagccaaagggccaatttaaaggacgtggacctggggggccagaggaggcaccacagccgaggggagcccacgccctggccggcagggcacatgggctgaggcagtctgctcctgccagccctgtcttaccctggagcctccctcctgcaggggagccagacatcgggcacaatgacacctagtgcccccctccctgggggctgctccaaccttccccggcctggcggggacaaccacgttgatttccaagccgatccctgcccccatgggggcctgaggggcggaacgcagttccttacacttgaggggtgggcaccatgcccttgccctcagaaaa

SEQ ID NO: 159135 - DNA, 1000 bp, Homo Sapiens
ttttttttttttttttgcaacttgtgaaagtaaaaatttttattttgattgatttctcaatgtatagttcagtataatgccagtttttaatggcaaaaatttggttccactgaaactccataatgctacagagagctactactttttccaggaagtaggttaacagctagaaagaaaaaggacaatttcctagcagcatggcaacttaaactgcagatctaataggtctgcaacttttacactaaaaatggcacaaacagctggtgacacaagtgagaaatggggaacaagatgtgaacactgaaaagaacaatatatatactgtaaatatgatgaataaaccaaatgtagctataagaatcttaaaggatgattatagaaaagggaaccaaatattttcctcaaatgctttttagagcctttctgtagcgatacaaatatatatatatatatttatccaaaaatatgttttatacagataaatgtttctcaattaaagatgggaccaaagctataggtataacataaagcacattgtcttttgtaagactatttatccacctgaattttcaatttctttaaagttagtgcattaaatgttttccaaatataattacctgtcagtctttttatagatataaatcaagtaggcattatgttttaaaagtgtttgcaggttaaacttttctaagatgctgtgcatattaaacttattatgagccccattaagaatcattattaataaacatatcaaaaagggctatatgtcagattttcctgttcatagtaaatattttctgatttccagtttacaagtattgaaaatgcacaagaaagattttacttcacaagtacttttaagaatatactttgatttaatatgtatgttagtaaaactccacgtgttgtaaccattattatgtttttgtttttaaaatggggatgtaatactaataaccactacctataaaataaagcacacaattgttccggtgatttt

SEQ ID NO: 159136 - DNA, 1000 bp, Homo Sapiens
gaaggtactttccctatgtgacttgagaagacggagcccatagaaactggggaaatgcccaccagcaacttaagctttggaaatgcacggaacaatggagacgaaggaggaaagactccaaaaaggctcagagtcagcggtggctcgagcttacagggcaccagtgagaagcatgctgtgggaagagcctcactgagccttccagggtctagaggccttgcctctaaagctcccactccttatctaggacagctctagaggtcagagtgttcttccgcacactgaacgagagctctcctggactgatgtcactgcaaggttcaggagggaagtagttagggtccaaagtcccagaaaaagagggatgggacaaagagagaaaacatacttggggtctggctttgcacacagagtagcaccacatgaatgcatgtgttggggattgtcatcaccctccaggagatgccacccacccagaggaccccagagaaccaggaaggctgggcaggacagccaggcagtctttacacagagaggcctgggcggctggccaggcaggcagccttcccgaaggcgggactaggcgtgtgctgctggacatgactaatccaccccgggggacaggcccagggctctgaggaattccataacttgatggagtcctgtccctttcacggaagaaaatggacttaagctatagcttgctgggaaggaatctggaactgaagaccgttttattaagagtccgtgtccaatgattaggcaggacctgtttcggagtcttcgctgtcagaggagctggactcactggagctctccgactctgaggacgagaagcccttcatcttggaggagccggcaatcacatcaactttctcagcttgaggtttccttttcttccgcaaacaggaggtgacatagcgctccagctcacgcagtgtggacggcttcagggtctcaaagtcgatttcaatctcgtcggggttggaattcttcaggg

SEQ ID NO: 159137 - DNA, 1000 bp, Homo Sapiens
ttttttttttttttttttgcaattggcacaaaagtccagtcatttaataacaaatgctccccctaccctcaccccatcacagcaccctgagaatcacgggtccaactgtgtgggagggggctgtggaaagccaggatgaatgggggcagtaggtagggggctgggtgggcctctgcacctcatgtcactggctcctgggagcagagaatcaggctgggcacagaggcctcttctctgaccaggcaccagcagggcagctccatccaagggaagcgagggctgcccactggcccagccagagagcatgaggggtcagggctggctggagaaaggaggaggagaagtgactctggtccatcacacttaggtcctctggcctgcctctgccacatccagctgctaggggctggcctcagccctgtgaggggccgcaggcactcactccggccttgccttcttggccttcttctcagacctcaccgcctcatcgtgggctttccgcttctccgccagcttgttggcctctcggatttttcgcctcttgccaaacatgatcttctggtacaggtacttctcccgcttcttcatcatcataatggccaggcgcttggcctcactctcctcctcctgggccagccgctgcttatcctccagcttcaaggtgcctgccatcaccctgggcttcttcccctccatcctctgctcttccagggctgccagccgggcctcttcctccttttctgaaccagcctctgcatcttcctcctcctcctcattttctccctcttcatcaccatcaccttcgttgttgtcgtcctcttcctcctcctcttctgactcattcaggtttcctgggtcctctccccgctgcagagccagcagcttcagcttctcaggtggaacgtaatctccttccttctcggtcacaaagggtgaaaggtgtgggggcagctgcaccccagagaagtactctgccacggggagaaggagcctggcgttc

SEQ ID NO: 159138 - DNA, 1000 bp, Homo Sapiens
ttttttttttttttttttttttttttttttataacattccaaaaccttattgaacagaactttcttcatgacacctctcggaatgtaaacagagcttggtgtgaagaagatcaatctgatggctaaagatcagtatgactgcgtaaggcagtttgacatctacccatccctaacagattttcctaaaactctgtggaacaaccaaggagaaggcatattcctccctttccaaaggtgggcaatgtgcctcttcctggaaggttattttacaagcacgggcccctgaaagcagcagcctccccatcagccattttggcgtgagcagttacagctgcacactttgcaacttgtcccgccttgagtctgatgtcagaagagcatgtcagtccacttccacttcagagagggttggtggtgtcaggcagccctgctgtccaaggttctatcctttgatcacagcaattggtctcagtttaatggctttcttgctgattccagcatcatggcaggtatttaccacatctgtcacattcttataggactcaggagcctcttccataaccagtttgggtgaggcaacacggatcgcaattcccatatctgccaatttgtctaagacatcctggaaatctaaattacgtcgagattttgctcgggacaatgcacggcccgctccatgacaggttgttccaaaggtctcagtcatgccctgttcagtgccagtaagaacataactacaggttcccatggtgccaccaatgagcactggctgtccagtgagttggtaatcaacagcaatgaggggatggtgaggagggaaagcgcgggtggatcccttcctgtgtactaacagtgtccgttcctttccgtccaccacatgctgctccactttggcaatgttgtgagaaacatcataaatcacatgtaggtccaagtcatcaggggttgtgttgaagaccttggcgaaagcctgacgggttaagaaggtcatggaagagcg

SEQ ID NO: 159139 - DNA, 1000 bp, Homo Sapiens
ctctaaaggaggagaggaaagcgtctttttaattctcctgctttgtaagcacaaattcctatctatcagcatgtggattccagccacagccaaccagaattgcctgtcaaagaccagaaactcagaagactagaagaatatcctgttgcagaaagatctcttccacttctgcttgtcccccagtcattcagcaccagatacactttggtaattctgtctgctgatttctgatcagatgcatttatcggctcctaatgtctctccttcctccttgactgcctcttccgtgattgatagaataagctaagcacggacatacagacatggaaatgcattatttttttttttttttaccacagtttaaaaaaaaaaagaaaaaaatgcacaatctttggaacaaaagaattaaaggcagaaatttaaaggaaaaatacatattcaaagaacatagtgaggtataaaaaagtattctttctttttttgtgtttttttttgtttgtttgtttgtttttcctcttcatcttgctatagagttcctctactagtaaatattgcaatagccaggcctcatgaactggggggctgtcccatttgcaggggtctcacgtcacttcagtagggggcaaatcggctgtagccacctcggtataaactcgccacagcgccaactccatagctagcggcaggggcaagggcatggtaggggtcggctgtgtacaccctgccataaccgtcactgtaagcggctgcagcggctgcagcagcggtggctgcggttgcagtagcaggctgtgcatatctgtaggctgcatatccacccctggataggcggggatggctgttggaggtaccgctcggactgcaccatatactgtccgccctctgcccctcaaatgggctcctctgaaagcggctgccgtggtggctgcagtagggtaagggaagccaggaatgattaaaggaatgtaagtgttgataccccctcttcctgataggggca

SEQ ID NO: 159140 - DNA, 1000 bp, Homo Sapiens
tttttttttttttttttttttttttttttttttttttttttttttttttttttttttttttttttttttttttttttgtaacaaacccacttttattgatagtgtacacggagatccatggtggcggggctgtgcctgggtgagagcgggccacacaccggtgcagccaaggtacctggtctgctcagaaggctcaggcagtgggtggggaaggggacagaggcagggttggagctgctgctttgagcacagacgcaggcaggggccaaggctggggtgcaggtgcaggtatgcagagctggggctggagcatgtgtacatctgtgtgtacatctgtgtgtacttgtatatacatgggcatggtgtacacaatatctacagggaccctcacagactgatctagggagagggttgaggacaagatgtcccaaagccctgaaggccccaggggccaagcatcaagagagggagcacatcgtggtatgtactgaatgcccagcgctagcttgcttctgccacccacagacttgctgtgtgacctggaggaagttacttaccctctctgaacctcagaaagacccaatagaagatcactaaggttccttagggccctaaaacttcaatatgtttagagagattaaaatacaaaatatacttgttaagagctgatgacaagggcctttggtttatgggttcaaaacccaccatgcctgagtacatggtggtacccagcatagcccaatcccgggcacaaggagaagacccgccctgagcttttctgtcggatccctcccaggctcagttctgggtcccagctgctcctccccgcctccccaccgctgtgtgtgcagaaggtggtggggcagcaggggcgggcagaggccaggactggggaccctcttggtttcctaggacacagtgaacccagcacccagtaggtgcttaataaatgcttgaggaacgagcacagtagagggcagcctggttctaggtggagctg

SEQ ID NO: 159141 - DNA, 1000 bp, Homo Sapiens
ttttttagtttaagagtcaatttaataagtttaaaataaatgtttagtttcattaggatgatgctatcaatattttcttggttacagacacattattaaagttttgggttaattttattgacaattcttaagattctttctcatgcttaataaagcatgctactcagttaactcttgtctacatcagcaaagcagataatacaaaacaggaaaattacaaatcactgatacttagtccttgtgggaatcatgcttttctcccagcagttttacaaggtggctggcattccctgagcatattctgaattgcactgtggggaaagaggttgtgctcagttgtagggtggggggatgcactgcctgaggattaaaaaactagttctgtgaccgtgaggaagtcgtttaaatttccatggtctgttccctcctatgtgaaaagagaaggtgggcttcaacctctaagatcttctccagttttcacattttatggacttttgtagaaaaaacatcaggagttcatgtgggatgacagcaagtcatttctttgaggagagtcttgatcaccaggcaatattcacagcgtagagactgtcagatgaccatggctagcatggaaatgagacccacacatttaaatcacccagcaaatattccgaaggctaattgtagcacattttatgaaagacatttcaaactgtggtcctgaagagtgtatcccatcttgcagaggtggggagcctggggggacaagagttctgaagaggaagagacaacaagagttcccagtagctaatgtttgtcattctagttgaccgtgctggtctattaggctagtggttcagtacacagatgaaatgcaacatggaacccagtttattatcagaacaactacaaagaaattgtcccctgtctaagactggagtgtcaagtctctgcccttttttcctttccttcaatggtggatgtggagtgactgtgcatcccaccagaaccacgtgtc

SEQ ID NO: 159142 - DNA, 1000 bp, Homo Sapiens
ttttttttttttttttttttgcatatataaataacatttattaacttaggctgtacaatatattgatttagtcaaataaaaaataccgtacacaaaaattgaagtaaaatctgtaagatgccattcagactgaattttatattctgaataagacaagggactgccattcacttaaagcaaaatggctccaattccgtttatctatctatctatctatctatctatctatccatctatctatctatctatctataagtctcgctctgtcacccaggctggagtatctatctatttatttatgagataagtctcgctctgtcacccaggctggagtgcggtggtgcaatctcggctcactgcaacctctgcctcccacgttcaagtgatgctcctgtctcagcctactgaggagctgggattacaggcatgcaccatcacacctggctaatttttgtatttttagtagagatggggtttcaccatgttggccaggctggtctcgagctcctgacctcaggtgatccacccaccttggcctcccaaagtgctgggattacaggcgtgagccactgcgcccggcctccaattccattttgtaggaaagcacataaggctataccaatcaggcactgtggctggtctaatgctcacaccaggggccagcccactgcccagacttagcctccaggtaggctgctttgctatttaaaggcaacagtcttaggatccttattataaaagtttaaacaaaatcccaaagccgtcaagtcttcctggagatggcaatgtactatcagtttggaatgtataccagtttggaagctgaaatcactctgctgtagccttttgagcactggcagcattttccaaaatttttcttttccattcttcataatcctgtgtcagatcttcatctttctgtggtttatgtggcatctcctctaccttctccatttcctttgctggggcttcaaccactatcttctttctcttccgtggt

SEQ ID NO: 159143 - DNA, 1000 bp, Homo Sapiens
tagagtaatgtactaacatttttaatacagtctgatcagatcaattcacatcacaaggtcaacctgggcttgctcacatgtgacacaactgaggtacacaatgtccctacctgccggctgtcccaccttcctggttcccaacagcattgaaaccccctacttccctgaccagactggcattttttaaaattttgcataaaactatttcttccatagacttcaaacaatcaactagccaagttaattatggtacatctaaacaaagtttaatactaaccctaatgtgtgactgcggtttacaaagagctctgtatcacctgggatagctttcagtagcaattcactacaactggtcctaaaaaataataacaataataataataattagagaattaaaacccaacagcatgttgaatggttaaaatcacgtaagaactgaaatttggggtgggggtgtcctcaacagctgagcttgtcctagcagtgaaaatgctcgcctccaagcagggctcagaaaggtctggagccctccaggcagagggctgagctcagggggctcttggaggacactcaccccatggtccatgggatgcttctggcttccttaaaaacagttgggcatccgcattgtataagtaggtggagaccctagtgtggttcttttgaaggatatgggaagggaggatgacgaactagagaagtgggaggggaccaaaatcactgaggtcccagaatatcatagatttgggtataggattggggtcactaagaattgagcaccaggaattccagcttcttcccattaaagaaactgggactggttttgccttggaggcctatgtagtgttttctgcccctgtcccataccaagtctcattgatatttctgcagaatatcagatgaaaatctatttctaaagaccattgggagaatgggtggtggagaaggagttggagtggggttggggggcagttaaaaatgaataaaaatctctcagcta

SEQ ID NO: 159144 - DNA, 1000 bp, Homo Sapiens
tttttttttttttttttttttttcaactcccatactttattgggacaagggaggaaggatgcaaaccatcaccacaggcccacccaccaagggtgtccaggcttcagcacctagtacagcatgagtgagtacattatcaatacaggcaacttgggagggatggagtggggaagattccacacaggaaggagactagaggtccttctaggcttgggggctgaggcatgtattgtactggcacagtccacttatggatgaagaaggaggtctagatttccattttgcagatagataggaaggaagacattcccttatatagacgggaaaaaggaaagggattacctggagggcaattccttttttatatatttggaagaagagcagatttcaccttacaggtgggtataggagggaagaaggaaagtttattttaaatattagcagaaacagacgtgggaagaaacgtcattttgcagagggaaaatgcttctgggatggtgttcactggccattccattcccaggtgacaggaaggagacacatacgcaggaaagggtcccagggctacagaacaagggaggtataccccacaggcaccagaccctccatgccatcccgcccacagcggagccagtcctcatccactgtggtgatgacacgcagcacttccccacgccggaagctcaactggtcaggtcttgcagcagtgtgatcacagagagcccgcactgccctatgggtttgcaccatcctgggtgctgaggcctcaagctcctgaggagaaggcatctcgggaggtgccccccgcttcacaagagccaacacactcactgtcgggggcagccagctagatggtctcctggactttagggctccattctcattttctgcggggcccccaggcactccaaatagtcttcccaaccagaggcccctgcctggtgccatctcatctgtgggcaggggtctctcctgtgcaccttcttcagctgcagtccca

SEQ ID NO: 159145 - DNA, 1000 bp, Homo Sapiens
acaaatcaaaaggctttattccttatataaacccacacttagaaaaaataaatagttaataaattataggcaaaccagttggtctcagccacgcctcccactgaggtccagggcagccgctgcagcagcagaggagcgggaaggtgtagccacagcttggctcaagggcgtggtctggactggggacgaagggacagaggaggaaggcaaggtctgggtgagggcagggatgggggctaaaggtgggttcctgaggcgtgcccaggctctggcccgggcagcaggggtgaggcaggggctcagctcctcctgggcctgggcgatgcggcgtgcgaagcggctgcgatcccgagcaagctgctcccaggggccctggcgggcggcctgggccggccctgcccagacagccaggaaatggacagtgaccttctcggagaagcgcacctttctggcctttaggggagtctcagggtccggatcatgagtaggggtttctgggcgcttgagccgcctttgcagtcggaggggcagcctaggaggagcccagggaggcggtggcttctctccaggtacatagatggccactcggaaggggcagggctcagcttctccccagtcctcagcagcttcctcttcctctgtctcttttccaggtcgatatccccagcccctgaagtgggcactctggtccgggtgggagggatgtgggtctgactcagcttctcctaaggctgcttctgaatcatcttccttatcctcactatccacatcctcatcttcctcctcctccgtgtcctctcctggccgatacacccaggccttcaagaaagcacttgcagggggtgtggaagcagaagtctcagcttctctttcatcctcggctgatcctgtatcactgtcctcatcttcctcctcctctgtgtcctctcctggctgatagacccaggacttcaagaagacacctgtagcaggagtggaagaggaagcctcagcttctccc

SEQ ID NO: 159146 - DNA, 1000 bp, Homo Sapiens
ctttttttctaaaaagaacaactgaaaaaaaacctttcaacaacatgctaaatgattctcaccctttgatatgattatactatggtcggaatgggtgctaagggctcggaatagagctgcagattataaaattcattgaaaaagggatgttcattgtggctttttgtcttggttaagtgcctagggataggggaggggtaaataaaatgctgctcgataatggattttcttttacataccagtccgttcccaaaaggcccccatattgcaatggttctatcaaaggttaaaataaagacaagaaaaataaacatgttttcaaataacaaagagttgacactttttcccccttaaataaatcagcataagttttccacataatgtaacaatagtaaaaatgcaccttgcaaaatccaaaattactcactgaaaatgtaatagaatatatatttatatatatatatagatctatcttttttgatgccatctttccatagggactgttagctggagtctggagtcttaccaaacatatggtaagagtttagtttctgtccttcaggactacttctagatttcctagacgtttcagtgaaaatccccacacttctttctttaaaacatgtaaatggtaacgtgactcctctaccttttcccgaggctccccatctaagatatgttcaaggtcactgattttagtagctatgcactatggctgccatcatgcgaggatcagtaatttttggcagatggttcttaaggctgaggaaagaggccaaggctagtgtatgaaaggtaaaaagataaaaacactcacatttgagttttgattaagtaactgaaaatccgtacatgctgtttttccacctctgctctgacctatcgagaactgagagcgacagcagaccagtgtgagaacaataccagcccttcttttgtacctcctgcctttgtcaagccaaatctgaaggaatgaaagtttcacacagattcgagttgg

SEQ ID NO: 159147 - DNA, 1000 bp, Homo Sapiens
tttttttttttttttttttttttttttttttttgtctacattttattctttcactcaacagaatagaagttttgcatttcagagtaggtatgagatggccactacctcgttccggccctggcacccagacagcaggactccaaagagggtgggcctcctaggctgccccggactaggggcagcaggaggcagtcatttggcaaggacattgcagggagagggagaggggacccctgacctgcctctggccgccgaacccggggccctcccctggctctctttggtatctcagaaaacaaaggctgtccctgtctttgtcagccctagaccaggtctgtggcccatcttcaccagctcccctggagggtggggccacctcacaaggccttttagcagcccgggaccagctcacaggggcctaccaccagccaggcaggtggggcgcgccacccgggacagtgaggccagctgcgggtgggcctgggctcatttcttgtagtgattgggggcgtcggcaaaagcaaacttgaggcggtaggcctcggccagcaacaggctgatgtcctcatcatcccagtgggctgtgggcaggttctggaggaagagcagcagctcttgaaaatctttttcttctagtatttccttcctccatctcacgagaaaagcagcgcacacgtacaagtggaaatgagaaaagccgtccggttcagactggtaggtgtcccacaggcggatggtacaacgcaggggcacctccctcatcagcaggttgttcatccagcggaaggcaaactgcaggtatctcacttcgtgttggtccaggtgccggtgcacttgctcatcaatccggctcacgagttcttctaacattttcactttcatttgaatcccaggttgggcaaaggtgtagttgtcctgaatgccatccagcagcttgctcatgcaccagtaggtgtcggcctcgatgttgcacagcacctctgcgggcacgccggagacg

SEQ ID NO: 159148 - DNA, 1000 bp, Homo Sapiens
tttttttttttttttttgacaatggaaatgtttattgctggtggttgggtctgtcatttcctagaggacatagctggccagcagattttcatttcttttttacaaaataaacaaatgcctactttattatttatacacagaaaattatatagaaacaccacacaaactgcttgaaatacaaatattctttggtttacttatcaaagtaaaaaataacaaaaatcttatcagttaaataaaaaagtgacattctttatcaagccttcttaaacactgaaacgcacgcatttttatgctcatgttctttagcagtatttctccccttttgcccctcattcccctaaattgtttcaatgagttcatctgtagaatgaagattgttacctttcttaatgctacttactttttattatctcaatatcaagaccaatctagacttttgtgtctcttacatgtgaaatggatgtaaaaaatggaaaattcaccagcactttttaagataacataaaagaagccctaagcaagcatttcaaggcaatgacacaccattacatttctgagaaatttaagtatcattggtacttaaaaggagaactcaattccagaagcatattcttatactggacattattcataatagctaatatagttcatttccacagtactgatttcagataagccatttttttttcctgagggttgactacctcagacttaaatcctgaatgtcgatgactcaatcttaacaaaacagtcagctgtagacatgaaaattgaattgtttcaaaaggagcaatgatagcaagagaaagttcttggcattttaagaaaagtacatatacatagcaagaaatgaaagtaaatcaaaatacatagctttgtacatgttagaaatatccaatgtgccaccaacacaacaactgccctattaaaaagtcctcaggtctggagacatctgtatttttctttgtataactacatttgcattacccaaccacat

SEQ ID NO: 159149 - DNA, 838 bp, Homo Sapiens
tatggtacctgcttctctgaagagttggtattcaagttgaaataaattgtttcatttttctccaaaaggctgagaggctacacttgacttggatcaaaacaataaaacacagtcattatttaagaaaatttatttctacttctacagcagaaatacggaaatggtacaggtttgggcaaatcatactttatgaaatggatcctcataccacatcctttttaatacaggcacgttataacataattcctggattttcaaaatccagccaacacggatacctctgctactctgttttggccttcatagctgcttcctctttcagacgagctttcttttctaagttcaagcttgttaaagtctcgtgtctttgggcagccttcttgccctcaataaccatgaagatgcatcctaccaccgtcagggcaatcattagatagctgatcttcactcgcatcttgttctttgcagcatcaagcatctccaacgagacagtctctgggatttcatcttcctttttgaagcgacctgaccatatgaggatctttttctgccaatccgtaggtttgtgtaaaggcactctgttgtaagtgcgggatggagctccgggactttcctgtggttttgtgcaaaatccatttattctcttcaaatcagagcttctggtaagccttagagatgaggaaacatctctttcacataacctaaaacagcttcctgctgccaggcgcagaccgctgaggctccccatggccacttgctactccgccgaccagcgcagaacttcgccggggacggtggcgctggtgagctcaatgtcacccagcgttggagtgggaag

SEQ ID NO: 159150 - DNA, 1000 bp, Homo Sapiens
ttttttttttttttttttttttttttttttttttttttttttttgcacagagacgtgtcctccttttatttcttttaacagccgcttaatgttttatcctagcaggaaccctaccatgggccatttaaagtgtttcaaatcttagggggctgagcctggtggctcacacctgtaatctcagcactttgggaggctgaggcaggaggattgcttgaggttgggagttcaagaccagtctgggcaacatggcaaaaactcatttcttaaaaaaaaaaaaaattagacctgtagtcccagctactcggcaggctgtgtgaatagtaaggggtcagtctggttgggagtctgtctggcgggggtctggctggggtctgcctagataggtcctgatttgctgggggtccatctgtctgaatagctggagatgtgtactcatttgggggacttgtctgtcaatctggaggatcatgtctgactagctggggtccatccatcaagacatcaagatgagagtctggccggctggctgggatgtcaggattccatgtggactgatgtctgcctgtctggcgtccatctggttggttaggagtctgtctggccagaaggtctgtcagccagccagcccacctgagggtggggtggggtctgagaactctgtatatctgttcagcaggggatctgtttatatctgtctagtaatctgactaacttagggggtccacctggctgtccagctagcagagatgtctgtcttttgggggctctgtttggtggtctctctggctgcactggtctatcaagctgttggctggtctctctctctctggctggggatccctttgtccacctgtggactgtatctctgaagctttggctgtctgtccaggttggtggtccatctgtctgtctgcctatctggaggtctttttatcggtctgcctggggttaatctgcttggctgtggttatgcctggcttagttctgcctggatggcgaa

SEQ ID NO: 159151 - DNA, 1000 bp, Homo Sapiens
ttttttttttttttttttttttggtgggatgggaaaactttattaggtttggtttccagcttcggccacgcgggctccgcccgccccgagctcgggtcacggggcgcccccgccgccctcctcgtcgtcctccacgtcgaggcccgggatgccgcggatctggcgttgcagcgcccctcccagcaagggcacggcgccctcctcctcctcctctgggggcggcggcggtggcggcgacacggccccgggggctggctctgggggcacgggaggctgcgccggcacgccctctgcgccctccgagatccctgccgcttcgccctgcgccccctcgtccagggcaccgccctcagcctcctcctgctccttctcctcctcggggctgtcggtgaaagggttctcgcccttcaggtagcgctccagcttcttgctgatgagcttgttgttgagaatactgcgggccaccatgagggaggacttcttggactgctccatcatgagcctgcggttccggttgtgatccatggtcttcagatgcttctggatgatcccaaactgcatgggaatgaagaggtcgcaggctgcacaatgggctgcctccaccttcttcacaaaatgctccatggcaatttcctgggtcagatcctggtctctgtagatttggtggatgaggccatcaaggtcctccacggtttttcggagctcctctgtcttcttggtcttgttagtgacgtactcctgcagaaagtcagccgtctgcttagggagcttggtgcctacgtacttaaagtgttccttgtggaacttgctgtcaagatggctggccatctcgtcctcatagaaggtccggtatttgcacagagaacacacaaactggatcctttccaccatgcggtctcgctgccgctttttctgcttgtcctgactcttcttgcctgcctgcaacttgcgcttggtctggccattttcatcctgggtggttagggcccccttctctgga

SEQ ID NO: 159152 - DNA, 1000 bp, Homo Sapiens
tagagagagagattttaaaataatcatacacaactttttaaaagattatatggggaatacttacttatgtaatcaactctaactttagcccttcacagctgtattataactttatttaacaacttagtaaaagtcaaaattgatggttcttaacattgtatgttgagaatataaagtgcctaaaaaagacacattctgcccaatgctagttctttcaatattaccaccaaacttctgtgaaagacttgtaatgaaaagaaagactaactgcaacatggaagatgatttttaaaaaagttcatttgccaattttaacaatctagaaaaaaagaaaagtctgactataatacttgatgacacagacattatgtttaagtagaaaacacaagaataaaaaaagcaattatcagaaaatattgcacaacttcagttgtttcctccaaatttgctttatgtacttgggtggatataaattaataaacagaaatttaagcaagatacatgtaacaatttaacagaacctgataatctaatttctttcaatttttctcaaattcatctttaagtctttccatcatggggctcataaggaaatttaagcaacatatggatactacagttgaatgtcaaatctttacaaagtacttatgacatactacattcctctataatgcaattatgaataaccttcatgacactgtgttttgtatgtagaaaactgttagagttcaatattcaactcaatataaaataataataagaaacacttctgatgttaggttgagaccacttttccttttgctaatgaatgatttttttagctgtaatatcactgaggtgaaccaataagtcacctttgagtacatatgaaaaaataaacacatgctaaatggataaaacattactactacatctttactagaccatctctacctctaacacttcagaagcttagagatttaaagtattcttacattaactgcaagaaacaaaggagaaa

SEQ ID NO: 159153 - DNA, 1000 bp, Homo Sapiens
ttttttttttcttgcttacatttgaacatttaataaaaatgtttaggttgatatcttaaagttgtcagtgaaatctcagatttacataacagtttgcatccagtagtttttttgagtaacacaaacatcagtatagccaaatgttaactcttatcactttttgtgttaataacaaagtaatatttgtaatatagtgtccctgaataactataaaaacttcttggaattattttgtttttaaaataaaacactatttaataactggtatagcccttcaaaagacacattctgaaatgctatcagtcagggggcaaaagttgttttagttcagtttattttttaatatgtcctgagttctttctgttcataaaattatgatcttatgacagctgtaacttttaattaataatattaacaaatcattattgatataggcttttcaatttgctcaagattaggaattgtaagtggaatgaagcagcacttccagttgacaaatggatccaaaggtaatccaatgtcttttaaattaagcttgtgacaattaaaccaatacactgtagcaatgagaaaactattgacaaagtataaccagggaatattcatctcaatatatgctggaatctgaactttaagtaaaacaatgattacctgaagtagtacaaatggtaaccaggtactgagaaaacagacaatgagcttggataagaatatttttttagatctcacagtataactggagtgggatgaaaaaggaaaatataagatagtttcattcatataggaagttatcctgatagcctgtaccaaagtagtaacttcttcccaacaggttatgaaagctacaaataaaatcatcaccatgaaaaatgacagccagtaactctgaatgctgacatagaaaggacagtgacgagaataagcattctgtgccttcaggctttggtagatggctgggtctcccaaaacataagcaaggactgaaatccaaattaaaatt

SEQ ID NO: 159154 - DNA, 1000 bp, Homo Sapiens
ttttttttttttaaaagccaaattggacgagagttttattattccaaaatccagttaagtgtttaatcaaatacaattaaacatttaaaataaaaatcaactatagtagaaccagaggtggatgaaggatagattttatcaatgtgattaaaaatatttaaaaggaggaacagcttcagaaaaggaaacaaaaacacaaaaaaatattcaaagtgtttatcaggaacagaaacactgaatagcactcctggaccacaggcgtcttaacatgaaacccaacgaatattcaacattcaaaagtctcagcccttgatattgaggcagtccagaagtagaaatacaccctacatcacagcttaggagtaagtttccaaatatccattttatcatgatttacattcagaggtgtgctatccagagaaaccttctgcatctgtagctgtggcacagagaacgacacagacaggagggcattcctccatttccccttcccacacctttgctctagaatcaggaagagcatcagtgaaagtccccaggcccctagaggagggatccagtgaactagtaaaatgcagactaatcaagataaagtggatccaagaaaggactttcatggtttgacggtgaatcttcactggtcacccttctggcattaggaaaacaaggtagtatgtgttcttctgatgtttctcatcagtccagctcttccggttccactggggattctgccccagtccaagacccgatgctggtgccaacacacagggtgcaggtcctgccctagaggagctcagcccttgggtctaatccatgattcctttggaatagagcggcccacatggcaccactcaacactgactgcagtcgcactgaacaccaggccagaacaagtgtgggttctactcctgaagcaggcttctagagatcagtatcctcatcacttcattgctaccttctagaatctggtggaccctggagtcccgcacgtactgctgaa

SEQ ID NO: 159155 - DNA, 1000 bp, Homo Sapiens
tttttttttttttttttttttaaatcacccaatactgtttattcaaaagaaaagacattctaaggaacgaaagctagtgttttttattaacgataaaatctatattgttcaggaattttccagtgtgttacagcaatttctgaaatgataaacgaacatattttattattttccttttaaatcagttacttaaaaatgaagactgtttaattattttctccttttctataagtaggattttctttatgtccaaataggacttggtaactaggataatttacccctgaagcaaaatgacttcactgaaattagcaaatcctattgatgatcttaaagtaaacttttctggaaatgagcttgctcaaatcataagtgaggattaatgtaaatgtaataaactgaatctgtaaattggtaatgttgaaaagaaaaaacaattgggtaagaacaaaactgaaaactagcagtgtagcagaaagcacactagtcttgggataaggaaatgctgagaaggctgaggggtacattcaataataacaaagagccttccagttctaagtatttgtgactaacaacaacaaaaaaatctgttgtttgctagagaattcttaactctaatgtgaagatatgttctgtgcatttcctttgaacttggccctatgatttcttttcttttcttttcttttttgagacggagttttgctcttgttgcccaggctggagtgcaatggcgcgatctcagctcaccacaacctacgtctcctggggtcaagtgattctcctgcctcagcctcctgagtagctgggattacaggcatgtaccaccacgcctggctaatttgtgtttttagtagagatggggtttctccatgttggtcaggctggtctcgaacgtgcgatctcaggtgatccacctgccaaggcctcccaaagccctgggattacgggcgtgagccaccatgcccggctggccctgtaatttcttaaagggatcagaagc

SEQ ID NO: 159156 - DNA, 1000 bp, Homo Sapiens
ttttttttttttttttttaaaatcttcatgaattctaagtaactcccagtcaccctgttttatttcaaccatggagaaaagtacagaggaaaggctgcatatggagagactgtcgggctgacggtgtcacagcagatccgagtccacgtgtggaaacagcagccgcccggccctgggtgtttcctccaggaaaggcctggtcagtgaatgcctgcaggcagcaggtgtcaggaatcacctgcccgatgccagcgctgctcttgtctggagggccagactgtcatgaagtcagtgacgacagctcagacaattggaaggttaactttacgtacaaaaacaaaattcaaatgatttccttcagaggtggagttttcttaggttcacatttataaattagtcttcacagttaatcctgtttgggaacaagaaataaggaacacatttctggtttcctacacatgatacaggtgtacattaattctcgacttccgtggtccatggacttcagtttgtgaagggtgagtggctaccatttttggatcatctactttttgtattagctaacttgcatattttatttcaaattctgtctgtcagcaatcctgaaggtagatgataggtactattaatctcattgtacagatgaggaaatgaaggctcagaacggctaagaaacttgcccaagcccaaagtcacgctaggaagttgcagaaccagaatttgtaaaggacagcccttcgcttttctatatcccatgcttccttcccatggaggaaaatgcttaacactgatcatgaaatgaaccgccagcattcaaggaggtgacgaagttcctggtacacagcaggtgtccaggagaagatggcccagcctggctgccaagaagatgctcctgcttcccgatgccttttgcctgtgacactctggccaggtgcagggctctcatcgtcactcaccaagttataaaacgtagataaaaatgttagcagaatcaccactc

SEQ ID NO: 159157 - DNA, 1000 bp, Homo Sapiens
ttttttttttttttttttttccaaagtaagtttttattacaaaaacctttactacaattcaatgttttattaagactaaagtcaggaccttgccaacttactgagtcataaggaaacacatgaggaaagtcaacatggtctctaggctgacttgaattattccttgactaagaattctagggttatgtggacttttctgttaacatcctgacttagttcctttctttagcagcaaaaaaaacagcagaaataaaattcttggcaggctgctctacagaataaagtgaacaataggaaatatggatatgaagtgcagaagcagcaagttaccacaagatggggctatacactcaagaaagaacagttggttagcgaagtttctctattatcaaaaaaatttaaaaatactttgagtttatttgatgccttcatctttacagcccagctaagcaatcccataaaaatgagcaactgactaatgttttacaaagcccctcagtctccttccagagagtggaggatttattaaggataggctattttgttatctgcaaagctctcctttcatctaccctaatgtctcatgatcctggataaacccatttccctgtaaggtgagcgtatgctggtatgaggtgtgagccttcaggcagagtgtggtgtcattgttcttgtaggtaacttggtgtagggagaagaccaaagaccttgatgtcagaccaacatgaattcaagctctggctctgccatcagttagccaggtgacatttaagtgattcagttcccttaagtctcagtttactcattcacctataagttgtgagaatgaaatgagatatagataaagtgcttagcctagactctggcactttgttaataattaagggccattattattgtctcttgcttattgtttagttctaccatctgtagccacctaattcttagtctagcgattctggagcaggagtcatcaagataaaaaatataagctgatttg

SEQ ID NO: 159158 - DNA, 388 bp, Homo Sapiens
tcagaccataggaagtttattgtgtctttgagacactacaatgcagactcctcttccagagaaaggtctttcagagacagggaaccgtcatccggatgcgttgctcatttgtcattttcataggcagctggatcctcctcttggatctctcgaactcttcagtcccccatgtgtagataagataaaacactacaaactgcggcaccacgcgaaagaaagactcccgaatgcggcgcagaacattggggattcctttagtgaagacgtgcggataggcgcgctgctcgaacggtgacaagctgtagctgatcacatgccgcatccgcgtcagattcccaaactcgcggcccattgtggcggcggccagggctcagctcgccctccacag

SEQ ID NO: 159159 - DNA, 1000 bp, Homo Sapiens
ttttttttttttttttttgggatttcactcaagaatgtgtctttattgaagaatttgtaagaaaaaaggatgtaccctctgtaaaaagaggagatgttgcctccaacagcagggaggaatgagacctgggtggcttcccagaagtcagtgtttccggcatgactggctcctttcctggcaaacactacaatgtgtcacactacagctagcaattcctccccactccctcccagcccttcctccctccaccccacaaccctatagccatttgaggcaaatggctttctaaaggcccagggatagatgtgccaggcttgcctcttaatggggtcaaagtgagttttgctttggaaaaattcaaacaggaatgtaaaatggtttgagctctttctagtccaaccaaaggtgattacatccagcccctctcaagggaatgggggcagagactgtcgctcctgaatgtgcacacatggggtaaatggactatatcgcagtctgctctttatttgaatggagaatggaaacaggttataagaatatataacatccatgttcaagagtcactgagttctggagggcagagggagcacagaggcctgctgattccaacagtgctcctgatggctatcctcgagttgtagggatggttattcctctccagctggaagattgtcctcaatccgcctgatgaatctcatccggatttctgtcacaccgtctcctttcagggtgtcctggacaaacttggcctccacagccatctggaccatctccaaagctccccgcaacaccccacacaagagattggaataaataagggatgagtggttatcaggaagttccacaaagtccaccaaggggttattttccaaaatgagggagaattcatcaccagctgggctccaattagtaatgcttggagtgatgcccaagtacatcttgaacgccaccttggcaatgacatccgcagtttcccgaaagtcatggcacctcccaacat

SEQ ID NO: 159160 - DNA, 1000 bp, Homo Sapiens
ttttttttttgaaactaaatacattttaatagaaaacaaaatacaaaataactcttttcagaaaacagaaatatttaatcctttttccacaaattagaacttgctttatcctcagagcatagtttgatatgcgtgcgtacatacttacgatttgtttcacaaagtgttcattagactggtattgcagtgcaggacgtgggagcagttcattgcaggagaaaaagacgtggaaaaagccacacctctgaatggtcattcagaaattcaacatttttctaattctatcttgttacttattactccaaattattctttatcataatctttcttttgaggggagagaattattaagagaagtgcagctttggaaagaatttttctttcccaccatcactgcaggagcccaaagtgttctcaatcaaacccacccacccacttccagaaacatgtcagccagggtgatcaatctgtcacccgaaatttccctttctcccaatacactgtgctaccaaattctctgaattccctgaacctcaaaattccaagtatcaaaaccagtgccaggagtcaaacctgaaagattaaaagcagagaaggtgccctctgccagtgctaggtttcctcatgtcaataataataataattataattataataacaataattaaaaaaaatcctggttctctgtaattacggaaaaggaaagactatttgccaggatcatgccctcccctttcctcattcccgccccacatccctctgccaacaaggacttccctcccacctgagggctggaccatgcgtgacccctgcggcgccacttctcctgagggtgctctacagccgccctctaaccaaacctagccccagtcagatggtgaaaatgagagacaggaaggtgctcgcatgcgcgaggtcacggcagagtctccatgaggacttgtgagtgacctccagggcactctaattcttgatcactcatcattgcctctctcctgtt

SEQ ID NO: 159161 - DNA, 1000 bp, Homo Sapiens
ggttcaagtgattcttgtccttcagtctcccgagtagctggagttacaggcatctgccaccatgcccagctagttttttttattttcagtagagacagggtttcaccatgttggccagatggtcttgaactcctgacctcaagtgatccgcccaccttggcctcccaaggtgttgggattacaggtgtgagccactgcacctgcccaaatattcttgttaaccaaagtttaacttttgcattccattcccatatatgtgtccttatttctccacagcctcaactcaatacagttgtttttatacttctttttcaagtgaaaggtaaaaacactggtttattctcttctgaacaaggtgagcatctttacatgttaaaggtcatttacatttctttttgtatgaagtattcttaattattggaatcctgtcaatacattgtttgccttgggttatggtggggtttttcttgtcctataaacatttttatgtagttaaaattgatcaatagttttatttatttcttctaggttttaagtcacatataatgtcgttttcctccattttcttctagtatttgtatgctttactttttacaattagatcgtcaggcggcttggaatatatctatatgcctattttcagttatcttagtatcattaaaaacccatctttaccccacttttaccatattctgtaactttcatatgcattgtgtctgctattctgttcatgtgtcaaccccaattacagaggcataatgtgtttcagtatttacttatagctatcctatacataaactgtttctgtattttaaatcctaccacttcttccaaattcccatattaattgtagctttagtttagtttacccttctggatttttcctgtgtgtctaacggctttttttttttttttttttttaatgagacaggttctcaatctgttacccaagctgcagtacagtggcatcatcatagctcactgcagccttaaactcctg

SEQ ID NO: 159162 - DNA, 1000 bp, Homo Sapiens
ttttttttttttttttttttttttttttttttttctgtgagactgtcctttattgtgtatacaggttccagcgtcagggctctcccacggccccctccccagtcctcccccaaggggcccagagtggtgggagtgagaggccaccctaaggcacactgaccagagaggcatggagggaggaggctgacttgccctggggacccctgctaactgagacccacccttcccctccaccctgcttctgtatgtgggagacgaaaccaagagtcactgggggcagcaggcatttcccagggttaaggctgatggaaggtccctatcccagatgggagatgggggcttttcctatgactccccccatcccccagctggaagacgtggggaggggtgcatagccttagagaggtagaatgaggggaaatactcctcagtgcccagaggtggggagttgagagcagctgttgacaccctgggttcagatctaaccttcagtgacaaagcacagcactcagtggctcggggatgtttccccgttaatgaaaatggagattgtaaatctgatttgagaaagctctgaatttggcctcaaccaatggtaatgctgagtatttgaaggacaacgataggggtgtgtgtgttacacacaccgagcctatagattcatagattaaagagggggatggatggagagctgactgcccggaggggaaggtggcaagaagctggggtccaacctcgaggacccaaagccccatccatgccctggcttccatctctgttaggtgatcctgtctgcatgggagcagccccaagaacacaggcctgtgggagggagaaggaccagccccacccccaaccccacgtggccttgcctggaggccccagcaggcgcaggacggcaggagtttcatgcagtttatcacgaaccagctgtattggaaaaaccccatctatatacagatgtggcatggctctgccctggcacagccagctggctggg

SEQ ID NO: 159163 - DNA, 1000 bp, Homo Sapiens
gggttgacggtaaatatttgatatttttattggaaatgtttttgttagtttgaggggaagggtatgaagacagatctcaaggtaaagtcagagagggctgtcatcagtatgctggggagtttagggacaggaggcattggtaggggattagatgtagcagcagtcaggctgggatcaagatgcctgggggacatcttgatcttggcctttcagggcaagtgggaggctagaaaggtggctaggaaagaacagcattcttcaggtaagggtatagacttgggatgtgaggcgttatgctgaaaggttctgtcacgaggggatcagaggacagtggggaaattgggtgggttatctagcctgtactgtctgcaggtcctgaaatttgatgctgtcatagtctttgcagtgggtcggttggaatgattctgggggcagaagctcagagccccttagtaggaatggaggcggcccttctgctgccactgctcagccccctccactgcatgacgaagggtggaggaaattcccagcaacatatggcccaggccttgcagcagtgtggaggtccaacgaaggagctccctgagtactttctttgggccaagtccttgaaagtcacaactcatagagtagagcccgtagaatgtggctttgacattcaggctgccaaagaggtctcgagggttttgcttgtacacgtcaaaggtgaatcggccgatgtccttgctgtgcttggggctctcccgtccaggcccatatgacagcactccactccttgtagggctccagctctgaccagactgcaacaccatcaggcacgtgtcatcctccagcagctggaagaagtcctcactgtccactgcagttccatcctcctctagcaccagggttagcactccattcagcagtagggtctccaatgctttggctagcagctcctggcgggtggcagctgtcaggcctttccggatggtccgcttgtgatcacagacacggaaag

SEQ ID NO: 159164 - DNA, 1000 bp, Homo Sapiens
tttttttttttttttttttttttttttttttttttttgaaacagagtctcgctctgttgcccaggctagactgccatggcatgatctcagctcacttgcagcctcgacttcccaggttcaagcaattctccagccgctgcctcccaagtagctgtgataacaggcgtgcaccgtcatgcctggttgatttttgtatttttagtagagacgaggtttcaccatgttggccaggctggtcttgaactcctgacctcaagtgttccacccgccttggcctcccaaagggctgggattacaggcgtgagccaccgcacctggcctgctttcactggaaaagtgcctccaggctgaggtttgcttgtcctgtagcattaagggccttgatggcagatgttctccggtcatcttccttgggtgctggcttccagtggtcgtaatttgtctcaactcggaaccacgctccattcaaaggatctagaggccaaatgtctgctgggccatctctgttcctcgtgatgaccaccccctcccggggggacgtgccaccaacaatgtaataaacatcagcaataaggggagtcttggccaacttgccaacagctgcttcgaagttttccgactcactcagggtctcgttcatcaccagaaactgtaaacttgtgtgggctctggccagtccataatcctacatagccaataaaagtagttcctgtgaatgcaatctgcccattctttaagaattgcacatccactgtcagcttgcgtaagacattcccaaaaggataatccaaattccgaccatggtaaatgtggcctctggagtcttgagccacaatactggtgcagaacacggaggactcgtaggccaggttgaccagaaggcagtccgccaggctgaggttcatgaagtcacacatgccgcggatctcgccggtgaagggctggggcaggaagcgctccagctccaggaccacttttccgattaacacgtgcacccact

SEQ ID NO: 159165 - DNA, 926 bp, Homo Sapiens
tttttttttttttttttttagtgtcaaatctcttttattacagaggggttgtggtaaaagatcctgggcatccactggttatctcggagtggcaggggcactcagtccctccgcaggttcttaagccgttcctccaggtctgcatcagcatcagctagggctgaggctgcggcctctgcttttttcccaccagcagccacactaagcgagcccccagttgaggggaggttcgacagctcatctgttaggctaagtcccagctcatccagaacctgggacaccacagcatcactctcctcttcatcttcctcatcacccatggcatcatcaatggcatcattcatcatctcctccttcatatccatgatctctgcctgccgctcaaactccatcatgatcttctggatctggggcaacttcagctgtctgttcatggtgcccatggccttggtgacacccttcatggcttgtgccatcgagttgttggacttgagtgtctggatcttgagggacacagcctggatgttggcccgcatcaatacaaacttgcgcacatagcgccgggtgcgcaccaagtcttttgccatgatgcgaacagcatccatctggccttgcttggccatcttcttaatgtctgcaatgattttcttctcctgggtctctagtttctgtcgctcgcggtccagctcccgcatggcacggttcagggccctctggttctgccgcagtagctcctctggcgtcttccggcgcccgaacaataggtccatgatggtagaagctcactggcaggccggagctgggacggacacccgtttccgcttccgggtcacgcttctctttctgggatccccgacttgcccaccaactaaggcccctcggtcctgtcgccgccgccgccgtttccggattaaacgacgtgacgt

SEQ ID NO: 159166 - DNA, 935 bp, Homo Sapiens
ttttttttttttttttttgagattcatattttatttacaagtaaatgaagactgtccctgtaaactctaatttgggatatgaagaacaatataaagaagtagttgctggtgccacagtgatgtgtgaaggagtctatgccactgtttctttaaacagtgattttgttattaaaaaaaaaacccacctacacgatttcttcatgttgcatatgtaaaataattaaaaataaaagtgacttttcaaaactctacagtctgtgatcaaatgcgtgaggtggccaggatgtcactttcactcagtgacagcccctactcttcaagagccaacagcctctgggcaaaagattagtactcatcaagagtatctgctcgaggaatggaaagacctcggtccttcagggcctgcactttcaacttctctgcttccagcttggtctgctgttccaccctttgttcttctagaatttcttcaatggatacttgctggaggggtgtgtcactctccttttccaagtctatttctcctagtaggaccacattttctcctctgaccacaaaaatccctcgaggaatatcaccgtattttttgcccacatgaatacgctccacagtctgatgtagcactaagtttgcaaattgatcaatgcttcttaaaaagcctataagtgtccttccatctcgaagcagaaccaagtgctttttgtcaatgtcctcgatgaggctggcggtgccaggcatatagttcattttgaactgaaataatgctgcaatgcacagcggcgggaggccagcgcgtccaaaacctcttccctcctaccgcagtcgccgcctcggtgggaccaagcccggaatcccgaccgagaccagcacttctgccccggctttcagccgccggggcctgccggaagctcctccatattacccttacccacttc

SEQ ID NO: 159167 - DNA, 1000 bp, Homo Sapiens
ttttttttttttttttttttttttttttgagatcctctgcatttattccattcatttctctcctccctccttccattgcccacccaaccctgccctcctcctgcagtcctccaaggctaggccagctccagctggcagcttttgagtggactcagggtgctatttgtggtacgtgtgaaggtgtccacctcaggcacgaacctctcagcaggcacggtcagcttgcgccgtgtgtccatgcacttggtgtccagcagcatggagttggccttgcaggcaatgtcagcctgcagccgggccaggtgcttgcacagggcgtccagtgcgtcctgtgcttgcgccagcttctgcttcagggcagcgatggttgcctctagctggtgaacctcgtcggtgaggccgtactgtgcctggtcccggcagagttccacgttgggccggtaggttctggcctctagccgggtatgggacagcttcaggctcaggagctttgtgcgcagatcctcctccaggtgccggatgtcctcctgcagctcagcgatctcctccaaggtattcttctcttgccacttgagctcactgtacactttctccatctcccgcagccgcttcctgaaggcaaattccgttgcaactctctgggcttcaagctcgttgttggtctcagcaatagttagagcagtggcctccctcagctctgtggctgccttcatctcagcctccgctcggtccttgttgaaccgactgaagtcatcccactgctggagtgtggtggagccatcaggtacacgtgtggggtcaaccttcagcgagatgtttggggatctgaggttgagagagagacagcctctgtcgatctctagtgtctccattttgccccgatggtcggagttgagctgctgttggacttcctgcaagaggcagagctgctcgaaggcctggctgaccttctgttgcaaggccttcttggtggcctcgatgacctccacctctttatgca

SEQ ID NO: 159168 - DNA, 1000 bp, Homo Sapiens
taatttaagaaacaattgttttactgtacatgtgaataacaagaaatggtacggggaatgtgaataacacgaaatggtatggggaatgtgtgactagtgaagcatattttaacttttttattactggaggaacagagctaaaggcctaaagaaggccttacagtatataacagtaaatagaagagtaacatctttatacaataaactgttagaaatgataagtgtaaagttgtgcgtctctgcggctcctgaacttgaagattattatgaatagattggaccagcattatatattaaaaactttgatacttagaactttccaactttaaaattcagaatcataaatggtgacaacagtagtagtattgaaccaaaaatagtcaagtaaataatgtctcagtaaagcaaaagcattatcttctcaaatacaaaaaatacaaaattcatttcttttcttgaccttgaaaatttctgttttccaaatacctaggaaaaatgaataccttctgcgttgaatccatgtagcaatctgatgaagtcatctatgtccatggaacgggcccgtttgtcactaaaacctgtgctggttaggatttgctgtattttatctgctatgctgaaatcttctggtattataatattatggactgaacagtgaattctgtagtttttttccaagagttgttgcactgcacttgatttaaatgcagcagagagtgtcttgtttttcctaacaaaggttatccttactagaccatcccattcctgaaaattgatgggtggtggtggattcttaggttctatccttacaacactggattccaccttgggcggtggtctgaagttattctttcccactttcattagatggtccacacgtgccaacagctgtgtattaattgagagtctgcagtataacttatctccaggttttgcaaccagtcggagggcaaattctctttgaaacataagtatagcacacctgaaaaaaggtcgatgt

SEQ ID NO: 159169 - DNA, 1000 bp, Homo Sapiens
ttttttttttttttttttttttttttttttttttttttttttttttttttttttttttttttttttttgttggcccaaaaaaaaaatttattttcctttcaaaataaaatgtacaaccaaaatttagggtttggagcagtagggaagacaggagataccagggagcccattttacagtagagatctgcatctgacccctctatcccatacctttgcaaaggaggggaggggtctacaagccagaactttcagaagagaagaaaatacatgctgtgctggtgctgtttctggagcaggtcatcctttaggtatagaacaccacctccacccgatgacatcagaaccactgactggtagagtccttggaaatcatacagtccacccatcccccgccagacacatggacacaccgaggctcagatggggaagggtacataccctagggcacacaccaaatcaaaaaggtgaagtcaggactagaacacctgagcaactttagcaggggactgtggccacaggcctggatgtgcacagtagatcatgaaatacattagtcctatgaatgacccccgtgcagagaaatggctgtggttgtcagggagcagccactgctcaggggctcctgacctcagtgaaaggtgactgtgtaaaggccagaaactggatggtggtcatgaacctcaggacgtttttttttttagcaccaaatggtggagctctctgccagctcagcttcttggggcctctcaggtaaaggtgatgtttgaggaccccacgcccatatgaggggtggagaggagaagccagcagcactggggtgagccttggcctacacccttccttcttacccttcccccatcttcagtaaggccaagagaggatgtggggtggggaaggccagaatggtatcgtgtttcttgtttctgggcagtgggctgcgtcctcccaagcaggactgaagggttcagaatcgcttttcctcaggctgagaggttatgag

SEQ ID NO: 159170 - DNA, 1000 bp, Homo Sapiens
tttttttttttttttttttgtattttaaatatacagtaggaacatttattttaacacttctaaaagatatttctccatgcctgatgatttgatataaaaatcaaacccatcatactttccccatcagtctctctacatttagggcaatcagaaatttgtacaacacgaatatttgcttctgaaacgaaaattacaaattaaatgataacaaaaatacacaaatcaactggaccctaaacaaatttctagtgaattctttcctttcccccaatcacctagagcttctttcttcagcctcattctgctccttttcctttctttgcttggccatgaatttctcagtattttgcttatgacgtgtactcttgcagtgatttgtcattgctttttcacctgagtagaagagggaacaaattggacagaagaatccagccttaggtacaagaaagtctaattcctcagggacatcagacgccactgatttgcctgaagaagagtcttcagtcttcttgcgttttcgctctggttctgaatcctttaatccagattcctcatcaacttcactcatctggaaggcctcttcaccttttgctggttctgtcacaacagctttttctgatggcagagttttcccaattctaactctcttggttggagttttagctgttaagtgtctttcaatcatggtttttagatcttcttccataacattctcatttactggacccacttgggacaaggattcaagttttgtcttttttgtgtccacagctctcttctttctattcccttttttatctgtgggatggtcatttttgctttgtgctaactcaacttttaaatcattatctccatcttcctcctctccaacttcatcaacagtaacaaaattaagctcttctttaaggttgttaaaatccgccagagagtcttcatcctcttcagttacttcatccaaagtcactaaatgcaaatcactgctgtcatcttgtatttcatc

SEQ ID NO: 159171 - DNA, 1000 bp, Homo Sapiens
ttttttttttttttttttattatcaactcatttttattgatgaatatcacaaacttcaatcaatactcttaaaaatattattctgcatgcatttaacaaatctgacaaaagaacaagtatccagtttacttgcattgtaactatgacattttaactaaacaatcaattaacatatatttaaaaccattaggtacaggtaacaatgaaacacttcaatgctttaatctgatggcatcctaccactatgcacatgttcatgtaacactactagtaattaccctgaagcacaggcaaatgtagatggaggactctccctaaaaagcaagtttaagggattaaatatcatcgtcatcatcatcgctactgagaataaagctgctgccagtggataggggcccttcttcaacactcccaaaaccacccaaagtccccctctcatcagaatcgtcaaacaacttctcactggaatcttcctcctcatcaaacaacttctcattggaatcatcatcttcgaacaacttttcgtcagcatcttcaacttcctttccatctgcatcttcatcttccttgtcatctgactcttcaaacagcttttcatctgcatcaccttcttccgcctttttatcagcagcttcaagccccttttcatctgcatattcttcatcctctttctcatcagactcatcatcaaatactttttcatatgtatcctcctcttcttccttttcatctgaatcttcgtcaaactctctctcagagccttcctcatctaacactttttcagagccgtcatcttcaaattcggagttttcagagtcattttcttctaactctttgtcaagaacattttcatgaagctccttttcagaaccttcctcgtccaaatctttctcgagaccattttcttcaaattctctttcggagccatcttcagactgtttttcagagcagtcttcatcagactctttctctgagtcatcttcttcggactcttttgtgg

SEQ ID NO: 159172 - DNA, 1000 bp, Homo Sapiens
tttttaaaggtggcaaacatatttattgcctcactgtaaatagagaaaatcttgtcttctctcgaccagatgcccaaaaggttataaaagaagtataacttagctccaatttgaggatatgtactaaaaattttaaacgtcaccttggtgtttttttcaagactaagtgtgataccacgtaaggcatttccatgtcataaattaattctaccatatttttatgtaaaaaatgctgcacgttgttgtgtctgcagctgtgctgtgattatgagacagatacaatgattcacactggctggaagctaagtctcacgtcccagggatcagggcagtccagcccggtgctgccacaaagggtggtggtatcaggtcacacctaggacctgccactttagactgaccttgtttgatccacggttgtgaccatgtattaccacaaatttaacaataaaaaattgttttaagagtatctgagaaaggactaagcagtcattccattttgtgtccttcccttgttttaaaataagcaacgtcctatacttccatcatttaagatcatcaagctgacttgttcagtctgggcccatgtcatccttccagaacaagcacatcctaggatttcaaatggttctacaaaataaagtgagagattgacccaagtataaagtcttaacaagcatctcaccatgggaaccaacgactcaaattcaaagccaacggtctcattgtgattcaactctatgatatatggttggggggactctagcagagatccaagctgagatatggcacaaggcaggctggggctgataccagctgagacggtgaaggattccacagccagggctgtattagcagctagagcgatggacaggcgggaggggcctgtctgtccaggtctgctgcagaggtcttaggtgaaggccccacccccccccacacacacacacaggtcagctcagatcaagagtgctcggcgggcacggccacatcctccggt

SEQ ID NO: 159173 - DNA, 1000 bp, Homo Sapiens
tgagaatacaagaaccttttattttccatccagttgggcagcagggaaaggctaggtgggcccagcctgcccttccttcctccagctggctggatatttattattagccaggagaaagcagccctggaacccagactctgtctcccccttgaggtcacagatgttgaagttggaatctcgctccttcccctgactaccatcctaggctgggcctcaagactagtgaggcctgtccccaccatccctggccttgttgtggggctcaggaactcagagtcccagtgttgagtctgggagcactaggtcttcatagttccaggcccagagctacagctgggctgggagcatgtgtgtgcactgtaagaaggagctgatgatactggccacgtgctggggttcgctcatgtggacacagtgattgcctgggacttccacaaactggaactgctctttgagggtggatttcatcgtgtctatcatgaacgacagggactccttctcagagtaattctgtcttgaatcaaaatatccgtggactgctttgatcaacaggacatgggcctgcagcttcctgatggaatgcgcacacagctccctgctgatgaagtcaatgctgttctctgcccaggcgagcctctggtctctgttcagaaccagacctgtggccaccttcgtggttcctctttgcaggagaagctccccgcactcctcactcaagtggctattgctcttcagtaacctctgcagcagctgcttcaggctgaacacgtgcgagggctcctgggaggcctctacctgcagcacgtgctctatggctctccgcttgtaggtcagcaagttctccatttcatctgattccaggagaaagagcggcgtgtccagcaagataagtttatccaccatctcggggaaggtacagaaaaacattccgcccacgacgccaccgaagctgtggcccagaatggagaatcgattccatttcaaggctgccacaactctt

SEQ ID NO: 159174 - DNA, 1000 bp, Homo Sapiens
gccagccgtcatataaaactatttattcataaatattttccaaaatgaaaataggtttaccaaaaaatgtccctcactggggaggggaggagggggcagccctcgcccccgggcccccagggtggggctgagaggaaaacctcccggccccctccctgcttcctgggagagggggatgccccgtggcttggggcctccctccagtcttccagggcagggccctcacctgggcagggggatcagcatgcgggggaagggggtgggtagagggaggggccggtgtcactggaggtcccggtcctccaggtagcggtactcaaaggtgaagccttccttcttccgctggccccacttctcgtagtcaaagtagatgtaggtgccctgctcaaactcgtcagtgatggtcttgggctcctcgtgcctctggaaccacatcatgtacttggtgtggaatcgccatgactgcttctttagggccttggctgccagatactgtgccttagtgccctccagatagtagaagatgaagaagagtgtctcggtcgacaggcgctggtagaattccacagtgtccgagtgtgggggtggcatctggtggtggtaggggggcgtcggacaggggttccgggggaggtactgccgaatacgctcagagtcagaggggtgaggcatgtggtgccaggcggcctcttccatggcctgctgatagagctgctccttggtgaggggcacagggcccagtggacagacacccagcgacagcggtatgttcacctctgacagctgcaggggcggctgggctgaggccggaggtgctgatgtactgctcaggatgatgtctcgctcggtcaggtgcagcgttggcacagggtcctcaatgccagagctgatggctgcccgttccgccatggacttcaaggagctcagaggctcaggggccttgatttctggggcggtgctgaactgtggaggcccattgagcagggcaccggctgccttg

SEQ ID NO: 159175 - DNA, 1000 bp, Homo Sapiens
ttttttttttttttttttttagcctcctcttccttccggaagccaaactgctcctttattttttagagctgctgattgtgaatctcagagtcttaagagagaagccaaatatattcctcttgtaaatgaagaaataaacctatttaaatcaccccctggtggctccctcacagcaaaaaagcctgggggcaaagaggtggcaggcacgagagatggtcacacctgcctgcagccagcacatcaacatgcaccaacccaggcaaacaccagagccctggacatggccctggagccaggatcccagcccagaactgggggtggggaggtctctgcaccctgggacccccgcaggaatggctcaggctgtgcttgccagagcaggatgcccgggcaggcggcaacagccaccctccccagtggcagcgccttagaaacagcttgcgtattaaaatcatggttttaaaaaaaaaaaaataggcgtctcaggcagatggaggcaggggctgaggggggcccgtacctgtgctcagggcttccctgccttcctcacctgtgctttcttcttggccccactctgaagcaggctgggactcctgatgaccaaagacagccttgcctttttccgtgccagcgcggacagtggtgatttgcccaagaccccctttttgggaagagccttctgatgctgcttttggcctgcaggttccgtgggggacccgggagctccattcacctgggacggcttctggtttttcttctgcagttttggggatttggcaggggtgctggggctccgggtgggggcgccaggggctggactcttggtggttggcgtcccgtttgcctgggctgggaccttagcctttgtcctgttcctcttcttcctgcccatgctggggggctggctcccgccggtggctgcaggtgtgccatcctccgctggcgtgccatcctctgacttgcgtttcttgcgcttcttcgtctctggcaagaatccctt

SEQ ID NO: 159176 - DNA, 1000 bp, Homo Sapiens
tttttttttttttttctcttaccctaaataactaagagttggctgtacgccttttttggggggtggggagggaggtggtgaaaacagcttttattttttactattagcttccacaaaaatttaataatgcccacattattaaaatgaaacactggaatgaacttcgacctcactatacttttaaataaagtatgtaacctggcaaagctgatgactttgttttaagaagacctgggtgttgctacgtcacatcagacaagtgcagtaacctggaatgcacagacgaccaccctctctccctggagacctgctttagctcctacacagatgactagattttgagttaactgttttaacattctggcattttgttctcttgataaagaaaaatcacacccttgccaagttcatgtattttaaaaaatggaaaactctccaggtcacggagtgaagaaaacacttaagtgttttatgtctaaatgaagcaataacaattctgataccagcaacatcccttttgatttaaaaaagattggtcctcacaatgttcaaattattctacacaaatgacctgtgaaattttttacagttgtatttttttgcccaagattcatcataaatcattcaattaaactaaattaaaattgattttagcagaaagtagaaatgtttcagaatataaaatatcacattactgattttacaatttgataacaactaaaaaaaaaatgcatgtcactaaaaaaatttttccagtcttttcccttctacccaggaaaattttacatgatgtcaccaacatgagcccttggtgatcttctgaagtcttccaaagattacacctttgcagacttactggtgatctccttcaactcgtctcttacgcactaagtcattgttttttgttatagcattagctgctctggttcgtggtccctgctgtgtaaactgatatccaaatttaaggatatttgtattttcctcaagcatcttggccatt

SEQ ID NO: 159177 - DNA, 1000 bp, Homo Sapiens
ttttttttttttttttttgattttagaaacctagagaaaaaaattttatttaaagacacattttaagtaaaatgaagaacattttacttatttttatgtccagtacagtcaaagcagccacattgcataaccccgggggacccccttcctctttgtgatgccccagaacaatattgatttgattatagaaagccaccggcagcctacatgcgcaacggtgagttgttggttatatacactgtggaccatacagtggaatattacagtcaataaaaggtatttttagagagaaaaaaaaacattggaacacgcttatgatataatgttaggcaaaatcgctgttatgaacagctcgtttggggcagagcaaatcctgggaagtaacactgaggctgttggtgcaggcggtggagtacaacatcttcgagggtatggagtgccacggctccccactagtggtcatcagccagggcaagatcgtctttgaagacggaaacatcaacgtcaacaagggcatgggccgcttcattccgcggaaggcgttcccggagcacctgaggctgggtaattaaagaggtttacttggctcacggctctgcaggctgtacaagcagcacggtgccagcgtctgcttctggtgagggcctcaggctacttccagcatggcagaaggcgaaggagagctagcgtgtgcagagatcacatggcaacagaggaagaaggcagaggtgctctttaacaaccagttcttccgagagagttccacgtggctagaacttcacaatcatggcagaaggcacgtctgcgaggcatcctggggctgcactgctgatcctcttctctctcccctggccctgagtgctgccttcatgtggctcagcccttccgtccttcaagccttcatcagcttcagggcagccccgagtctgtgcccaggtacactggctaaaatgcagtgtcttccaaatagccatatctcattttaatcagggagcaattc

SEQ ID NO: 159178 - DNA, 1000 bp, Homo Sapiens
tttttttttttttttttttttttttgctcttccttttaaaaactttatttaaatggagactcttagtcaaatgattggaaaaccaataacgaaaaatagttcttcaggttcttctcctggtaaggcggaggacacaccaaactgcactggccctgtcaggggacacggcaccctcgtgggaccaggctcagccctcggggtggcacgaggtcctgcaggctgcaggaccctcacactccagccccgtctggtgacccaacccgggcccgtggtgcatgctggggaaggccactggccggcccctgggcttcggctcctgaggaggcatggccccacaccctgcccggccataaatatatacagattcctgggcatccagggcaccaggaccgacgcagagctggggtcctgtccctaagcctgtggcacagcgactcttgacatgggagccagggagctgggaccgccgcacccctcccctgcctccctcctggggtcaccaccctcaggcggctgccagctggcctaggacgcggcggaactgctgggtgctgtggcccagctccttgaccctctccaccatgtcctgggccgcggaaggcgatgggtactgcaaggcagcggccttggtggtggccacgatgccgcgcaggaggtcgcacagcaggttgctgtagtgggtcacctggctgcgcacgtcagcagccttggcctgccgtgacagtgtgtccccgatgaacaccagcttgtgggcgctgaggatgacgaacttgctgtgcgccacaaagatcttgggcggctggttggtggccacggcggtaaagaaggcgtccacggcgttggtcagtgtggtcaggttggcctcacactgctccaggtagaagagcagcagctgccggtccgagggccccaggccgcctgttcgccccggggccaggggttgggctggcgtccagttggccaggtcgtggtctatgggccgtgacacctcctgttccag

SEQ ID NO: 159179 - DNA, 1000 bp, Homo Sapiens
ggtttttttttttttttttttttttttttttttttttttttttttttttttttttttccagaagcactaaaaaaatctttattggatgtccgcaacaacccatgcaatggggtaggagttggagacaccaggaaggcttggggatagaaacacaagatgcaagtccttgaccacagaatcagatcacacagtcacctttccttccacaatatcccagggacaatgaaagcaagttcaaccaagatgctgaaagagctggatcattcccatctcatttcagtggcatcacagattctttggagttgcatgcttgcaacgtggaaatgtgtttcccacagccccactagggattctcaggctaggaagttgccaaactgcaagactacatcactgacctggtatcccaggagcagcaggagaggaggaggaggaggaggagttgtccttgttcctgtcctgagtgggccccttcatgataacggggaaactggcctttgccttctgttacctcctctgtccctgtccccaatcctgggagcatgtgtgagttctgtcttccttctaccacagtctcccctctgcctccctccggagcactccctgccaatgacccactctctaaaatgatcccccctctccttgctactgcacatctcagatgggtccaggaggacagcagtctgatggaattagctcacactaaaaaatgaaagaggtgctttcctctttatctctccttgaggagtctgtcttttcaaaagagctttctgggtcactcaatgatctcctccctcttatccacttctttgaaagggcccttttccccaaggtttctgcaaactcacttttcagtctgtggagtctcctcaatgcagcctctggggagggtggttccatcaaagggaggaggtgggagaatcttcccaggggtgacaactgaagtatctaaccagtgtggaatgagcaccagtgaactgctggctctgggactccacagcct

SEQ ID NO: 159180 - DNA, 1000 bp, Homo Sapiens
ttttttttttttttttggtcagcagctacctttatttggatcacacacgtgagtcagacagtaccactaatcgggccaatatggcttgtgagcaaaatgggtgaaaatagagggaactgactgggacctgttgtctaacatcattttaaggttgaacttgagcaaagacttagagaaagctgatggaatgccaagcatcaacgtgaagagaccctctatgcacacagtggatatgttatgcctggctgtagccaccttctcttctgaaaacaagatgggaatgacggaactgtattaaaagattaagttatccactagggagcatactagcacacttccagatcagccttgagatgctagacttcagatacagggacttgtgtcaggtggcctctagaaatgtggaagactaagatttagaaataaactaatttaaaagcaaacaaacaaaaaaaactttcgcctaggatgatctgtttacaacagaaacaaaaacattttccagtttaatccatttgactgaaagtcattgttgggctgacccttaaggaaaacttaagtttaaacttcctttgcatagtatgttttctcttttttccttgggttagaggtgggaacaagaaaacattgatatagttttgaattaacattaaagaggcaaaatttcacatttaaaatggcccaaaatatcccactattcattttgctgacaggtgatacactcttgagaatcaggagtggagggtttagtcacaagcatatatgctgtgggtcaggtgactcatgaacatgtcaaacaggccatgttctttagcagtttctggtctggtcctgcttttagtaatcttgcggtggaactcaggcacacagttatttggtaccacttccttataacctagcccacacccctttgcccaccctcaagccgatcggtccgttcatcccagtgcccttagaaggtgaaggtttgggctgggcccagtggttcacgtctgtaatc

SEQ ID NO: 159181 - DNA, 1000 bp, Homo Sapiens
ttttttttttcttgactttatttttaatataaaaaatgcaaatttggaaacccaccctactttccccaacataatgctttacctcttaaaaataaaaataaagtactaattctatatacatcacaggtaccatacaaaaatgtatccaaagtttctattgctaccaaagtgttctaaattaaaacaagttacagaaagcccctcattgtaaacaaaagattacaagttataaaatcaaagtacacacaggccagagtcatttatacaatgcaatgcattctgctcccaagccaagttgaatttttatgtgcctgtataaaaatgcatatcaatatacctttgcaaatgtatttttcattataaagcaaatgaatacactttctacaataaataatccgctgggaggcacacctgcggggtttgaggtgggcgggacgacgggagcggggacacacccaccggcggtcacgggcagcggagtgtttttggtgatctgcaagtgatgtacacagcataactttattctcccctctttccacaaagtaccattcaaaataatgtcattttctttcttaaaatacacatttgtcattgtaaatttacatcccgtcttattaaataagtggtactctgtgtaaagagcatgatttacaaaattattaaacattcaaaagtctttaagaaaaagctacatatcaaagaaagtgacgccagcagcacggcctggggacgtgcgacagacgcactgggctgcccggacgtgcccaccccactcacagcgcccagacggagatgggttcctagaaaacttggaaataaaacctcccccctccccggggaaaaagaattaaagagctataactaaaaatcagaataagttaagttttgaacaatatacaaacatgtacagcttatcaacactatggacaagacccgcgctggcggccgggccgtcagtcaatgtcactgaggtcgctggtcggctccccgtggacgcggc

SEQ ID NO: 159182 - DNA, 1000 bp, Homo Sapiens
gagggtaaaatgggcattttattacacacagtagcataaatgggataagaataaaatctggagcgtctctgtaccaattctccaattaatagctgctcaacctaaatatctttgtcttagtccagggtgagaaatgggatctcatgtaaaggaaacctggggtccagtccagtcctactgaatgctatttagtctgagtaaagaaatgtctgagggtcaaagccatttgggaggtctccctggggatagagaggttgtcctaaataggtccatcagaaaagccaggaatctctcaggcccacaaggcaataaaggccatgaaggcaaaaccagcggctacacagctccacttagctagaggggcctcaggactagctagctcccgtggaagaatttctaggaaggtgacatacaggaaggtaccagctgccacaccctctaacacagcctgggctaagccccgccctccttcagagtcccctccagtcacagccagccctacggctaggcccaggggggacatgagagctaataatagtatggagaacactgcccatcgtgagctggtacctaaatgcactagccgcattcctacaccaaacaccacaagccccttatgagccaggacagcaaggcagagctgcacggtagctgctactgtcggctgcagccccacagctagcccttcaaacactgagtgaaaggagagtgacagcaagaggacaagggctcggaggggaccctttgagggtgagggtaaatgtccatggctgtggagttcgaagatatgagccccaccccattcttcgtcctgcactgtcgatcctccagcagccccaggacagcactgcaatgccagcgactccaaaaagaagacaagaaagaagcccagggagatgatgagctctccatagggatactccatatgagctgaatcagcatcaccagaagaatttctctcacttgctgatctgttctgcaccatgaacttctgaatctg

SEQ ID NO: 159183 - DNA, 1000 bp, Homo Sapiens
tttttttttttttttttttttttttttttttggtttgtttttttttgctgtttattttttaaactcaacaagatttgatggctgatgacccagggaactgagcccaaggaagtagccagaaatgacttctcagtgtgaagggtaagcttggctgaccatgagcaagtaaagccacagggtgtcctgggcagtgatgggaataaacccttttcaaactgagcttgcacaaagcccagagacactgacctgattttctgtgtcagtctttatttggcaaacaaatttccttcccgataaggcagccgcgtgagaggagcgactgaatgcccagcacccaacctccaaaagcacctccagccagaagacaaagatcctagaggcccacctcctcttccgctgctttagtcttgcgcatggagggctgaccgcaggtctgcaaagctcgaaggtgttcctgagtcctcagagcagcagcaggagctggaacaggaggcagtgagcctcctagccccgggtcatgggctggagggagcatgacaggaaggagggaccctgcagaccaaggctccaaggggctggattctggctcccctggggcaggcaggggctctgggcttgggcccagcttggagtcacaggcttgctccatcccctagtgagtggctgtcatcgcccctcaaaatgggctgtgatttgttccagagtctttcctttagtttcagggacacagaacaaagtgaaaaggacactgaagatgcagaaagcggaggcaagccagaaggctccatagggcctgaggacctccatgaggctgctgaactccttggtcacgagaaaggccatgagccagttggtgaggacgcagatgcctgtcgccacgcccttgacatgcagagggaagatctctgacatgaggagccaggggatgggcccccagcccaccgcaaagccggcgatgaagaggcacatgctgcccacggccagccaggccagccccacg

SEQ ID NO: 159184 - DNA, 1000 bp, Homo Sapiens
ttttttttttttttttttttcatccaacaaatatttattggataccaagtatgtgcttggcactgtaccaggccttagggacacagaagaagaagtatacagcagtgtaaactgacatttcttaaccactatataaataaaccccactttactactaatgtgacatttcaacatgttatacctgataagacatatgtaaagagggcacgattttgaggtatatagcttctttttctctacaattaccatgtgatataaattcctaaaccccttcaaatagctttataaatgaagagcttccactaatgaaaacctcccaaaattacagttcagttttagggagacaaaggaaatgaacttcgggtataaaaaacaaaaatgaaactgggtatggtggcagacacctgtattcccagctacttgggaggctgaggtgggaagatcacttcagcccagtcgttcaagttccagcttgggcaacacagcaaaaccttgtctctaaaaaaaattttaataaaataaatagcctaccctattactatacacatcaagcataaaacgggcaacaaaactcaaaaagaactttagattggaacttgaaagtattatttattctaaggcttacagtattatagttccagaattgtgggagtttttttttctgagaaaatcatttttagtaattattcagtattacacactgaagtatttagggtttaaggggcatgatgcctataactgactttcaaatgattgaggaaaaatttgtgtgtgtgtgtgtgtgtacagagaaagcatgaaagataaagcacgtatgaacaattagtgaatctgggtaagagagctctttgtactatttttgaaacttttctgtaaattggaaattatataaaaataaaaagtgttccccaaattttatttagtattagtgaaagtattatgagaataaatatataatctattcaacttttcacaatgtttagaaatctcctgtgccttt

SEQ ID NO: 159185 - DNA, 1000 bp, Homo Sapiens
ttttttttttttttttttttttttttttaagattttcaaaatatttttatatagaaattttttacaaagattttacaacatagcaaatcattatgtcatactgtagaaagatgaagcaaaggattaaactccaaggataaagaaagtgctcatagcaacgtattgcagtctccatgaaagtgcatataaacggttaaggcaaagtaccatcttggtacagacatgttgcaaactgacttttaaaacaattttttaaaatatatacaaactttttttcttctattcttctcaaaggcatttgaaagggatacttttatgaatattcttgctgtagaacaatgtagaaataacttctgggtataaaacagtaaaaataaaaatattctacctgagtgtgttaaatcaagtgatttgtaaaacaaaaccttcacaagtgtgggctttctacatgtaacttgccaggctgaaggcttacaccctcatgttctacaacacagatcactaatgatgataacatgagttaaattgggattcttgcccttctgtgtggcttttggcttctaggttctatgaccaaactattgacatatttgaagtctgtatgcagtcattgtgtgataaatctactttacagctttgcttctacctgcagcttacatgataaccatgctgtgaagtgctacatatgcttcatacaatatgttgccccatctgataataaaaatacaaaggtgctctttaagctaaaccataaaccttattagagaattctagttaagtgttttgtttttccacatacatgtaaataccttaagatcaataggatcaataaggataatattagttatcaaaatttagtcttcatacttgaagaatttgtttttaaaaataactaagatgcaaaaaaataaattagctagtcttgaacaagagtgagttttgcagaaaactgacatatctgaattctagtacagataagaatctgtcaaatgataactga

SEQ ID NO: 159186 - DNA, 970 bp, Homo Sapiens
ttttttttttttttttttttttttttttttagaaagccaaggtcttttattaaaggtcccgactggttttcccactgtatttccatgccagccagggtccagggacagcctctcgggaggtaccgggtggctgggcctggggcccggtagcacagcgcttaacggtgtctgcctgctccactccacggggccagaggcaccagcacgatgccgccccgactcggctctgcggtggcccctgtgggcctgcccttcctttagctccagctgctgcccgcggcatccccgctcattcccgctgcgcagctccgcgcttgctatctaagatctccctccagttgtcactccaggagagcagccgtctccttgtcgggggcaggaccaggtgccgattgtggcagcaggtgaacaagatgtgctcccagcttggggtctcctcctggcctcgaactgtgtccttgtcatcaatgagcaggtcccccaagaccaccgtcttgtcccttgtcaggataattcgttctacgaactggggccccaggtgctgctccacccagcggtacttctcacccacacagtggtggtacttcagcagggggctggtgcagatgaagacctgcgtgtccggtaggtcgttcatctcccgcacagcgtccaaggctcccgggatgggctccaggtccaggaaaaagcccggggcttcgtacacactggccactttatccgccaggtcgggccgcagggcgcggtactgctcgcgggccaggaagccgcggcgttgctccagcggcacgtgcggctcctcagggaagcggcggcggaagccccgcaggaggccggcctcgaagtcggccaggacgccgtccatgtccaccagcacgcgcacgctccgcgccatcgccgccgggccggagctgcgagctctcggggtctggggggcgcgggctcggccggaagcggagggagcgctgct

SEQ ID NO: 159187 - DNA, 1000 bp, Homo Sapiens
taccaaagaataaatgtactgtattaacatgaagactaatgacaaatgcactgcagtagtaagcacgtcatagatgcatagaatattctctatatagtctgaatatggatataaaataagttatactcattttgttttccatcacagtaggagcatagcatacaaagtgattggttcagtggccatgaagcaagccaggggagagaccacagaagagaatgtagggcattgagtacagtggggatttgccaaggacactgcagagtccctggggaccctctggggaacaaggccccaaacctctcaagttagccttctgagaatagtatgaggtcccacttgacaagagacagtggctgcatctgagctgggatgattcaggcaactgggtgggaggcagagcagggacaggcacgaacagcatccagcaggctagcccactctcctgctggtgctgttggatgtctatgatgctgggaatatggggcgcagagccagaaggcacggtttgcttctgtgacgtgacagatggccagactgatgggccaccaaatgctggccggccctcctcccttgccagcctgtcctgggaggctgcagggggcctgcatactttgcttgttctccatagtttgtcattgggtatcaatgctgggatcctgcatacatcatagcacagacaagtgtgtgagggtctgaggccctggctttgaatcctctctccatcacgtgacttctgtgagtttcagaaggtcgcctaaacccttctgaggctactcagcctcctcaactgcaaaatgggaaggctaatgcatacttccctggggcatcagtgagggccacatagaataatgtatataaagtgcctaacacagctcctggtacgcaggaggggctgggtaaatgtgagtcaagtatgaacatctaaacatcataggccaggtggaaagaacatctaacaaaatctatgaactaaaaccaccttgactggttttcaata

SEQ ID NO: 159188 - DNA, 1000 bp, Homo Sapiens
ttttttttttttttttttgggaagaagccttggctttattcgctctgtggggacactgttccgttcagaggcccctcccagccatggggtgggggacagtggtgggcgtgggaatcccagcgagcatcctggagggtgcgtcgtctccatgtattttgctcttccccatcttttccatggggtcccctgccagggtcaagcactaatatgtggtgaaggcagcaaacagcgtcggcgtccctttaggggtggggagagggctgtagcaccaagaaccccctcccccgcccacgacatccctgaaaaggagactaaaataaagccccggggcctttctacgtaggggctccacttaaatatggaatggtggtaggcagagaggcggtggcccagcaatccttaagtccagattaccagctgtggggaggcttccagggggccaggagcaggctgggcagttccagccacagacacgtgggtggaggacggaaatatctccaagggggcacagtatcagaggagcaggatggaaggggcttttctgcctgctacgggatcctttttaaagaaatgggtgtgaagccgggcacggtggctcatgcctgtaatcccatcactttgggaggccgaggcgagcagatcacctgagatgcggagttcgagaccagcctggccaacatggtgaaaccccgtctctactcaaatacaaaaattagctgggcgtggtggcgcgtgcctgcagtcccagctactcaggaggctgaggcacgagaatcacttcaacccaggaggtggaggttgcagtgagctgagatctcaccactgcactccagcctgggcgacagagcaagattctatcaaaaaagaaagaaagaaaggacaggacaggaaagggaaggggtgtggacagaactgggggcaaaaacaaaaaagaaggaaggaaggaaagaaagaaatgggtatgggcagaattgggggcaaaaacaaaaaagaaggaagg

SEQ ID NO: 159189 - DNA, 1000 bp, Homo Sapiens
ggtaccgggccccccctcgagttttttttttttttttttttttttttttttttttttttttacagtttaactgctttgaatagcatttttaatagcaaaaatgtgtttatactataatagcttacaaccatcttttcaaccatctttttcaatacaaaataaacatattcattttcatattttacatttctcacctctataacatatacaataaaaatcccagacattgttggctggctgattcttgcaaagagatgcataagtaaactagtcaagtacatcttaaccattttgggtgtcatttagtcagtcagtcatgaaacagtaatatggagacataattttgaaaattaagcaaatgaatctgttctctagaaatgccttttctcgagttatagtattatatttataactattaaaatttatacaaatcagtaggttttatttccacaccttcacaatcccatctctagaagcagttacgatgaagccctgtgtggtctggaatgtggcgacatcagtgatgatgtcatgatgtcccacgggcagggactctgggccccttcgaggggtgtcatcacttggtcctactttctgcttattctgaatttcctggacaacttcagtgccttcaattattttcctgtagtaggacacagatggggaactagtacttcctgcaacaacataggacctttctgggtaagccaagtcccaaaaccttattttcatatctgagccagctgttagtaggataggatttccatctgcaggactacagtagataccatggacgctatgaggagaaggctgtaattcagaaagtggtggtgcactgctggcccagagagtaaatcttctgtcaccagtctccatgtcccacatggacacttcgttgttgccctgaacagctgcaatcacccaggactgatacagagggtgcattgagaggcgtctgattcgagccctggaaggatgacagtgacttgaaattggcaac

SEQ ID NO: 159190 - DNA, 1000 bp, Homo Sapiens
tttttttttttttttataatatgatcccatttatttaaaaaataaagattacatatttgcttatatacgcatacaaatttcttgaaaattacataagaaattgttaatagattacctctggagaatagtactggggtaagaggtgagggggcagaattctcattttacagccttatatactgttgtgaatttttttttttaccatgtactttttaaaaatacaaaattgaggagggaacctcctactccaaaattacgaagcattcttttatgtacatttctctaagagttatatttgatatttttcaaggcaaactgacttgaggtactcgatgtttttaaatgtatttctaataattattagtagggtcacacctatttgacagcttttttaaaaagtcacatattgctgtatttttaaagatgacaaacctttatttaaatgagatgcttgctggagattttctttttcaaactcactttttaagttatggaaataatatcactgctgaaagtttggaaaacatatataagggtgccaaaaataccactaaaatcacataaaccaatcttaccattattaatggtgtgatttctttctttacatatctattaatacctagtactatctatgtagaaaatgtgtttgcaaagctgagatcacactgtacctatagctctggatcctgctgctttttcccccaacacttaacagatgctcagtaaacatgttaaaccaagttgttaattagtattgtaccatttctcctcatcaaaaattacttctatagaaggcatttagttggtttccagttcttgagtaaaataaataacacttaatgagtatgtctttacctaaagattgtctgcatttatgatttagaagaagctactggatcaaacggtatgaaatattttaagtttctgataaatgtttttcagaagaattatactggttttcactcctaccaacagcgcagcctgtgttgctgtttccttg

SEQ ID NO: 159191 - DNA, 1000 bp, Homo Sapiens
ttttttttttttttttttagatctcattagttttatttctataacctttcgatctgatgtcacgttagattttgtcacaactggatttagtggaagcaggggaatcaagttcactattttctgaaacacacaaaaaagggatgggaacaatgacttagaactaagattgctcataaaagaccatcagaaagatccctaaacaaaagctaaatagttacagttaatggtaactggcaagggatttaatgcatttgctggtattaagtttcttatggaatgaatgaatgaacccagcagcattttatgacacagctgccagaacatcccatagaaaaacaattttgtaggaacgtgatggcaacaatcagcagccaatattctcaagagttcctaattaccaaaagcatatacaattttagtctagaaaaataagtcaattttataaaattaagtttttagatcgaaaagcaccccctttaacaggtacagagatactgaaaaatagtccctaaaaatctcactaaatagtttacggagagaaaggcatgccatgttgagttacggagtgcagcgcgtgccctcagctgctggcgagggactggtggatgggcggctggaagcagcgcacatgctccactggcgtgccctccccgtcgcctgacttcaggtacttatccaggatggtgatgatctcatcattgagaatctggaacttgcgaattctctccaccatcttcttcaaaggcacatttttaataatctcatctttgccatcatgtttctggactttaagtagatggtagcagaaatccagcacagcaaaacgccgctgctgcccaagaagtacgatgatcatacagccagcccagtgtagcccatcaccaaagcactgctcgactgtgaactcgtgtgtccccacgggaatgcagtagacaaactgcatggcactccacagtctgtgaaactccacacactcgtccacatgcatgaccccattgct

SEQ ID NO: 159192 - DNA, 1000 bp, Homo Sapiens
ctccagaaacgagctgtcttggccacttgacagcttttgggcacacactatgggcttggcaaggcagagcttagaacagggtcaaaagggcagctccctttagtcctttatacaaaggactgtcagagtcccatgctcctggcagcatctcctcaaggcacaggtgcccagatcccctgcaaaagaaaacaggcagctgggctccaacggtggggtatgacctcctcccaggccagggcttccaaggcagggaagaaggataactcttctctagttacgagttcaggcacctgctgctgcttccaggtttggtataaaaacctcagcccaggcaaagccgggagccagagagcattctgtaggctgtaagatcacgttgtaaaataaaaatattacaataaaattttttgtagttgtccaaaagggagcacctgggtaagcaatgtgaccttctgaccacagttaagtctcactttggactcttctttctgttctatgggtggtcagaggctgtcaccaactcaaaccactgtctgagggcatcgctgagtgtctcaggaagtgcgtttacatctcgaagaatgatatagtatgggaatgggaactcttccatgtaggatcggatttcaggcatctctccaggtcctttaaatatcggtactttaatgtccaagatagaatcccgtgaactgggattgtccaatacaacaaagatgacaaagatatttgcattccgggcagcctgaactgctgccaggactctttctttgccctcaaggaaaaggcctcgcccatcagagactaccaggaggagttgtgcagtttctgaactgatgttctgcgagagctgctgagcagctgcaaacatgttggcaacagactctagaaactgagcaatcttggttttcttttgttggaatttgcagagacgtagaatctgggacccagagtaatcactgaactgctcatgaaatgggtgtaacagctttacagattctcc

SEQ ID NO: 159193 - DNA, 1000 bp, Homo Sapiens
tactttatactaaaagaataaagatttttattaagcattgtaagttgcattcaatagccttcagatacaccacaccacaatccatcgacagtcaatcaaacccaacagcagttcattcttgcacaatccatgagttagggcaaaactcccttcaacttacagtaagatcctacttagctcttgcgggcaggggttggggaattacacctcatttctgatcactaatgtgatgaagagcatcagaagtatatgaaaacgataagaagtgattctgatttcaaagtacattgtttggaaacattaacaaaaacatcaaaatgatagaagtatacctgcttctactaaattcttgatgggaaagttctcaagaacaagcaatttgtttcctgctacagaaggggggggtggtttttttttttttaagatcaaagggttttttttcacagaatttcatatttgctaatatgaaggcataaaacagcaacaaagaacaataatgcatacagcagtgaatacaccagggtaatgttgatattcgaaacggctagataatttttggggggctttagaataaatgcaacagaggtcaataatcacaaaattttaaggttagagcaagatcagtcaatgactaaacagagttaacatcttttataggactattactgattattagcatttttgttttgcaaatgggcacatactgttaagaatggaagaaaggacgataacatgcatattaactacacactttaaaaattatgaaccatgcagaagtttagctcaagtagtagtactaatggtctacatccgattcaaaaccacatagttcattgatcacagatgcatggtattagtcacgaaagtttcagaacacattgtgttgattttgaaaggtcatttgcatcttctatgatttcaactttatctccatttaacttgcttgtaaagtatgtatgatgtattgtatatttaaaatcagcagaacggcaatattact

SEQ ID NO: 159194 - DNA, 1000 bp, Homo Sapiens
gaagtttttgctataaaacatttaatgttaacctacaatacaatgtaaacttttatgaaaaaaatttaaagtacactagatttcttcagtaaattatcacatgactattcaggcgcagtacaagttggggcactgcatcctttgtggatggatttccgttgctgtgttcctcacaagtcctaaaaaaaccagttgtagagcggagctccttgttcaagcaccggataatgatgcccctgattttgcattctgggggttatcgctccttctcagtcattttctgaaactctttgcttggccttggcaccattagcaattttcacaactgctcaattgaaggttctaggttctttttagcttagtttttaagagacaagtgttatcctctggccatctcttattcaaatatcatggtggaggcaagcaaggagaaagaagtatttgctagaggaaattctgcagaagtggaagaaaagaccagaagggctccactgagggtacaaatattcaactgactccaatcgagtgtctttgcttggtcacttcccatggttattcagctcaatctacaacttcagtcgtgggagtgcagaacaaaacttgaaacaagtgcttttagttgatgatttgccatttggaaacaacagctgaaatatcccagaggtgatgtggaaacaagagcaaatgcttgcagatcactggcttctcagtgtcttctccctcgcaggtctcatcaaaatcccaaaagtccttaggagtaacacagattgtactggcattaagtgacaaaatgtgcagcctgtatttgactgaggaggaaaggaaatggcacctaggcagcagcgctagggtcagcaaggagaccggcctagggtctcagtaaagcagaactgtttcaaatgggactagaccggggcatgtgcttccggtgaatcctcttgaaacctaaagtaaatgggaaggccgccctaacagttgtactgacataaagggagaccct

SEQ ID NO: 159195 - DNA, 1000 bp, Homo Sapiens
aaaaaaaaaaaaccccacatctcagtttttgtaacaagataaagaaaataatttaaaaacacaaaaaatggcattcagtgggtacaaagcccaaaatcactataataaagaactacacgtgaatctttacaaattacacaatgatgttgtgtaaaaggttgcatctgtacaatgtcttgccaatgctatctctacagtttatacactcttttacatttatataacatattaaacaaatcaattaaatattaagccttattagtctctcaacgattctgcaggcaaaataaaaagggagagagaataaaataaattaaaaaattacaaaatttccacaaacacagcagtcttccatttaggtgaagtataataattttcagagggtcaaaaaatagttgtaaagaatacagggaaaaaacagccagtcagggtttttattgttgttgctgtttatttttaaaatcacacattgaatacacacaacaatcagatttcttcaccaaacccccaattttttagcaactggctctattcagcaccaaaaactccagtctgtgggaagtgcacagacacagacttcacttctgtgtcttggtcgagcaatccatcaggtcattggttaggttcaggacttgccctcttttccttccctcttcatggctctccagacccaaggttctcaaggcttcagatttatggcccacagcccctattaccacctaaatccagcagccatttgggaagaattcaaaataatttgagatgaatgaaatgacaggacctgtattacagatgggtattctccattccaagtaaactgtttcttaatgagttctgagactctggtcttggatgccatgatcatactgggtaattatttctagtctgagactttgtgactttgtcagatgcctcaaaaaaaaaaagtgatcagtattctggaaacacttccggacaagttgggaaatcaaatggcaactgagaagctgtggaatgcaga

SEQ ID NO: 159196 - DNA, 1000 bp, Homo Sapiens
ttttttttttttttttttttgtttttttttttttttttttttttttttttaattatataggaaagtttttatttgataaatataacttcataaactttaaaaaattatgagtagctgtacaataatatactacatttactgacaatgcagagaatttttaaaggattacattagacagccacagtgtctcaggtccaaaattttaaaccaagtattgctacaatatttccagatactcattcctcataaaaatctaaattaccatgattacaaacatatcatgagttatgatctattttttataggaacaacattcaagttatttcacataaaacagcactttaatagtgttttacttttatgaaaatagataactcatttcaaaatagaaataaaatgtctgtacgtggggaccaaaattaataaaacatgttttacgtaactctttggtgtgttatttttattaatacctgcttatatcataccccaaactgatctttacaggaaaaacaccaacatggaagattctcccttttcctacagccttcacgagatttttcagagtagcatattttaaaaacttttggctcttaactgtcaattttctagtggccttgactcctgcctattaggagtctcaagcgatcagataagttcaatctcacaatcttttccagtagaaatgacctcagtcctggtactaaccgtagggcagaatgcaagtatttcctagggttgatttgcctctgtttagtctcctgttcaggatagggcctgggtgtggctcaggtctggaagcctttgtgtattatgagctttagacccaagaaagaggacagttagaaaattcagaccataaattctccccttttctcaactcgacagcaggtcttcgtagctgtagttctccctggcccatactttgctccgcccagggtgagcctacgcctgctgaagctgaggcagggtgctgagtcacttaaagcagctgaggggcaat

SEQ ID NO: 159197 - DNA, 1000 bp, Homo Sapiens
ggtgagaagattttttatttgaaatatagtctgagcaacatgagtgtagccaagaggagtaggggctggcctgcctggggcagcagcctctcaaatggcacgagagcagtacaaatattccaatgtctgtgacaattagttctcaggactattttgagggaaaagaatcagagaagacagggaggaggggcaaggtgatcaagggccctcgccaaaccagactaggcagagctctcccagagggactgtgtcagcacccctcatttccctccttctcaggatctaaaggcaggaaggagagctggtgtctgcaggaaaatagagctctgaggagcgccctggctgaaggcagcaagcgggaacctcccagaagagcacagccgctgtggggttcaagcctagttgacagcagtggggttgggccacataagcagcttggggttggaaggacacagacaagagatggggcaccaagaagcagcgaaaagccataaataacagaagcaaattcagagctgtgagggtcctggccgaccccacatttcctggggctgggggatacccagcactggcagctcagggcagacactactccagggtacaaccggtcacactcacactgggggcagagccttttattttccacggtccgcagggcaggtggaagacacttcggcaccacccctgaccatgcacactgcaaagtctccggtcacacctgaggggacagtgtgtggctgtcctggtcctgagaggcctgtggttgactgtgatcattgtggccaccatcgtcctcaggggccgggcccagcaatctcctcgcctctgggtcagctgacaaaggctcaccggcacattcttccagtccattctctctagtctccatgggcacctcctccccggagccctcctctggctctgccacctccactgccatctccgctgccgccgcctcctcttcctcctcctcctcctggtctctcaccttgtggacaatgaa

SEQ ID NO: 159198 - DNA, 1000 bp, Homo Sapiens
tacagttaaacatatttaatagaaatattaaaataatcattacacttcctctcattgcagaaaccatgaaagaatatgccttttgtaatcaaagtaattttttatcatgcaaaaaattattttgttatgacattcgtaagcagagactatatttcaaaacaagtttatacagacttcaaaaggtctaaagtcaaagagaaagtgaaatatatttaaatatgattagttacatcgtatgcagctggcatactcatattcacagtttataaagtaaaaaaactaaactcttcatgtcagctctgaaatagatgcattttcattaatacattcactagttaggtctgttcttctaagacaggaggaaagatgagatatatgagctattttttaaagaacaaactcaacatatcagcagcaaatttcagttaaactgaattggaaaccaatgttctgtgtaaccaaagtgcaaagccagttctccagctcagaaagaaaattaaattaagagtataaactgaaggcttaagagaacttcagagagcatactgtgtgattaacacataaatattacaaattatccaatttttgatttaagaacaacacagtttggatctagtcattaaaacatatgcagaggtgtcaaaggcaagtaacactaccacctaaggttattcggaggaactgtgacgatgtagcacggacctctaaggtgtctaaaatcccttctgatggaaagcttatggaacactatctgccaaaaacactgaaagcaccacttttatatttagatccaatgctgagtgatatagtcactgttgtgataggtttttatttgggaaaatggagaggattctcaaaacagattcatggcttgcatgcagtgacaccctatcaagagcctggaaagacaccatgaaatcacctcaactcaagtgtgggcccacctactcatagtcagtgttacactagccagctctagggctctgacaacataatgagt

SEQ ID NO: 159199 - DNA, 1000 bp, Homo Sapiens
tttttttttttttttcagattaaaatcaggtttggagttaacagaaaattgcattcctaacttaaaaacttcaacttctctagattcctttagaaaaggaataaatatagtttaaaaaaatgttgctttgggtagaagtcttgattcattgcttcattcttacagctttttctttgcttccttactataaaataatccaatgttattgtgaggacaatctctgattcagttccaatgctcttgtatctccatgagttttggcattgtttaccagcacgtcaataagctcatagtcatctttggcatataagtgtctcagtaggtaccaacgtgcagttgatgcaatagatttgggatacccaggctgatataccactctttccaaaagacgccgtgtctctcttgcccccattttgcgtttgaattgtaacaaagcttgtaaaagaacagccagtggacaaaagcaaagcttcaaggcctcagttgtagcctcttgaaccaaagatggccagtgatcattggaaatgttagccatacagacttttaatgcaagtagtgctagtctcaacagacttgagagcttcccactccaactgccccgttgggatgccaattgtagactctttctgtaacacatctctgcagctctcatcattccttgggattgatacacatgtgccagccactgccaagctggaacagaggttgagttggacatgactgttttttgtagttcttcaagtacagcatctgggagtggcttttgtgactccaggagtggtttacactgaacttgtctcaaaagtaagataacggctggctgatcagggttactttttaaattctttgtgcagagagtttcagcttcagatattcttcctgtgtctattagaccagtgacagcttgtgagagagaccacttttcaagggactggttgtaattttcaaagaatttttcgtctttaattgaagcagaaacagcagataacagtgccaagta

SEQ ID NO: 159200 - DNA, 1000 bp, Homo Sapiens
ttttttttttttttttggaaaccaaaacctgctttataaggctgcgtggccaccactggcttctctgctgagatatgaggtgccagccaggcagacaggtgacagagggtgacccttcctcaccttctccccatcactaccatccctccggccctacaaatacccatctctataatgcaaccacttcaaaaaatactctgaggagggacagggtgaaaggggtagggggtcagactggtctgaacagcaggctggttcccgtgaggtagctgatgcccatgctcctgggcagaggcttttggagagaggccagttatgggctcacagccaggagggagtcactgattgactggaaagtggaggaagcagaaagtcttgaagtctgcccagagcacttgatcacaggtaacgtctgggtagaaaggctgggctctttgctggtgtcctcactgtcctttgaggaactgggtttctggggataaggggagaggccagcttgagtcttcttggatttgggcgtggtcccgtcttcagagagtagtaggctaacctcacaggagctttgttttcccagcttgctagtctctgatttgctgaaggcattgagtatcacgtcatcctttgagatagtcagaagtgatgtcgggagagaccacactggagcagaatcagagacaactcccatgtggaaccctttgtagcaccaactccggagcagatctactcctttaagcttgttgccatggtatttctgttcccattgggtggtgagaatgttgaaatatcgtggctgctcaaaaaagcggagatagcgagaggagatatgagaaggaaaaattcgttcaaactgaccacggcgagaaaactcatcttccatctcaaccagaatccgaacatcatctggtgtcaggacatccagcacagatgcatagaagtcctgatcaggaattttctgggtcagataataggctttcttcatcttctgtgcagtgacatgctc

SEQ ID NO: 159201 - DNA, 1000 bp, Homo Sapiens
aaggcacagagtgaatatttatttatcacagaggtcaagccgaagctctaattttataaatcctggaaaagctggccagaaaagtacagagacttgcccaaagtcaaagctaaagatgcttccagaggccaggagagaagaaaatgttttagtagcactccataactggaccctcaaatctactcactccaagcatcccttcaagttcctgaccccaaagtaagaatctcagtaagaaaaaaatagagatggtttccaaataggaggtaggacaccatgagtggcatcgagcaataactgcaacagtctggctaaagatagctgccacttatgacatctgagcatgaaactagctaattttaaaatggccatttaatacatgcatgtaagaaatcttgtatcccctaaatctatacaaataaaaaactataaatacaaataaaataaaatggccattaaaaaaacaaacaaacaaacaaaaaacaacctgtggcttccaaatcccttatcttttcatttattcataaagatttctggtcccacccatgttccaggacaagttgtatcaatataccccaatcctttctaacgccctgagttctttcttccacatatcttctaattcgtggtctgggagggaaaagggtagtggagttctcaggtggatgacatctccaaaggggagaggacaaaggcctctggcttggcttcctgcttcagcactccagtcagcaggaactcaggcgagaggaggggcagcccaacccgtagtggaatggagcaatgagggaagtcctgagggcatgtgatcacaactctctgaggcttataggaccgaggcatgctgggtaggtatgtgcctccacagcagctaataatctctcccatctgaggtggtggtggctggactccaggggtcacatagatctcatagccctctagcagccttcgctcccgagccctgctcagtgcgtcttgaaggctaaagccaaagttcttc

SEQ ID NO: 159202 - DNA, 1000 bp, Homo Sapiens
tttttttttttttttttttttgagggtccaggtttactctttgggaatagggaaggatgaagagaaggggtggatgggatgggggcacccctcagtagtcagctgtgtaatctgtgccatggagaccccggcacagcagtgtgaactccttcaccatctccttcacccgcctcttgttcactcgctcgcgaaggatctgctggctgaaggtatccttctgttcagggctgaggcgggcagaggggaaaccaggtggctgcagggcctccttgatccacatgctcaggaggctgaagcagtgcttgttcagggcgaacaggatatcggcaaagcagtccatgaggctgcgggaggcctggcccccaatggcctccagcactgctatgagcagcatacgaccgtcttcctgtaccacctttcccacagactctacttccccacaccgaggcagcagctctgtaaagaagccacaggaggccttgacagtaggtgcctcagggaacttgagggccagcacagcacactggaacacagatttgacatccaatcgttcacacaggaacaaatctggcttccgcttcagagcctgtgccaggagttgcataaatgaatcaacaatatcaggatgatccctgggcccttgctggaagagagtgagtgtgacggaggtgacgagcaggaagagggcctcaattgggggaaagtgggcaggctcatgagcaaagatgtggaccagctgtcgagtgaggtcaagagcagaggcctgggggatggtgctgtacatccgacccagcatctcacacagctgtggcaccatgggggcaaagtcatccagcagcgtcttaacagacttctcaaagatagcgcacaccgcctccacaacctgggcatcattcaaccatttgctcagcaccttctggataagctggaagacctgctgcagcaccaccaccacggggttgggtccctgtggcactggcagcttccgaagctcagggcc

SEQ ID NO: 159203 - DNA, 1000 bp, Homo Sapiens
ttttttttttttttttttttttcgggggctcaataaaaacttttaattacatttcagagacttcgtacagtgcaacagtgaatattcactgttaattttcacaagagtccatttcatcaaacgttcagagagtctgccttttcattcccttgttcctcagtgctccaatcaggtttccagtctcccagaggtttcttttagttttgattaccgaccaaaactccagtttagggagaatggaagtccaccgtcccatccccaccaaaacatatttcagtcaaacccaatcccagtccctaaagaattaggaaagtatgggccaagggtccttttaattatacacacatcacccttaaaactgcgtgtgtgtacgagaaataaagaaaaacacaagaggggctgtaaaatactgcacaagacaacaaaacagaaggaaagtcttgagggagaaacactaagacgcgagcggcaggatcctacctcctgtccgtgacactccccattgacaccttccccactgtgccatggcggggaaggactaaagtcgagtctctagggtctctagaggtcttgctaggatgagcttaaagagatggggtgagggtggggggaactgcttccattatatttgtggttctcagggttaagcagtgaggaggggcaggaagattcagaatgatccgtgggtccaaccctttggatgtgaacattcctggatagaaactggaggactctcttgacaaagtgcaggaagggataaacaaaaataagatcaagtgaaatgggaaaaccctcaaagagatcaagatgggcagtggtggtggtgaaggtagagaagtggttttcagaacctgttctggccaaggtggaagaatgtgcggcagccatgaagaaatatcaaggcttcaggtagctagcacctttcaaactggcaccatggcctttcccagggggtgggaccaatagggtttggaggatcatccaggtcacacgtctcagg

SEQ ID NO: 159204 - DNA, 1000 bp, Homo Sapiens
gggtattgaaccaggaagctttatttacacagtacaagtaacaagcaaattcctgagagactagagcggctggagtgcaagccacagcctgtgcggggaggccaggctgcaggggcgggcagaccctgggccccgggtctacgctttctggtcgccacacttcctgaagcacggcaacacccacaacatccagctcagggaagcccctgcagccccagaaacagcctatgtgctatctgtcgccccagcccccaggacagcttccccacacactgaaaacacaaatcatttgccaaaaagactatgctagaaggtcagactatcctatctaggctacaagatctccacttcggtctgccattaaaaaaaaaaaaaatctttctcttcttttctctttaaagaggcatgacagaggggtttgaccaacagcgtggacatggcaaggtgtggcatcattgccagtgtggggccagagggtgcccgagccccggtgcgcggccagcctgctgcatccctgccggctgacgtctggagtgaccgtcattccagtgaccacccccatagccacagacggcacgtcagtggaaacgggggtgcagcaggcatgacaccaaggcagagcccgcagcagggggcccggggttccacagctagggaagcttgctcagacaggcagcacacccagggcacggccactcacgcccccgcaccaggagacccatttggaagttagttagggtttgttttgttttctttttaatgtggacttcccctttatttaaattttctttcagtgtacaaattcacaaaactggctacaaaaatttggttgaaaagtaaggctttctgagaatgaaaatctgtacgtctggtcagaacaagctccccacgggcccaggtgcacgtctgcccgtgcaaatccggcctccaccgcgagtaaggcaagagggtatggcaacgaaaatggcaaggctgtggccccagcccctgggccccacgg

SEQ ID NO: 159205 - DNA, 1000 bp, Homo Sapiens
caaaataatttggtttatagtgttcatacgtaacaaaaaaggggaagtattataaatctgattcttgtatacacagggtattggtgtgaagccctccaatcctgggcccaggcaaacaaattcttgaggagcaaaaacctgtttaaccccttcagtattgccctctagtcccaccccccaccccaaaatcagctccctcccacctacagtgggcctccaatggccccagttttttcatcctaaccctcccagcccctgcatgattgcaattttctgttgacagaatcacccaccaggctctgcctgcttccatcattaaaatccccgattcagggtaatccccacccacaccctgtaatactttgccacaggggctctgcacctagagtgttgtgggcacacacccatgttatccccatgttctcctttaggggaagacaaagaggtggcatcagctccttagcatctcaatactgcagctttgccagcactgtcttgagacggttccaggcctggacagatgccacacccatctccagccaacccccaggagcccttactcagctcagctgagggcagaatttcacattttgtttgccctgcataggcaaggaagaaagtaaaggccaggggctggcagaagctggtccagaccaaacatacacgcacgcacgcacgcacgcacacacacacacacatataaatacaaaagtaggggttggggcaagtaccagcacctcagcctagtcggtgcaggtgatagttatgaagctaagtcctaggccaggaacaaggcagccagtccagccagcatagttgacccctctatggactggggccagtgcagccacagcattccagtgctcagcccctcagctgggagatcagcgactgctgccacgtgcccagaaatggctcgtcctttcactacagcggaatgcaatgagggtgggtgagaagatgatgggtcggttatttcattccttttctttttacaact

SEQ ID NO: 159206 - DNA, 1000 bp, Homo Sapiens
gattttaatgaacattttaatgttatgtataacagaacattatgaatataatggaaataaagttttatcaatttaataaaaaaattttcaacataacatggggaggtaataatttgatatctatattatagtatttattttgaaaaatattcccagcttgagggtaaaacaattaattttgcattccaaactctagaatcatgattttcatgtgagcttaatgcagaattacagcagaaaaacaaaaacattttcattaatttcctttgtcattaaatcaataaaatctttgactgctacaggtctcctttaacaatatatatttaactcctctattggaaccatattgctaatgctgcattatatacactcaaaaccaaaacaaaacaaatactgtataaaatctaaaagcaaacattgagttgtaacatttatatttaacttaaggttttaatggatttttacctttgcagacacccaaaaaaaaaataaaataaatatttttctgactgttcctgacttaaatgatggctacagggataaacacggaaggaagccttgccaagttaatcactgcaaattgtaaataatgactgctaaaaacaaacagaagtttttttcttttaaaggaaaccatagagcagtcctgaaaaaaatttcttcctagttctgcacaggataattacagcagaagacatgggaaaagtcccatggcaatcaccaattgcttaaagaggttttgttacaataaaaatttggatagtataatagcagtgttgctggaacattagcaaaagtatatacattccagttacctttgatttagccataatcacatatgtatgcttttttttttcttggacaaaaatatatatttttataaaaaactgatcatccaactttaatgatttcatatatggactcaagagtggtagtaaaaggaacagacccaattatgacaaggcgatccagggacagaaaaatcaagttcctcaggaaa

SEQ ID NO: 159207 - DNA, 1000 bp, Homo Sapiens
ggtttaagagcactttattattgttcttaaggctacttttaagtacaaaaaaagatggcctgccaaacctttttttttcttcttccaggaaaaacaggccacagagaatggtatattacagatttacacacatgaagagaaggtcagagcgcactgcaggcagcgcggctctgggaagaacttcacggagccccttcttagagcagggagggggctttctcagtgaaatgtttggttttctgctgcctcctctgccccaggcccccctccagggtactgcctatcccagataggtcagtgcaccagggacccggccgccagcaccgccgacccctcccagagtgacgcccttgttcactgacaaagagacctgtcccaggagtgtcctccaccgagccggtcagctgtgggtggttttcctgttacgacgctcagtagcctgtagcaataacaaactcgtggctatgaatgcagatgcagtgttctcatagaataactgttcctgcacttttacagacaaatctacgacaaaaaaaaagatcaactttttttttccgaacaacaaaaaaaatgaatgattacaataggaaagggaaaaattaaatagctacatatcattaacaaattaatgttcttcaaaaaatacctacaaatttctctgtacattctttacgcacagcgtaacgatggtctcaaaatcacccatatagaaaagtgttctcaacgatttttcctacagaaaatataggggcctgaatgccaaagcttggaagcccagtacagtgggagtgaaatgtgtgcggggcaaggagaagggcttttctttcctccactcttcaaaggcctgcagccactctgtgactacaagagccagtcctccgaccttttcacccagtgccaatttccaaaattcaacagctaaaaactgtaaaaccgggggtcatacggtgtgcagagtccacaaagccttgcaggtgaggtgaccacgcccacgtcacct

SEQ ID NO: 159208 - DNA, 1000 bp, Homo Sapiens
cttttttaaaaacaaggttttgttacaaaaaacagttctgaacagttaacattgtaaaaaggtataaaaatacagggactctgagcactctgaggaatttcccgacacatgctcttaactaaggcggagagatctctgggaagccgaagtcagggcctgggcctctgacccctgccctgggcctggtccccctcctctttcccacgatcccatgctccagggctgaccagagacaagggctctccccaatcctggctacggctcagcctctcaaggaggaactttaatgatctacagtggctcatcctagaagaggggggctggactgcaggtgttgctgggaagcctctccaggcctggagctggagtacccgtcctcagcactgccagcagagcgcctcctcatcccaccccagcttgaggcccccaagggaccgggctctgggggggggggctgtccaaaagaagggtcctcccctgtcccaggcacaggggtgttctccagatgccagcaggagctcatttctctggggggccggagggtggggagaagggtgctgagctccttcgaagctcctgctgcagctggcccttcagtgtggacacctgctcctccagcccacgcaccctctggcggtgggcccgctcccgagcctccagggtgcgctcagtctgcgcctgggcgctgcgcagccgctccacctcctgctgcagctccagctgctgctgctgcgcatccacctccagctgggccgggctgtggctctgctccagcaccaccacctgcgcctccagctgctggatctgcctctgcgcctctgccagctccagctcagcccccgtgagggtgcggtccaggcggcccttctctgcgctcagccgcactgtgtcctcatggctacgaagcttctcccgctccaccttgtccagcgtcctcctgagggctacacggtccttctccagccgcagggctgagcgctccacctcccgcttctcagct

SEQ ID NO: 159209 - DNA, 1000 bp, Homo Sapiens
ccgaacgtcacggcttttattgggagttgggggtttggggtgccctgtcaggtgatcagaacattaaaaatggactcaacgtaaaataatcttctggacccttctaggacgacatggccgtgaccggtagtgctagaaaccagtcttcgagcccccagtgccacaccatgtccccccacctgcatacctgtggtctccccctgccaggcaccctgtgctgggcacagggacatccctgccaggcctagagggccttgtgtttttaaggcagtcaaatcttgcagcctggttcagtgccagctccaagggctattgggtagctgcaagggtcaattatgcattcctgtgagtcaggtttttccaacccaggcccttgactctgccctgagcttgcagctggatacaaagtgcaaaaaagcttggctccttctgtattctttaaaaacaaaacaacaacaaaaaaaaaactgtaaaaacagcctccatgtccacgcccttcctggcccatcaggtcctggtggcatctcagggtcctgccccccccacccccacccccaccccggctcctgcaggccgaccttattgctgtgctctgggcttgggggcggctgaggtgcccctctgtcctccagcagggcacgagtgacctgagaggcccactcaggcagaagagacgcaagctgggccgtccaactggtttcaactgccagctttaccaatgcagcatttattttaaaattaaattaaattaaaaaaaaaaaagattgcatcaccaggtagttttctcgattaaggaggcagcctgaccagggtgggccgtggccgggcggcagcagcatcacactgggccatttaaggcagctccttctggcggggcatctgtcttcccgtcctttgtcactgtccccagggtggccaccatggctggggctgctgtgactgccatgatgggccctagggggaccgccacggccagtgcagaagagactgctggggtggg

SEQ ID NO: 159210 - DNA, 1000 bp, Homo Sapiens
ttttttttttttttttttttttttttgagcatcaaatttaaaatatctttttttttctctttaaatcattttgccattctccagggtatatcctacggggaagggtaggggacccatggccagccctggctcctactgccatcctcccaagtgaacttagcacagagactggggaggggttgacccccactccagaacaccaatacctctttcaaacatgacagtggagtgaggatcagaggatcagccccctcccgtttcctggcacagaggaaggacagttacacttagaaatatatatataatatatatatatttatatatgtctataaaaatttatcacacttgatcaggactatccccctaccctttcacttgaccccaagggaatagggtcctgccctgggcccattccctgggtcttgctctcttgttgcctctctggccctgagcctgatcagtgtgagacagaactcagcattactgtccaccatgccctgcagcgaacagaccaggtgctgaagagtgatgcctatgggctctgacacccacaaatcctcgtggataacgggaagcccctcccaccccacaagtccctggagcctgagccagagtcagatcctgtactgcagccactcgaatcgccaaatcatttgcgcctgccaaagatggacttcttgccagggttcttgtcgcccacacttaaaccaatgaggagccgggctttctcctcctcttcctgctgttgcatgttcaggtccgatttagtttctagctttccccggacctcagagcctgttgcagacttcagccttagcttctctttgattacctgggcaaccagggctttgcggctgtcccttttgacagccatggcaaagtctagccatgtccatgtgttgttgtggtactccagacagggcagcaccaggttaaggtcaccccagtccacactgttcttctcacccttgtagctgacacacagtggaacctgtggaat

SEQ ID NO: 159211 - DNA, 1000 bp, Homo Sapiens
cgttatcaatttttatttcctaccatacaccaaatgtacagcactgaacacaattttgttgctttgatgtaagaaatattaagtgtttggagaaacagtatacaaacaaactacctcaaattaaaaaaaatgcatacatcattgcctttttgtttacaaaagacccaatttacagtattgatcattaacatagttgaaaagaaaacaaattcagtgcacattacaaaacacatcaagtacaaagtaggcaaataaatacaaacatacttcacaaaacatcctgctcaaactatgcaaacacaaataaattaacctgaagtcatagcaaattatagtaataaatatgtaggttggtaagagatttcttttaaattaaataaaatatataacaaacttgttaaaatatttagcaaattaaacgtttgtctttgtaataagtgagctcatttgtatgcatctatgaagtactgtatagcaaaatgtttgcaagtacacaactgtaatagaaaattttgtttggtgtcccatttataatagacagcacatatggtagctcattttttaaaactgatttttaaataaacaccgtttctacctaagaacagacagttcatcttcactaaactaaggttcaagagttcaaatgaactccaaaccaaagataagccccacttaatgcataacaatgaccaaagtttcatgggagtggaattactgttgagtattgtttttcatttgtgcaggtaacagtaataacagtggaatacatcaagcctgtgaatgccatcactttccatctaaatatccatgaggttaataaaaaataaacacttttgtttatagcacagaaaattaagcccacatgaagttcatgtgtacatttacacagaggcacgtctgcacatgaaatgtgtgtgcacaccaaaaaggcagtttagctggttgtctataccttttccttaaaaaaaataaatataaaaaaacttttgaaacaatgctt

SEQ ID NO: 159212 - DNA, 1000 bp, Homo Sapiens; identical to SEQ ID NO: 157532

SEQ ID NO: 159213 - DNA, 1000 bp, Homo Sapiens
ttttttttttttttttttttttgtgcagtaacagctttaatctgtggtggcccctgccctcctgcatccaggcaggaagagccgtttctcggggaattaaagcaggagcgtttcccacactgtctcctgggagtccatgcttacagtgacagcactgctgagtggtgccatgtcaccagggctgggcctgggcacagagaggcagggtgccagtctttatatattatacatatatatatatatatatatatatatatttcatgtgtatacacagttttctcttgaaagtattaaaaaattgatcaaccttcaatctataaaaaatacctactctacatgatagaaaaatctctcctccaagtttacactgatttacacccaaggctttccccaaatgtacaataggaggcgacctcttacatcctagcgtggaaggcggcggatgtggggccacacgtacacgcgcgcgcacacacacgcagcgggtggccagtcttggtgatggggtctgggcccacccgggaatgctgggggttggggcaggcccgcggtcctgcggggtgacaccgctgtgcctggggtgcagaccccgagaagcacaggccccctcctgctctgctgtgagtcttccctgccctctccctcctgcaacatgcaccctcggggaagaaccacgatttctaagtgagacacacccagaagaaaacagggttcccgatgtttggattctggcctgggaagtgcgtggggagggtgtggcctttaggaggccgggccaggccgcacctgtggagaagcagcacctgggagccagaggggcctgtggcatccaccctgcccagggagagagcgccacacagcggtcatctcaggtcctgatgtcggagtggaggccccagaggctcctgcccggcccccataggtggtcagagcccccaggggttactgcagcgaggactgggccgtgggaacagccacatggcctggaggccccagagct

SEQ ID NO: 159214 - DNA, 1000 bp, Homo Sapiens
gacatgttaagcatgtttatttatttgcctgtttttgtttttttacttgagctgtggtcacagctgccaggtacctaagcaagtcagttgggtacagcaggacacgccaccattccagggtagctggtaccgccagaaacaggagtgggtcttgtcctgttgcaggcacactgcagtggttttcctgcagctctccaacaaacgcctgagtcacaggccagagctgccttggtatgttgttaagtccaaaacttcttctctgggctacctatcttccttcatgaagcaggtgctcaggacccggaagaatcatctacctcccagctttgtgagacagaaccaagtaaaaggaaacatgctagaaaacgtgcctagagaagacacttcaacctttgccttatccaacccctcttcagagaaaggtgtcccatggccccaaaaagaactgccaagttttggtgaggagtaacaccctggcatgacattccttctctttcctggccctcaaccacttccttcctttggctcttaagacctagcaggttctgtgaactctcaggccttggccagcactagttaggggaggtcaggtggtcaatgtcctggtgattttatgagactgccccactgagaaaacttacttacttcaggcatccagtgcccccacccagggttcaggccctgtctaaggtgttgcttaaagacaaaaaggcaacatgtgcctcactggtggtgtgccactgttctcatgctgcctcctaagtgactccgattttcagccctggtagaataaggaagacagctgatgcctccttagccccttagcacatgttcctaaggtgtgttgtcaagccaacctgaattctgcctccctgttatagtccctgtctcccccacagagacctgtgggtgctcccagcagagttgagactggctccgttgagttaatgactagaatatagtgctttcactacttgattgttaacctgttttcttctga

SEQ ID NO: 159215 - DNA, 1000 bp, Homo Sapiens
agtgatctttttattatattaatatactctgggtgaattaacccttaagccctaaaacgacaacaaaaatatattacttagatattttgtaattctggtacttgaaataaagacaaatagaaaactatgttaaaatattaaaaagttgcaaaatttcattaaaaacatttacatttgtatcctaatgccaatttatacatacaattcttttaagttagatttaatggaatatcttaacatatgaaaataatagaaataaatattaaatattcagaacatactcatgagtgaaaattcaattaattagtattcctaatttagatatttatttatgaatgaccaagggattttacagttcctttttaattttttgtacttgattcttggtcccttaacaatgtataaccctgtaaaactctcaatagccactaatcactggtaggatcatttcaacaaaaacacatgattgggccgggcgcggtggctcatgcctgtaattccagcactttgggaggcggaggtgggtggatcacaaggtcaggagtttgagaccagcctggccaatatggtgaaaccccgtctctactaaaaatacaaaaaaattagccaggcgtggtgacacacgcctgtaatcccagctactcgggaggctgaggcaggagaattgctcgaacccgggaggcggaggttgcagggggccaagatcgcgccactgcactccagcctaggcaacagagcaagactccgtctcaaaccccaccacccccgcaaaacaaaaacaaaaacaaaaaaacaacaaaaaaaccccctgtaactaacaaaagaggaacctgttttaaatgaacccgtttgcttgtcaatcactaaaaatgaagtctttttataagtattttctttaagttacaatatatagaaggcatgtgtatatgtgtgtgtatatatatatatatttcttaaaagtgttgattggtgagaaaagaataattccttggttaacttt

SEQ ID NO: 159216 - DNA, 1000 bp, Homo Sapiens
tcaagaagcagcttggtttcctttgccagatatccttgtgacgacatggattgtagattcaatggtcctacacagggtatctaaaatgtcatgttgctgcatatgactaaagagtcctctggaatggccacaactgagagataaagcaacctcagggtcctgggagggcaaagcttggccatcacagcttctcaagtcagctaagtcagacagaactgcagagatagaagtagaagggaactcagattcttcctcagctagggtagaatccttggaacagtggaggtctttaaattctttacaatcgtcatatctaccattgttggactgttcttctgcatgctgtgacctgatatttgacatgtcttctgaaaacgaagatggaacttccattcggtattctttaacagaactattttcaggggaaggaagatcttgctcagttcctggatcaataattgaggagtctctggtctcattgtcagaagtgctcgttggggtcaggacctccctggtttctgttttcatgtcactgatgcagctgtctacagtgtgctcctcatcactgctaacacgccgccttttaatgggagttgctccttcatcatctttagtttttctttctttggcttcttgctcttggagtgagtttctctgttgcagacaagtcctgcatttgcttaaaagctcttgcagagttggaattagagctgggtttaactgtttgggagtgtgtactgacaggagcaaagcgagtgccctcaggtccccatttaaagaagcacttgctttggaaatttcaactcggttggagaaatcagactgtaggttctgatactggcttatcaagtttgtaataagagtgctgatcaaattggcacagtttgcttcagaaaacacttgactttgaacctttagaaggaaatgtgtcatgaacgtgtagacaatgttgttgtttaaaaaagttctttcatccattaggatacatttaatatattct

SEQ ID NO: 159217 - DNA, 1000 bp, Homo Sapiens
tttttttttttttttgagcgaagcacggaggctttaatggcagagggcccggtggcggggaagggaggcaggcgcgggccccgtgggcctcgggtcacagcgtgtggaggtcatgactgcgacggctcagcttctccgggtcgtctgacgccatgagggagaagtcgcggaagatgtcaagatacgtctcatctcctgcctgcccctgggccgcttcagcctccctcatctttgccagtcgtagcagggtgacgatgtcagcgttggctgtttccatggcgatggtcagagggtccctgccttcagagtctcgagcccccagatcagctccccgtttcaggaacaggcaggcgagccccgtgtggccaagaatggttgcgtggtgcagcgggccccggcccgcactgtccgcttggttcacgttcgccccgttctggaggagaaactcacaggccagaagagaattagcagctgtggcctggatcagcggtgtggcattatcttggcccccattgacccagttgacatcagctccatgggcaagggcatcagccatggtgggaagagatggaggatgcccagacgctcgaaacagtagggccccagggtgcaggcttcccaggtcctcagaggggggctctggcttggatctcaagctccctggccggggcctgatggaaggctttgggggcacaggaggctgcccccttgggcgcccccggccacctcttcgccctcgaatctcaggcagcttggtcaggaacttcttctccacgtatttagcgtgaatccaggcctccttctcctgccgggagcagctgggccctggtttcttcactgccatggcctccacgcgggcctcatagatctggttgatgatgacatttcccagctcacacatgagcttcactagttctggctcccatgagtcaagggtcagagaccggactttggagaagtgaacaccaaggctcctgtggatgccggaacactgaatgca

SEQ ID NO: 159218 - DNA, 1000 bp, Homo Sapiens
ctatctatttctttttgctctttatctggagagattccctcaactttattttccagactgtataccaaatacttttagcagtcttattttattttcaaagagatcttcttattctcagtcttctctttcttttcttgctttttaagagacagggtctcactctgtcccccaggctggagtgcagtggcaccatcatggctcactgaagccttgaactcctgggctcaagtgatcttcccacttcagcctcccaagtagctaggaccacaggcacatgccaccatgcttggctaatttttaaaaattattttgtagagacgggatgttgccatcttgcctaggctggtcttgaactcctgagttttccgtttctttgtagtatcctgtttttcatcttaaatacacctcaaatctctctggagatggaattaaaattaagttattctttccacattgtctttgtttccctcagagtttgtcatattttcaaggcccctaattctacctcgtaacttttcttattcctcttccctccccatcgcccatgtctgggaatttctaactcaccattcccatttaagaatcaacataactgttaacttgtataacagttggcatgggtttcctctgctgttgtacagttaggtctgtttcttcaggaaacctcttctatacctgaaggcaacaggcacttgagtaggaggtctcagctgtcagtagagaattagctgaccggctgggggtaggggcacttatttccactagaagagaaatttttttctggagcaccaactcttatctctctgcaagcagcctgttcaattcctttatacaaacaacaacagcaacaataacaagaaatttttaactggtatcaatagtggagactgcctgtgttctgtgcataagagttgggggagagtaggagagggctcaatcttacaactggagtaattcttcagtagacaagcttttcaggtgcgcaagtctctttggggtt

SEQ ID NO: 159219 - DNA, 1000 bp, Homo Sapiens
tttttttttttttttttttttagtcttcacaatgtttattatgtgttatctataagaaaaaatatcagtcattatctgtcaataggctatacatgaagtatatttttctatcttaaaaaaaacagccgggcatggtggctcatgcctgtaatccctgaactttgggaggccaaggtgggcagatcacaaggtcaggagttcgagaccagcctggccaacatggtgaaaccccgtctctactaaaaatacaaaaattagctgggaatggtggcaagtgcctgtaatcccagctactcgggagactgagacaggagaatcacttgaacctgggaggcggaggttgcagtgagccgagatcgtgccattgcactccagcctgggcgacaggagcaagactccatctcaaaaaaataaagaaaataaagaagccaagctagaaaaatatactctctgaagggacacctacacggtcttgtgttggagaatataaaggtagtctcaaatttacagaaattcccagcaatttaataatatagttcctttcactgcatttactgaaacatgatatatgtgatttttatgtcctagggtaccaatacaagcctactcagaccaaaaagaaaataatatatatatatttacaacaaacagtagacgataatactattgtgtatacttgctgaatgaattaaagatatgagatgagactagagcaggcatgaagaaaaaatacctgtctcccaaaacagagataatcatccaggagacagatcacaaatccagagatgcaacttatttcaaaagtcctggttgcttacacatatagacccctctggaagggaaaaataacttctaacatttccttttcttgatctaagaaactaatttaatgtttttactggctaaaatgagcaatttagactacccattccccatacaacttgcccacttacattaattatattaacttttcaatactgtggaggctcccttgttgagg

SEQ ID NO: 159220 - DNA, 1000 bp, Homo Sapiens
ttttaacaggttgccattttattgaatatctgcgacactttacattgttcaggaagtagctacttccagaaggctgatattctcctccaaattgtctttggctaagtactacagatgtgattcagtccaaactatatgcccaaactgattaaaattctcagtctctcctagcttgagacctcagatcctgagttataactttgacttgatcttcaagttgagatgcttcataaatatttttcttaaaacagggctatttaacataatttctttttcttgaaatatatgagtgtttttgatacaaaaacatatattacacatgagaatgtttaaagcatcaaaataatgattaaattttttacataacttaaatgacaggactacaatatgccccccacttttttgctgtttgaagtaaagaggaaagctctgtaacaatttcaaatacataggatttaacttatgttaatatcctgttataaaaaataactaccatataaagaatttaaaatatgcaaaagtaattagttcatttaaatttatacttatacaccggtgtcaatgaaaatatgcgaagttgccaagaaatttctaaggattaaagtggaagtaaaaaaacctgtttcaggcttcatttattgctacataatgactacttcaagggtcatctggcccgtcgtcagtcactcttagaagtggtaaatacagtggtatagtttggaaggaaaggaggaaaaaaataatgcattgtgatacaaaaatattacctacatataaattattaaagatttataaaacattcagaatatgttcttgctataaaaacaatatacttaaatatagaagcaaaaagtcctgaagcacccgcaattattttaatatccatttaatcagggaaaactatatatgtggatatataatacatacatatgtaataatttgagaagaaaaaaggcaaaattctgattataatccaaaaagagtttatctaattatggag

SEQ ID NO: 159221 - DNA, 1000 bp, Homo Sapiens
ttttttttttttttttccttagcaattgacacattttaatacaaaccagtctacattcattcctaaaaggctcatttccagtaaaaaatatacaccagtagaaacttctcccagaactggggcagaggctgaggagacctgggccagattccccaagactgacaggcagccagcttgagccaggcacaggaagaggctccagggcgaagcgggggccctgctccatcttcaggttcaggcgggagactcccccacagagggagggaggggaggcactcggggccacatccaggcaagcaccacccccctgccctccacggcagccttgggagttggacgcgtcggccaaggctgctgctgttgctcctccaaagaaggttggcttcaaggccgtgtccagggacccacgagcagaggcactggggggcaagggatctccaagggggcaagggatccctaaagggggtagctcacaggtgagggggtttaggccccctctagggagcgcctgaggccatacattcaagagtgtccctggtgaggcccagggaagagccaggactggccaagggcccaggccgtcagctcctccacagtgagccccagggctcaggaagacagcggggtctgacacggggagctgggtttccagtgccacgggtgcaggagcaaacctggaaacattcatgatacaaactcccctgttcagaaatgggtctggctttagccccagggacgggggcaactacagccaccacagccagtggctcagaagggagagttcatgcccagcttagtttcaaactgcagcttctgtcgcttctggtagcggactcggacccgaatctcatgtagcttcacgatctcattggtcaccaccacaaggaccagggacaggcagcccaggagccatgtcagcaggggcacgtcctccaggccaaagtggacgtggctgtccctgtgtgtccacagctgcaggtccacagccgtctggaccacc

SEQ ID NO: 159222 - DNA, 1000 bp, Homo Sapiens
attacttgtgacattttattggcgtatgacaatttacaagggtccctgttgcatcattatacatcacactgagtaagaatcgtttagccatctacattcaatgttactgggtaatatttttctcaaattataattcccaacactgattttacctgtgacaaaaggaacaatagtaattccttgaagaagactaactggaaaaaacattttgcttttagtataaaaattcctaggatgctgaaaggtacacatacacacctaaagagtcatggccttcttaaacagctttcttaatcctttctggaaatatcctttggttcatttttattgcccctctctaggcaaaacaaagtatgttaacgcaggtatcagtgagttatttcctagcacttgtaagcaaatatccttaccaagaggaaccattcaacttttataatatcgtaaagcgtggagttaagatgtgtttttaaaaaatatacaggctttttatatgcttggatctgaaaaaggtaacatccacaatgacattctattacagagttcttacaatcaccctagcctactacactctggtataatactctttcttcaattctgtttaacagaataaaagtaaccaaaggttaaagcaatgcatttgaacttaaaatataacctgcccacaggaattaagtagttttattcccactccctattacataatttctcagatccccttttacctattgtcttaagtggataagcacatagtcatgcacacagatttgatgtctaaccaagtaactgttatggtatttatttgtatacaataaaagggtcatgaaaattctgtgttgggaatcacatccatgttgctttcacacgtaaataagtattattctgaacaggagaatattagttatgccctgattaatgcaatacatacttcctttggcaggtatttcctctgctttaatagacaattttagaaagacatgttaacgggggaaaatcacacaat

SEQ ID NO: 159223 - DNA, 1000 bp, Homo Sapiens
ttttttttttttttttttttttttttttttttttaaagtacagaaaaaaatttattggaaatcccttgaatacattttgaagtgtagctcggtatttccaaacaaagtaggttggagaggttggaggaggaggagggactctgacacctggagacaaacagctggtcccagcctgtcccgggggtgctgcaggagtcagtctagggctcattcctttcatggcaggtctgaggggcaagggctggccttaacagttgctttacttctcccaagctcagctcaaagtcatggctgagactcttcacagatggagccctggtgaaaggctgctgccacctgtagatgccaaagattgctgcctcagacaatggctaggcctttccatgcaaggccttggaaagagagcagtagctgaaatatgggggcatcaataacttaccaggggccttcccccttctcaaagctggggccttggggataaacctgagcctgggttcagcaagccacgcatgtgctctgggccaaagtcaggagggccagttggctgctactgcttctgctaacacttcttggtggcagcagcagcacgcagagctctggtccccgccagagcctgctccaatcctcagaagtcagccttgtatgtgggaacagtgtcacatgcagtatactaacaagcagctgagaaccacctgctccactgaagcacagctgctgccagtgaatgccccaggtgggccaggaggaatggagtagacctagatctccttgaccaggactaccagcgaggctgggaaaggacagatcataggtgggtgaggctaggcacttgacttattcaagtaacaatacctgaagggttaagtcaatcatacgcccagctttgatttctcaaccagaagccaatccagctggtaaaccccagggcagtgtagagaacctgggattagagggagatggtagctaggcccaagcaggaggaaaagctccacaggacagc

SEQ ID NO: 159224 - DNA, 1000 bp, Homo Sapiens
ttttttttttttttttttacaaaagtcacctgtattccagccaaaatagctttaaaaaggaatccctgctaaagggggggacaaactacgtaagacacaatacatttaaaatatgtattgaaattacaaatcaaactttttccatatgattccagagtacaaaacacaacattaaaaggcattcaaacagctcttttatacatcacagtgttagtggcacaaaatgtactgacatttcaaaaacacaaatcaaatctgttttgattttgtttcaccaccacttgtcaaatacataacgtatacatgtgcatgactcattcatgcatatttttatacaagattaaaatacacccatagtaaagtgagcaaagaaggaaagaaagggcaggcatggggcatgtagctacccctcactgaaggctccggaactgtggaagacagaattgcacaaatcaaaggaagggtggagaccctgggttttttaaacatcaagacggcatgctctcctagttgtgaagcattagcaattaggttttaacgcaggcccctttgttccttttggtgtttttggtaatacctgtcataatcccttcattttgtttattttcataagggcttaggttaattatcagaaataaacaagctttggtattttttaaagagaacttcatgaagctttacacatgcaaaatgttttcccttgatgatctccttgtgatttatatatatacacaggtgtgctcactaataaatgagaatctgagacacacacacaaagcccatcctggatcctttcaatcccctaatttttaaagactaccaagaaaaaaatgtttttttaatttgtaaaatgacttctaacttttgcaatacaaatgaaaacaataaactcatcttgaagtaatttttgcatctctgatagtccctcccacaggtcctgtgttctaatcaggaactggcctgtgccctaaactggttttatggaataatatgttgtcaa

SEQ ID NO: 159225 - DNA, 1000 bp, Homo Sapiens
caaggcacagtacattttttattctgtgttgaaaatgtacaaaatatccccacttcccttgagaaagagtatatctaaaatacactttgatgaacacagaatattaaaacattatatgctatagaagtgaacacaaatacattttctccaaaatttcaatagtctaaggaatatataagcattgataatatgaaggaaaatgtttggatttatttttaaattcaaaattctcctggttgtagaggtgaaaaagtaatcaggttaccaccaaaagaaatgtgtctggcatgttcttgatgtctcctctccagctgagtaaatggattactgcagtttagacctggtgaatcaagaaggtggcattcagtagtgagacttttattatcaaatagttctgactgagaaattttagtttccccttcttctaagatgctattttgtgaagctgtatttttttcagggctactcatcaaaacatcctgtgatgtaattgaagaattcagttccattccttccacaacatctgaaattccttcttttttgttagtattaatatcatctgctactccaccagcaagaagaggcaaactcattctctcactggataaacaatccaccttcaagtctgtcttatttacaacatggttttcttcaattaaatctggtaatccaggacactgagcatcttctatgctgctcctgctttcaggaatactcaaaaacaaagtcttcttcacatgttcacttttcgtattctgaggaccggcattttctggtgatgtagtttgttgtggaatgcccatctcatttctactctgagatacagctttgttgacagacttaggtgttccaagtctttgagaagggccttcagaagagacagaaagtcctgagaataatttaacaggactttcaactctgaaaaatccagcatcgaacactattttatcaacttcctttggtatcacagaaactgctgtttcagcacattcttcctgcc

SEQ ID NO: 159226 - DNA, 1000 bp, Homo Sapiens
aggctttaaagtgaatcgtttttatttaaaacagggatccatcagacgtggtgaactatcaaggtcaaggttctagagcatggcacagatgaaaggtaatactcaccagcacctcacatgggactcagtgacaatgtcagcaacacaccatggaaggagaacaaacccgatgtaaaaggcaccaagctggggagaagctgtggtgttcactgcctctctagcaggtttgcttttgtgcactgtggctaagtctggatgaataatattgggaagggaataatcggaagcgaggctcctatgcaggcagctaccctctcctgattggtgtatactcgccatgtggtaggaggtcttacaggagactgaggttaccaaacaggaatacaacacttctctcccttttctgctctagaaggaaggggaacccttcccccagtatcaatttcagcagcggcttctaaaggctgttaaaaagcatcctaacttaaaaacaaataacaacagtaaccaaataaaagacagaaaagtggcctgaacttaaatcaatcaatggaaaggtagattcataaaaataaaataaaaactggtgaccagtccattaaccatggggttaatgcctcgtctgaaggaagatgtttacgctgcatccacgatccagcaggcgcggagctgctcttggcaactgtgaatgaatagctaccgtttcccttcaacacaccgcgctgccaccggtgaccgcatgtcaagtgctgaagttagaagagaccccacgttggcaaaggccccccaggcgatgatctgcctgacgcggccaggtctgtgggaaacaagacttacgatctcaaataatgacccccaagtgccctcgcctcttcctgcttgccctgtgcgcctcgacctcctcacggggagttccaaatgagttccatttccctctcagttctaggcactctggaacatctttgattaaccagggtttttcatttctttccaacgccat

SEQ ID NO: 159227 - DNA, 1000 bp, Homo Sapiens
cagatttaggaatttattttccatttaggttttattaagtctaatccaacaatgcaaaaatgaaactgtgagttatatgtgatgaaaaagtatagctttcttgaattcaaataagcaatggcaaagatcacatttagaatttgacagaaagaacacagcatccctgcctcgtcttttttatagatagtaagaaaagggaaagtagtcttatttcaaatatcaaaattctgacttaaatgaataaaatttagtcacgagtaaatacaaaaaacaagcaaacaataaaaccttcctggatcagcacaggcccaattcttccctgccttttatcaccctgtcagctgggagtatcttttccagctacctgtggctctccaccaattgttactctcttgttgtctgaacctgctagccaaacttggcaggtcgttttcaaagccagatgagttctgattgttcccttggcaatatccattatttccctcctgggtagaaggaggatctgaggacagcttatctttttggggtacgtggagtagaggtggggactcttatataatacgaaataaaaataagttctttgggctggaagtgtcaaaagattccttagaatttatagccacagggatttcatggtgtgtctgatgtactgattttgtgccacatttgagccagaactggcagcagattcaaagcaacacaggtggctaagtacacatgaggggaaggtatggggagagaaaagtggcataaaacaaggctgtccccctatgctcatcgagaataggatcttagccctcactgaaggagcttaatgatcagctctaatacattggctggactcctgcaggtactcacggaaagtagagatgctgagctaccttttcttgtcaaagtctagggctggagatgcttcaagaactttggagccataaagtcactgtaatggtcaacttttaaggctagaagaggccatgagacatctcattcatctccttgc

SEQ ID NO: 159228 - DNA, 1000 bp, Homo Sapiens
tttttttttttttttttttttttggctagaggatccatcactttattttcagaaaaagatggccaaagaggggaaaaaatacagaggcattcccacagcacagtgaaaacaattagccatccaaaaagctgaatcaaaaacaatgccaatcagctttcacgcccacacaggtgaggtttcactgtgcaacagcacataaatgataatctaaatcctagagagaaaagtagatagcaccttgtgcttttccttggcaggtggatggcacaggcttggagacttccatgtcatctccgcttttcctcctctaacacagggctggttggtttcacctgcaggcactactgacttcagggcttgctggagaggagatggttgtgctgcagttcacttggtgactataaacactttgatatgctcggcagtcccccaagtcttccaagcaggaaatcaggtcccccccgacttcccacatgggccaatctgcagcacagacaacataacagcacagctaatccgtgaagacggacagtgaatcaaggctgagttccaggccagtgacttgtgtaccaggggcaagatggaaatgccagataggaaatattaaatccattccattttagctcacaaggctcaaatgcgccttccaaaaacacctagaggaatttaggattccataagggatgtattttacaatttaagcctccaagaccacagacgagggactccaggtgatctatccacctcactgcagatcagggtgaaggatcctttgaaacaaagtacagtctcctctcacttaaccctggaccattagaacctctagggcctgtaacgagtatacctttacaaggcaccagcaggcggcagagcagagctcaggacttgagatgactcagttgctcaaaaggtgaaggagaggctctcacttctaaaacgcagaaagacaggacacaggagaggcaaagccaagggggcacccaggagatgcgggagaagg

SEQ ID NO: 159229 - DNA, 1000 bp, Homo Sapiens
ttttttttttttttttttgccagcttccaggccacttttatttaaacagaagcagcggccccacagccacggggacatgtcttccagacagtagacacagtgcctgtggctgtaagagcctgacagggaagattcatgcctttctccttggcccccatgaccaaagaagaaaataaaaatcacacaccatacactgccacacccatctccacccctccctttcagtaatatccaagtattcatccttctggccaaagaaactggctacaattctgattctaaagaaaaccttcatgcagccaagaaactcagggctctggaggggagagccttactctgatactttccacatgcactgcccactggcatcaagtttaactccatccaaaaccatcacatggatggccagggacaggactggctacaaaaaaaagccatgaactcagctcaccatgctaagaagactgcctctttccaggcaagattttactggagcaacataaccggagggtgtgattccaaaataccttcctttccaagccccgggttgtggataaggtctggattttggttatatgactaagggcgacagaggctgctggcatctctggccaccgtcccagtggcttagggttggaggcttcactggcaaaacaatggcactgtttaactagctcgtgttaaccattcatctacagcaagtagaatcatcagttttgcactgagcaaggaagcacatgggtctcctatgagagctaatgccagaattcacatgctttgtaaaatataggatgaggtttctttctttcttctgccccctccagaggccaaatgggtagggtggttcctttgccttctgagtgcctggatgcccccagccctcacaagaccctgctaagacactggcagtgtgccaagccttgggtgggatgggtgaacacccttcaatgactctgagaggattctggcacctggaatgacaagacagatgcttccctgc

SEQ ID NO: 159230 - DNA, 1000 bp, Homo Sapiens
tcttattaaatgttttatttcttaacattcctacatattaataaatgttctatttcttaacctgatagtgggtacatgaatgtttattattctgtaaatcatattgtgcttatgaattgtttcacaattaaaaaaaaaattcatcccacctattccctttgctcaggttccatgctcattaaagaccattctggtgatgctctgacttctattgtagctttgcctccaataagcaaatggacattggtccatttggcatgtgtaattctctttttagagtaataaactggtgtacaagttttattttagaaaaaaagtattaataaaacaatgaatgcttagttcacttaattactatgttcttataaatgaaattaaattggtctcaaaatatatcctcttagagccaatgtatcttctgcaactaaccaaattcattctcagaatcaagaccttttcgacgcttcaatttccttccatattgcagcttcaatttttgaagtatcatattccctcatcatatcaaattcaagccatggctgattccacttctgagcttctttcatttgctgttcagttaaacaaagatcaaatctgattcctttaatattaaaatttggacgttcccagcgtttagaccagggcttaggcttcatttttactttcagctcattaacaggaactttttggttaggctcttgtactactggcttcatattcacatcaaaagtgctatattcaggaagggcatctcgtaagtatagcaagctatcatccagccgtttctctaatttgaccacctgaatctcctggacccgaggattataaagttcaaagcaaatctcgacaccttgtccttcgataacattcctaaggatgaaagtagctccaagtcctcttcctgatctctgaatgcaaatccccagaaactggctgatttttccactggcatatgggtcagctgtagtaacacgaagaatacttccaacatagaactctg

SEQ ID NO: 159231 - DNA, 1000 bp, Homo Sapiens
ggtgtttataaagtttttattttccattttcttaaaaataacatttgatttcctttatgcatgtgtggagtgtacttgtttccttaggctgagtaataggcagataaagacgacacgaggcagggtccccaagtggaggcagggcgggacgtgagaggatgggggcgcaggggaaaggcagggctggatgactcacgggactcttgagtgcccatcaacgcacacgcacacagtctaacactttgtttttcaattttttaaaagacatctaaaattactgagagatacaatttcagcagttaaatctacagacggaaatccaagcacttgaacacaattcctaactctaagctcagttattgcacatcacacagtttaagcaggcttcaggctggaaagcagtttgctctgctgggaacttcctcgggatgtctgggtctccttctgtggtgtctctcccctgggactgccgccagcccgcagcctctcgacgaccccaggtatcaaagctcagccatttgttctccccaggggctgagggctcgggctttggtgaagcagagggtccccgtgttgatgccaacggaccccaccccctccaaagtgaagttggaagcaggtgaagctcatggaaggctgaaggcaggcgggctggagtgaaggggggtgaccaccccccacgtgtgggacaacagggggcagtcaagatgccgccacccaccacccctcccttccaagctcccaggccatgcttccttctccatcacccttggaccctctctgagtggtctctcaaggcacatttattttctctgctgcaacctaccagatctgacatccacctcccccagcacccatgggccaaggaggcctggggcagccaaggggagttccaggaccaagcaagcaagaaaccgttctttgaacacatggttaagcttcttccagcatggccctaattcccctacctgcctaagccaggggagtgggggcaggaagg

SEQ ID NO: 159232 - DNA, 1000 bp, Homo Sapiens
tcctctttaattgctgttgaagaagattcacaccactgcctccaaggagatgggggggcatttcccccttgcccccacctctctcccctccccaattacctggtcctttgcaaactattttagccagaaaaaaaaaaaaaaaaaaagaccggaaaccactgacacagacagcccaagggctgggttggctgagggaggcagggctgggccaggtaagtccgccctatcacccagtttgtggggaaggggcagggggcctggaaaccctcccagccacctcgaatcctctcagccctggctgggagaggtcacgggggtgaggaatggctctggagctgctccagtgggagggaggggctggacagaaagaataatgggggaggggtcccactgtaggggtgccccctaccccagatcaccacgggcgctgcacagtcacaggtacgcagtcacggtcacagacacaacccgagagcacccccaccccaacccaccccctgcccaccctgggcttcccctaccccaaaacgccctccccacgcccctgcccgcccccatccccatgttggggaacaaagcaataaattacaaggcccccgcagccctcttagcccgctcctgctccatcccttctccctcccaagatagtagtgggagggacccaggctcttggttccccccggactctttagcttccacccatgggtaggtgtaggggacgtcctggtttccactactcacggtccctttcacggaaagggttgggaacccccacccccatgagcagcaggggtcctgcccctcgctgcccttgcccccttcactgggcagtgagatgagcatggaaggggtagggtttccgtattggccccaagtcccggggctagccctcccatgtactaaaccctccctctggcgtggcgtcgccccaggagccagcctgggtatgggctcccgccctgggattgttgagctcgggcaggaccgggtcttctttccg

SEQ ID NO: 159233 - DNA, 1000 bp, Homo Sapiens
ttttttttttttttttttgagataatccaatatctgttttattaaacacctagacatttctggcacatgtttcccaaatggggacctcaaaatctatactctccagctttaagactcctagcattcaatctacatttactctcccatgggtaggacagtcataatgctttcacataaaattgcagtatgaactgatggacaagaactctgggccaggagtcaggaggcccaggtcctcaccctggcccagcgactcataaagtcatgcaaccatgagcatcactgcctcctgggccaaagtgagcacaaaggtcctctctgtggtgaaatgcccttgcatttgtcttctaaggtaggagggcagacaccattgcctttggtctacaactgaggaaacaatatagggagtcaggtcacagcttcaaggtgacatggccaggcaagtggcagagccagacctgggtcttcacacactttcctcttcttgactgtactggcgcaggtgcttaagatttgggggaaggtgggtgggtatctggcctcttctttgggactcaaattgtgatatctctctgagaacccacaggctccctctttagggctgaggtgagaagttctgaaagtcaagcagacacatccaggcatttgggcaagaaacttcttccttccaaatcaaaggtgaaatgaaaacgattatgagcccacgggggatgaacagaggtgaatggtgggctagtctcgaggatggcctaattcagagtttcctaagtgtcagccattcatggaaccacccctgtgatttttgctacctctctggatctgtgcccacttttacgttatgtttttctttaaactgattcactatttttttttacagttagctttatcctagacagaacatctatcaaactacaggtcaatatgctaatcatatttttatattatacattaaatatataactaaatagaaaatattaatttgaataccatctaaaatctt

SEQ ID NO: 159234 - DNA, 1000 bp, Homo Sapiens
gagagaaaaaagaaatttttttatttagctaaattaaaatggctgtgttacttatttgaaatatgcaaagctcaaatcaagtcatggaaaccctgaattctccctaaacagaaccaaaattgcttatacattaccaaaatagcttcactaaaacaaagtagatttaaatttcttaatatgagaaaacaacaaggtaggttaggttcgtataacaaacaatacacgctctataaagtctcaggaatacccaaatgtgttctggtttggatatgaaagagggaccacttctagctggtgttggtaagcaagccaatgaggtgtgcagcaaacaaaacctgtcactaaaaacaactcaacaggccattatgagtatgagcccatcacagccaaaatcctcaactgtgaccggcaggaccagcaagggggggtgttgaaggggttatgaacagcaaccataaagaaaggaatctccaacagaagggacaatggccagcagtaggtgaagggaacccattcttcagctctgttgcatcatacacattcctgagggtcaggcacctctgccttttagatgacaccacagtcatctagaagtcaggttttctcttcttttggttcttctttttatatgctacctttttgcctctctgatttatggggaggctcttttagtaaacattatacaagatagtacaaggcaaaagaaaacaaggaccaagaagcagtgctttgagtaacttaggaaagcagcagtaggagctgccagactgaaaaggtaaaagggtttaaaaccaaaaccaaaaccaaactcactatccagtcttcctctcagagatgagatatggctggtgaggcttgactacagctaaatacaagtcacaggctcagtaagttaagacaacatacaaataaaagtcccaaattcacactaaataataggcttatgggatgcttaagccagtgagtctgctcaactcagaagaaaggagttcaagatacc

SEQ ID NO: 159235 - DNA, 1000 bp, Homo Sapiens
ttttttttttttttttttttttttttttttgtcagttgaaacatacaactttattgatgatacacaaatgaagtctttggtggataaattcaagtcaaaacaaataatagaacagtaggccattcataatggacaggtttactgtcaattcagaagaaccagtaaaaatatttctatccaagcagcacgattaaagtcacaaatatgttttcagtacaagaggtctatttatttggtattcataaaatggttcagcttaaagctggtgactgtcacagataacatcactctggatgatacattattcaacactggcagctgaaaggatccctttactatatgagcaagtggaaaagcagtaactttcaattttcaacgcttccacactgcaaaatcatgaaatttcttcaagtcttttgacggtacataaccaatcagaatttgttcactagttttataactttcactttcactaagaggtcatggtgatttgctaaggctctaattttcttaacacacactccagatgtagtgcataagtaaaaaagggaacctttattgaattctctatagttaaacacttctgctctgagattgtcatagataatctcaaatagagtaagggcattaataaggatttctgattccacgtaagaattatagagggaactaaatgatgctggcacttgggtactgagaagtttcttcaacatatctggattttcagcaaaattcgaaaggattttcaaaatctcaaccttgatttttccacctccctgagatagcaaacggaaaaagtttgcaatggaattgacaagcaggtgctggtagtcattagtaatagtcatgtttgttagaaattttagtccaactacttgaactgctgagttcaggttagaggccatgatatcatccatcactttattcatgtacacctgaagccggccctgattttcataattctcactcaggttattcatggccattaaggctttttcct

SEQ ID NO: 159236 - DNA, 1000 bp, Homo Sapiens
caaaaacctgagatcagttctgtgttctggaacagctctccttttccacaggaggagtccctcatggatcgcggtattggttggttgtggtgatttggggagcacgagggagagcaatgcaggtgggaggtgtgggggagccagcctccccgcccggccgcacgcccgtcactgctcgtctgacacactttgctgcgaggccgtgtcgtccaggcccatgtcctcctggcttgctctcctgcagacaaccccgagagtgtccgccacagcctcagccagacatcggtcatgaagctgcccctgctcggtggcatcagggggctcacatggctcggagaggtgccgagtggcctggctggcagccctggctgaggggcccatcacgatgttgacgctgctggatgactgggtgtcactggtattgcccccctccgcagcagagagtccggaaatgacgagcgcgctggaaaagctcctcttgccgaagaggaagctcagggtggagctggtggaggagcccaggctggacctgatgagcgcctcggcccgctcacggacactcaggtggccggtggtggtgacgggcgggggctgagagtgcagggacgtggccgaggcgtgcaaggagagccggctgcccgagagcctctgggccagctcgtgcactgaggtggacgtctggaggaatgtttggcggctctctaagatggggccagatgagctcagcatgggcggcctttggcttagcgctgagtgtgcctgcacggactggctcctgcctttcctcctgcctgttctctgtgtcccttcacaggatgacaccccgtgctgagcaccgccttttctgggctgttctgcgctgctctcctggctgccaccactcggggcattgttgccacctgtcgtcggggcccctcctccgtccacgtcttcaatgttgccgccactgtgctggcgggcattgcaatccttccgcatccttacccacttggtccagaac

SEQ ID NO: 159237 - DNA, 1000 bp, Homo Sapiens
tttttttttttttttttttttttttttaaactccaatttgactttaataaattaaattccaagccatcacacagcaatggacatcatcatcgtctcccaacacacagaggtgcagccttgcgtggctccatcatcacagtctttaaataaagcccctaaagccatctctctggggaaggcttcccaccaggctcccggctccctccttcccacagagccactgctcacagagaaggcatcaagtacaaaaaacggtaataaagggggagggagggatgaggagcaggaggggaggcaggaaggtggggagtacctgccccccatcccgggccggccctgctctctgtgagctgccaacattctcagaggcagacactggtgctggtctgagtggggacctgagggaggtgtgggagccccatcccaaagggaattacccaccctcctgggacagaaaagaagggtcacctgggagagatgccctctatcatctgttcacggagggtcctaagccacacatataaatagaaaagagaataaataagggaagaagggtcagctgaagagctgagcaccctgggactccgctcagggaccaggctcagcaggaggcaaatgcttctggggaatacccacacatgccggacagggccctcctctccctcccagccaccagtccctcgtccatgtcctcggcaccgggtgcccacctctcatgtgcttcccgttccaagtatccttccaaccggccccatggcccagggtggacggggcttcccggaacccagagggctttcctggcccaggcactggagatccaggaaggggtatggaaggggaggtggggaatgggctgagagaactcgtgccctttcagagctgggtcctcagagctgggggctggggttaccattggccttgggtttggatttgaaggaaaagcgcttgataaggcggcgagaaaagctgccggccttctttcggacactgggcgtggccg

SEQ ID NO: 159238 - DNA, 1000 bp, Homo Sapiens
ggggagatgctgtttgtttatttttaatcaaatgtgtgtgaacaaagcagtcgcccatctacttcccgttggaaggaatgctgggcagtaataaattagacggccccaccctcccagggcacagggggactttggtttctgcttctctagaggtacatggggaacaagcgtggcttctgccagacttgtttagctgtgacctgcagggcaggcccctggggctgccacttggttcaccagatggaaggtcagcatggctgtgccacgcttgtctgagagggtcctggcagtgggtacgcagggtgtatggcagggcctcttttccagtgcttgctctaggccagtcctcggcagggaccctgctctggggagagaggcagggtgtgcccaggctttggtccgatgccgagagcactgctcaggccttgtctgcgtctttgagccaggggcctgggagctgtggcttgagcggctccgcgctcaagactcgcacatttttcccagggccccagatagctgctggcatgcactaggtcctgggtggggggatgaagcccctcccagatgttacatgaggcccacccacactgctggtgccagtggggatccagtgagaccacagccacttcccatctgttgagaagcctcaggacagaggtcacctctgtgtcctgctgttctttgtagttgtgtccaaacctgggcaggttgagcgtcattcctccttccccctgaccatcccctccagccctgaggagggttgggggccatcctgcacgatgcttggggccctcccggctgagctgctggccccctggatcacctccatccacctttcaaatgtgtacttgctctcagcccggaagaagtagacgtgggatttgaactggagcttgaaaacatagtctttgtgtatgccatcggcctccctggggatgctcacgctgtagcccagcagcgggaggctggccagtgggtagtcatcctgatgagttttgta

SEQ ID NO: 159239 - DNA, 1000 bp, Homo Sapiens
tttttttttttttttttttttttttttgccatataaaaagaggtttatttcgatgttagaatcatctagtgatcgaacaagattggacatgaacccacccaggcccagggctgggctgccgagcagctgccgctgacatctgtgtggatttgacatgcaacagggagtagccacgtgctcgctcgctggccactgtgcttcgaaacgtttttccagcggacggctgtgattgcagttttcagatgtgctctggcctctaaggacgtggggccgaggcggtgtcctctgtataaaaagtgctgtcctgggagcttcccaacggacatcttggggcatctgagtgattcccagggagggcagcttggccttcctcaggctaccactgcagccaccgccggccattctcaccagcaatcaaccaaaaagcatcagagcctctgtgaacctggctgtgatggtaagaaccaaatgtttcctaagctaagacttgtatgcagaacacagaaaactgcagttaggaacaccctacaaaattgaacaacagtattttccaaaaatatcttttacatcactttaaataatttacaaaaagctacaaaaatcatatttaccaggacacgtctgttaaataaaagtttcatgttggtgtacatatatacagggctatgtataatagactgtttcccttccttgcagccacggaaccatcacacacacgcacggctacgccgctttccacgaatgcacgcaacccaggacgcgaacccacagctcgagggcttagaccttcactactgagctgccgccactgtcctccgtggaggtgtcgctgaagtcactggcgtcactgcccaaggcgtcctgctcctggtcatccctgttgacccttcgtcgatacctcaggtctaaaatgctttcctccgagcccgagctcctcctgtcatgcaaactcagccctgcctgtgccttcctggttggccaggggccgccgtccttcttt

SEQ ID NO: 159240 - DNA, 1000 bp, Homo Sapiens
gaaacaacaatgcagtatttattttatacagctgacctgggcacattgtgaagtaagctataaaaattccaaataattatctctaaagcaaatcctttgttagttacatggctttacatattaattactctggaaagtttttgaactctgtttagtagcagatctcctttcttgatagtttcttggtactgccagttcttgctatcaggtctgttggtttctactatttcattcactttatctattttgcagtgtagtctcccggcagcaataaacctggacagttcctgatcaatgaattccacaccaacaccaaacgcttctgccatatagccaagggttaatgacctatatgattccagcagctgactgtatgcatgaattctcatttctcttacatagtatcgataatgaggggcaaaaagccagtcctttttcatttcctgttccacaaccgctaatgattggaagaaaacagagtaacggcattcatagagtgaaaacagatactgccgaactgctggaagactgtgcaacacttcaagaatctctgctcctttaatgaccttttccctgagatctggtctttctaaggcaatcatactgacatagacagtataagtcacaaatgttttataatccatgagttcataggatgtaaatgttgaaacagtgtcaaggaagagttcagctgcctgtttgaaatcacgaatagccacacaataaagaccctgatacacttttaggcggtttctcctgtcccagtctcctccttcttctattaagcttttggccttttctgtgtttcgtgtgatgagatcattatccatataaaataagccaatcctaaggagatagaatacaatatccaatcggtgacccagggccacagttttgtcatatgtcttgcgaaaggctgtcagagctccctctttgtcacctatccggcagaggtactcggcctttgccatcattgcatcgcgaatttcgctctctccta

SEQ ID NO: 159241 - DNA, 1000 bp, Homo Sapiens
ttttttttttttttttctttttttttttttttttgaccaccgagtatattctgtttattgtttatgatttacacagaaaatgatgggctggggttatagaacaataaaccaaccattacatttagacctgggcttttgaaaaacttgcattccattttaacaattcgtatgtatctaacaaatacataaatccagatcacaaataatcttaagagttaaacaattaagaaacacaaagaataccacatagatctacctttaaatatcagcattcatattataagaaataagaaaatgttaaaaaaataaaattaggttaagtcacaacataaaatagagaaataagataaatgctattttattaatattcatacttatttctaatttaccttcatatagtcttaactttttcaaaaggatccaagatatgatcaaataatattttagtatctgaacttgccagccttagcttataccagagcttgttaccatgaaaatcctaaaacctcaattttctttttcttttttaaaatttaagccaactcttattcaacttttcttcttcacagcagctgtttatagatagtagggagccaagaatgaaggacagtaacagatggaaagcaaaaagtacaacagctatcttaagttcagctctcaacattgctggttgagtttggaaccaaaacctcttaacaactggcagataatagctaaatcttaacagacaaagaagaaatattttctttgggacagctgctatctagaagaaaaccaaggtcccttaatatagtctaaatataatgtgtggcttattatagagaaatctttagcaacgtaagtttaaccagtaagtgtcacaactgatcaacagtacttaaaaggaaacaaacaaaaatcacactagccacaaatttccaccatatacacatgaaattaattttaatctgttttgactccttgacactaactgatcattaatgaaatatgatatggaaag

SEQ ID NO: 159242 - DNA, 1000 bp, Homo Sapiens
ttttttttttttttttttgaatgtaatatttatttggtgaatttacatgtgaggtcatttacaaaagaaagatacagacagatgcagctttcagtgcagtttcaaacattttcacaacaggcaatagtccatgagaatttggaatgacagtatagaatggcacatgcttcagtttcctttgtgtttctctacccaaccccaagatgaaagaagggagaagagtagaagaaaatgtcagtgttaatgtaaatacagccatgcaaataaaaacttttttaaagtcagaggtcattcagagatgtagaacatttctgtatttgggggttatcagaaggtgcataatttaaaaacaaaatgcagcggtctcaaacttcccatcatccaaatcatcttgaattatattaactgcaccaactaattagtgacctcctcaatattttccaaagattgactttgaaagggagtcatttctaatagtttctaaaaaagatagcatttgtagacaaatctttttggtttcaacagaattaagcacccttaaggggtgtaaaaatgctcctttactcccaacagtgtaaaccataattataattcgttcttaaataaacctctccccatcctgagtatttcaaaacaaaagacccctgaagaacacaacccttccctcaccagaaaaatctagcatataagcaaaaggatggtctataaaagtggaaaatggaaataaatcgtaaagtgatttctaagtaaggaggtggagtaaagcttaaacactgtcagtacccctagtgaagacctggacctgggtagttagtccttagagatcaaggttagctcactacaaaaagcactctacatgtcctcagcatcttcaaaaataagtggctcaaaattccttaagcacatgtagccatagttaaagcactaaacttgttatttcaggaaatactatgctctggctccaagtcttacatcctttttgaccctttagccacatgtc

SEQ ID NO: 159243 - DNA, 1000 bp, Homo Sapiens
ttttttttttttttttttcttttttttttttttttttttttttttttttttttttttttttttttttttttttttttcctacatcagttttatttaaaacactaacaagtatttctctttctgtaagggcaaatggttcaaataatgcggaacacgaaacattgactaatacaagtgctttaaatatgaaacaaaattattttttaaaaagcaaaagaataaagaatatatacaaaagggacctggaatctgtaaggtgattccaaaaacgaaataagtagaaaatccatggtgaaacctgaacattctacctctgctttggagaagggctatcatacaacattcagtcagctgaagatggattggtagaggtgtgtctatacataaacttcagtcatttttgcttgtgcagaatcatcccaatcttcccaagactgaatgggcagtcctgtggctttcttccttttccatattcccaacaaggctacgtgaagttcaactcttgatgagccgcttacaacagcagttccttaggagccaacatgacaggtgggtcagatttccctatgagaaacaaaactggccacctacagcaaaatatcaaaatgggtaagtccttccttcctcttcctcctgattatatacaacatatctcctttcaagactattatttccatcatgcttattccttcacaaatctaaaccttgaggtgatatgaaggaaaccaacatcaagaaaagaaaactcaattcagaaatgaagaaaactggcaggtatacaatacacccccagagcatctcaatatccctggcacagtacaattcagtgtactgctacagcccatagataaatattggcagcttgaataagctcattttttccctcaggtggttaaaggccaccaaacaaatactgggcaacaggggtttgttgggagagttagaaataaaaaattaaccaaattttgtccctgtgttaattcaatgccagcaaggaggc

SEQ ID NO: 159244 - DNA, 1000 bp, Homo Sapiens
ttttttttttttttttttgaattcgaattaattttattttataaggaatttagaaaacatgagcaaatattcatattgcattaaaaaaacaaagtctatatatcattcaaattttaaaagtcagtgtgacactaaaaaatgtactaacaaagtaatatgtttcattttagaacaaaattttatcagtggctcatcacaactgatatacaaacaaaatgctaaaatgatgtaaaactgaatctcaaagtgatccagttggatgaagggagcaccaattatcatcgatgtgggactgccatatactctaccaaagaaaacaaactaccattaggtgataaagatgagcaaataaataaactagagggagggaatgagcccacaatttctgaaattttacagtaagtggtttatttgtttctgttgttacatgtcttttgtctgttttcttccttcaagaaattaagtggatgtgtgaaggatccaagaatatttcccaggtatatcttactttttcaggaagaataactttatactgaagaaataatgattaatactccctatcacttcagccactgaatatactattaaaattatttgtttttacaactatagtatgcttttatttatttatttttaaactgtaagtcaataatatttaaagaatgaaagtctcttcatttaagaaatatacagtcatcctttggtatgagagggggactgattgcaggacaccccttaaacccctcctctataccaaaatccatggatgttcaagcctcttatatgaaatggcttgctatatgcatataaccgatgcacatcctcctgtatactttaaccgcctgtatactgtaacctttaaattacttaaaatacctaacacaatgtaaatgttatagtaaaacttttacagctgttaaactgtatttttaaaattttacattctttttttctttttttttttttttctatttttgatctgtggttggtttaatctgtg

SEQ ID NO: 159245 - DNA, 1000 bp, Homo Sapiens
gcccacgagaaggccatcactttccacacattaagtggtggccatctttattagagatgtttaacattcaatagatatccaaggtgacaaaagttaggtcatggtttatgtgttagcatttgcagaaacagtaacaaaaagtagtaaaaagttaaaataacctcgacacacagccgcttttgccatcagccttcctaccgttcttcctccacctctggtttggtgtctgtcctcaaggacagcagaagaggggctgtctgtgcagccaaccagcccctgaaataccaggagcctggtcctagaagaggacttggaaacaaacccgtgggcaaattatcttaaccagtaacaagtggaatgatcagtaagaactcgttaaacctccctaaatgcagtcactttcaatgtgtctgagtctcacctctggatgttctcagcttgcaacctttcttggagaaggagccggttcacaaccacagtctggaaaagcagatgaccctccaccagaggcacctgggctccacattccagccatcggggaatttcaaagtctcctctttgaataacgccacaatcctgaatcctcagacccagctaccagtcacggagcggttctgttcagacacttttgagtggctggtacggagctcataggccccgaggatgacacaggactcggcaccaaacaccatcgcttccagcttccaaagctacaaaatcaagctttcaaaacgagtgttcacttccagaagtgcttccgtcacaggtgtgatgtggacgccaagacacacgcaggtggcacctgtcactcagaagtgccggcctgagtaacctggactccatgcaaccgcgtgtcagcgtgtgcatgagtgtgtgcgtgcgtgcacacaaccgacggtctttcaaagtgctccactgtgatctctcgtgttgacaattctacatgaaaaaaaatcagtcacggccaggcgcagtggctcacgcctgtaatcccagcact

SEQ ID NO: 159246 - DNA, 1000 bp, Homo Sapiens
tttttttttttttttactagtaatactattttactgaaaatctggagttgcacaaatagttctttagaacataaaactaaatggatttatacataacagttacattcagcatttaagagaggcagtacaaaaatgtgttctgcttttatctgatataaattgcatgtaataccatgatttaaacaatatcagttatattaactaatgccatgagatatatcttactcagaacgtctgatgtttcccataatagacagaaaaaatgcagttgtatgagcaactgagtttcttttcatcttcaaattcatttgtgatggtgggaagatctaaggacaatccttccattgaagaagtaggaaaaacagttacagcactgttctgaactcatcaaaaatgaaattaggcacatgtgcttcagcaaccctcctgggtagctttgtgtaccgaacataatcctccaggaacagaagggcacccacaacatctgcaggaatttcaggtatcttctggcttgtacactgctccaccgtggagcagataaactggccaatcagcgccaggaactgctcggtgtaccgggaatggaactgcttcagcagagtgagcagtcccaggacaagtggtggccaatcaaccgggtcggtcggttttcggcagaccattcccagatttttgttgtattgaagttttggcaactgagcgatcaaaaatagaaagtttacaattggaaaatagggtaagcgctttgttgttatgtatatcttattcagtgggttgtgaatgccagctgcctccagataggctgtgatttcatataaaagtgtgttatcttctttggggtaaggaagtgaagggtcctgatagtgggcttcaatgtctgctaggagagccttattgagattctccagagcagctgccagatgtttagaatcaaaccgacaagaataatttaattcattggcaatctgttgtctcagaatctgcatctgcccaaccttca

SEQ ID NO: 159247 - DNA, 1000 bp, Homo Sapiens
ttttttttttttttttcactaattatttttaataaaacaaaagatcaaaaatcagcatcaggagatgacacaatacagttgagactatggaaagcaactatttccaagctgggcatcataaaatacatcatcaagaactgtgaacagatttgctaaacaaaggaaagcctcatccctttaaccctccacagccgacatcgggagtctcttggggtagaacatgaagtgaaaaagaagtggatggccagaatgctgtacattgtcccccagtgacctgccacagagactatttttaaagacgcatttatctcagcaggagtgacggcatttaagaagtagcccggtactcaggctagacaatcctgcaaaagtctgcagagcttggctgcaccctttacaaagacctgagtgatggatgagatgggaattgcccttgattggctaggtggctggtttaaagagccataaagataatgcagaagtgagatcttggaaaccaaatggagttagcccccaaattattgcagccaccccagcactccaatgttaatccaattttaaatttacaagatccatcttaactagaaatgcaggctctaactgtcctgcaagttttttaagtggtagctgctcaatgaattgtattatcccattaaagaataatgttttagatgtggtaatcccagactcacacaattctcttttatgaacctagccactgtattcatatggaaagtaaattacagctatattacatcgagcctttcattattgacagagcaataaatgttagtactcctataaaacactgagagaaagattaatacacagtggtatatatatttggaggaatcagggtgtccagtcagagtcaatatgtcttctctccctaattatcatggaaagcctaggagacataggagaaaagtagatctctatagatgttgctcaaatacttggctttctagatcagcgtatcctcaatgctactatgtcaatt

SEQ ID NO: 159248 - DNA, 1000 bp, Homo Sapiens
tttttttttttttttttttcttttaacatttttttaaacattttacaaacatctaaaaactacaacacgtcacagctacagtggggtgaggggagggcaccaaagaaagcagccacacagagtagggtgggatggggcagcctaacctacagaggctattgtgtggaagggtaaaatggggaaactgaggcttctagtccctgcattaggggtccctcactcactgcccaacctctccccactcagaggagctgccaggagggcccctgcttcctgcctctgccccagctctttgtgctttttgatctgctggtttgaccagatgcctggtttctttccctcccctgctcccctccctgtgaggggacaggtagggagcatgggagggcagctgtgctattcccgcctgtgctgtagtgggtggagcctctcactccagaggaggcctctgcctcttgaggagggaaggagatgggccttgtcggatgccctcagatctccctagactgtgggactcttatcccaggctggcctagggctcctccatcccaggctcaacacagaaaccagattaggggaggaactgtgggaggcagggttgtgtgtgcatccgctgaaattacccttggcttatatttgaggacagtatagtgataccccccgccccatggcacatgcacacacatatgtaagtatacatacacattcacacacagtcctgcggagctgcctcagaacttaatctattaataaataagaatcagaaagctaatttcataaaattcaggcttcatatttgcagcccaaattgagaggaaagtggaggccagagggctgaggtttattgcttctcccccagcatccaacaggagatgtgagagggcacccgaggcccactcttcagactccaagaagttcttttggtccatggtctacaccagagccccagcccctagcataattgcatacctgtggtttcaccagggcctaggcagaggga

SEQ ID NO: 159249 - DNA, 1000 bp, Homo Sapiens
aataaaaatcattgtgatttaataaacagtgtggtgtttctgtacaggcccctccctgtctgtcccacagccagcgggaacgctggatggatgtgggcctgggtccctggagcccacgaggttcctgcagctttcctaagaggaaaaactgatccggtgatggaaggctgcggcctcctaaaagtctcccctgacgaggagacacggcaggggccacagtcacaaccagatcgagatgattagggaaggtgccgcggagtgcggtccactacacatcttcagggtgcatctggactctcttggggctgcaacagtatttttcacatagtttgaggagctctgacaaaatgaagacggatgaggccaatccagttaaaaacagcaaatcaagcgctcccaggttctccgtctggaagaccctctgcagcggggggatgtaaatgaccgccagctgccccaggatggaccccaggacggagtagaggaacatgtggttcctgagaaagccgatctcaaatatcagcttggtctgagagcggcaggtcaaggcgttgaagagatcgaaaaacacaaaacaagtgaacgtcatcgtcgtggtgcggggagtgcttgctctgtcttcaggcatctccttccagaagataaagagggtcccgctgatgatgatggccgcggacatgaggatcttcaggatgagggctctgctgaggatggtgtcccgcacactccgtggtggctgcctgaaggcgtctttgtcaacgggctctacccccaagctctgcgccggtggcccatccatgatgatgttgatccataggatctgcatggcgttgagggggctgggcaggttgaacacggtggacagagtgatgagactcagggcggagatgctcgtgctcagctggaatcggacaaagtttttgatgttgtaaaaaatacccttgccttcctccactgcattcatgatggctgagaagtcatcatccaccaggatcatgtt

SEQ ID NO: 159250 - DNA, 1000 bp, Homo Sapiens
ttttttttttttttttttttgttgttcagagcaaagtcatttttattgtaatgaaattttaaaaggcagttacattagttacacatatacacaaccgacttaataactgttagtcatagagaacattcaagaaatacaaatgatttatccacagcacagttcacatccataagaagaaagagaaatggttaagtacttaaactgtccactgacacctgcttatgaaatcttttcctttctttctttttttaaaggaaactgagattgttagatgaagcaagccgtcctgctcccgcacagcctgtgaaacctccattttgccactttcaaggtcagtgccccacagaccctggcctgttgttgaccataacactagctttggccacaaaagccagggacacctacgcttggaaatgtgcctgcaccactgtgtggtgcctccttaagttgccccagactccagatggtcaaagaaaaggtgaatgtccaggtggctcatggctccttagtatggggtgtttggtggggaatgaccccggcaggttaggagacagcgacttaggccaagcccatattttctggtaatataaaggacacttctattctgacttgttattcctagagctgttccggtcactggcttcttcctgtttatgtggtaggtcagaaccgtgacggagcaaggtgagcgttcacattctcgcatagcttatgggctgcctaaagtgctgccgggagtggggagaccaccattcattccctgggactggtttctttctcggctaaagctagaaggacactgatgtttgcatgtgtggctaatctggagaacatgtagtcacattgttgacacggaagagtaaagctccccagtgtaagttccttaacaaccagaatccccccactctctgcaacattcacgtctcatgaaataacaacagtgtagaatctggtatgttggagagtagagcagaatgtggctatttgtgatggctgtcac

SEQ ID NO: 159251 - DNA, 1000 bp, Homo Sapiens
ttttttttttttttttttatttattaaaatctttattcattttcttttttcagaattgaaacccatagaacacattagaaatttagatccatatctgtcttgtttggtatcttaccaagtacaatctctgtctgtgcaacagctctgagaggaaatccttggcagatcaaaagagagggtagtggctcccacactttccatttaagcaaataaatgagcttctgagtagttgttcccagtttcacccaacattttgtgtttatgagaaacaccttagttcctaaaaacctgtggtagtccagtacctagcccctaccttgtcaccacccagacttgaggaattgaagggaaaaaaactggccttcccctgtaggatgagtttcccaaggccagatgtgcctggctcactagtatgtctggcctgtgctggcacactagagttgctcagtagttattcgctgatgaatggtctttatgttaattagggtccactctcagagactgagaacctttcactaaggttctttctgaatccttcagaaagtcagtgttcccctttgtcaaaataaatatgtttttcttgctagaatacatatacgactatatacattacatatacttttactcatgtttcctgaagctcaaactcacaggatgaggcatataagatagcttactgatgatgctgttttaccatcattgaggtgtggtcatttactggtcaaagaatacacgggtgatcgagaagaaaggctgaagaaatatggcggatgggaagggaagggaaggcaaaagcatttttttttttttagaaaaaaaagatcgatttctttggaagataatgctggcttcagatgacattgaaaaattgccacgtataggactcatctttcccaaaataatatgcaattaatgtacctgaattcttccatttccttcttaaatttcatttgacatattaaccctgagtgcaaacagggggcaatgccttattaataca

SEQ ID NO: 159252 - DNA, 1000 bp, Homo Sapiens
ttcgcattctaatgcacctagaggtcactttattaagcagcaaaagaattcacatcaaattcagctcaaaccaaggcataagaaaactgctctagatgagagggagatggtggcaatgctaccgcttcagatggccctgctctcctgcagctgtaccagactcctcctcctatgactcaagccagtcactgaaaacaagctcgatcttaggggtagcaggtctcagggcttcgtgagttacagctttccttaccaactcaagccatgctcaagaagaggcaaaaccctcctttcacacatgcaagtgccaaggacagcctactccattaagctggcaccacagcctggccatgtgtcagaaaaaaaaaaactgcaattcaaactgggtgtcctaaatccattttattcccacccctgtttctttaacaaggagaactaaataggtagtaaagattcagctgttttttaaaagacaaactgagaggtgtactgagtccaggaagccctgacatgatgctacagcagagcagtgtgtgccattctgggttggactgctctaatgcatctcaaaggggactcaatcttactttgggttgagaaaaattaattacacatgggtcaaaaagactaaactggcaatgaactaaaaaccttggcaggaagagatctcttgtgtcaatactttattttggtgtaaagacaggaagctggaaaatacactgtatttaaaattttcttggttccccctcacattgtggaaaccccctccccccagagctaatctgttcaaactcaaatacttaaaaattacagcagccaaacaaaagcatgggggaaaaaaaaacaaaaacaaaaaccagatggagaaggtagcctgggccagtagtgtcacttggtgtggacgactgaggtgctgaacaggagcttctgtttctgtttttttcttttctttcctcctttctcttcagagaggggatctgaagtagctggtgtgtccagt

SEQ ID NO: 159253 - DNA, 1000 bp, Homo Sapiens
tttttttttttttttttttttgagataaataacaaacgatattttatttttattttataaaacatgcagtttacaacaaatttttaaaaaatggaacaaaacttgggacaggcaagtgggatggaagacagatgcttctcagccatcagcaggaataaatgaagccggcagccaagctttgtccaggatccaaaggcccttttggcaatggtattggcaacactggtttgcttgggccaccaacactctacttgctggcccctccaggtatccctgaagcagttggtgacttgtgctaagtcttgaactactgtggtatcctctgtcactgtccaggacttcaatccctagccagctaggaacttacagttatggttccaggagcttctctgcctggatattagtcacccaggatattaagaataccaattactttccatctgggtcaattctagactccatgtctgtaccactgttttgcaaagaatgaagaaggaatgaatctggctcctagaacctttgcaacaattctgctgtgttccagttcaattaatagcaccatctgtgaccctagaccctgagcacgtccagtactggaagtggacaaggtatagccaacttaggaagccatctcccagttctggggctatagaacagtaaagggagagggccgtggttctttgggaagggtagtcagagcgccagcactgaggagaagacagctgcattcttgggacttgtttggccctcaggctcaggcaccttccagtccatctttctgcccttctcataaagacccttgagcaccttgtggaaagactcaggctcagtgccatttttgcttagctccagatactttcggtacagctgaagggctgtgcgggcatcctcaatactgtcatgggtttccccttgaatcttcaggtccagaaagtaccaagcaaggaatcgcagggaaatcattcgttttcggggcatatggaacaggtagacagtgtca

SEQ ID NO: 159254 - DNA, 1000 bp, Homo Sapiens
tttttttggatttccaactaggttttattttagtttccaatattatgagcaatgatacaggagtaactcaagcaaatacatcaccttaaatacatcagagaaaactcactgtgtcagcacgtcttgcgctccagcaaatgaacataaaaacaacaatgtcagcagcattaaagtgcttttggccatacttctttcagaaagggtctctccctcagtggtataaatttaattttacgtattgaagaagctcaaaatttcattcattccccaggggctacattgaaaaaaaattcatgtttacgctaaagaatttttttttttcaaaaagagcacaaaatccattggaattgtgtgacagtgattttccctgacatgctgtgaagtggcccctgtccattcaggcccggcacacgccgggaacatccacccacagcatgtccacctggcagagtccatcacttcgccccacacaacaggacagactgagggctttaaatacaagcaggtatgtgaacaggacatcacctgtgatgtggccaccaaacagtgcacagaggctaccaactcatttcctcaaagatgagtgatggctgggctgctgggcccctgccttgtgggctgctttttgggagaggtgttgcttatttctaggaagcgatccaacttgtgccacacaggatttgtcacccaaactgcttttctcacacagtcaacaccttggtgacaggcatctgcccccacttcaaccagtaacaatcccaaaactcaacatcagcataaagacaagggggtcagtcgaaggttctggagatcagggagggtggaaagatggacactgggttttccacattgtcccttggccaactgcagtcactggcacaggaaatttagtccagggcacttgggacaaggttgggggtggggtggaaacatgtctcttaaagggcacaacagggatgcaatcaagcctagtgggtgggggctctcagacccatgagcc

SEQ ID NO: 159255 - DNA, 1000 bp, Homo Sapiens
ttttttttttttttttcacaaagcaaaaccaagagtatttattttcattattttaaaaaactgcaacatttatttcacaatccctggaactgtaaaataactattcttttaatttacagaattgagggaagtattttaaatgtcaaaatacacatgctgaatgtgatttagcatataagcaccaaaaatcccaaaagtatacaaagattgtttaaacatataaggtgcatttattcatgaattaattacattcagtttgaaggaagaaacagtactccaaagttcatcaatatttaagaaattatccgaatagcttccaacttggtttacagctaaataacagatactgcttttaggtttttttatacaatgcatctaaactttaggttcgaaatttaagtgctgccttacactgtgaatggcagtttgatcactaaatttatgttccagtttgagatacttcatacacaacatatatttaatgccctgaaaacttctgcttaaaaactgagttatttagtgaacatctgaaggtaacaaaaaaagatagatcttctatatttttatgtagaattgggtataaagtcatttggggtcaaacacaattattttttaaatgttatcagtccgcccagtaataagaacttttgtaaatatgccactatagcttcgggcaataattgctattatgaagttagataaacacaggattaatttcttggtttacaaatcaaaattattgtgatattaaagcatgcctccttccaaaccacttggtcaatgctgataacaattaagaaaaacgtatgctagtattgctctaaatatactgacttagctgtcctgaatgacctaattaggttggggaggggacttggcctggttctccagttctgtgaagctgccacctccagcctcactctaaatagcttatacaaaatcaagttattcccatagctaacacaaatccagcaagctgtggtcctaaatgccatctaca

SEQ ID NO: 159256 - DNA, 1000 bp, Homo Sapiens
tttttttttttaagtcagagttgccctttatttttagattcttaaatattctagaatgaggtaaaacgagcctgccagtacaaagtgaaaattctacatggtgcatctttggcgcttcatgcatgattatttcaatgaacctcttcctggtcactcttaagatagatctgagtttttgactcgccagtcaagggctttggcgacactcaatgacataatattcttggaaaaagcagtagcatttctgacttttcatattcagctcggaggtgtattgtctcgggctcctgtgcagtcgagcgccacggctgctcattggatgatccaggatgggtccttggcaattttcgggttctcgggtccgaggatggccaggccgtgtgtgctcttcccagtgccgaggtatctatcgctcacggccaggagcttgtcgtggctgacagcaaagagctgctctctgtgggcctgcttcatctcatccgagaggccgtacaagaagtggtccattcctttgtctgaaggagcgacaggagcatctacggttgagaagacagaaagtttggcttcgtcgatgtcttgctgtgtgaattttccagacttagcccagtcgacagccttcccaaaagactggagcgtctctattgtatttgggtccctgtaagagtaaagggtgaaaatcccattgtggctgagttttgcgcctccaccataagcaccgcctttttctcgaatttctgtatgcaagaatttggcagtcatcaaacgtgcaaggattttaagactggcatgatctgggtccgtgtaggggacagttcggatgcattcacccacgtaattcaccgggaagggcatcaggaagtgagtcttcatctgccagggcttgaaggtgggttccatgaccagcttcctaatgacctgggagccatggggaacgtgggcatctccaccagagctgctgggcacaggtttctcgaccgtgtgtgggcgcacaggcctccgt

SEQ ID NO: 159257 - DNA, 1000 bp, Homo Sapiens
gagatggagtctcgctctgttgcccaggctggagcgcagtggcgcaatctcggctcactgcaagctccgcctcctgggttcaatgttgtgaatattcttaatgcatttcattatttatatacaatatgatactgatgaggagtcattatattctgagtagttttcctgaagaccacaagtctcaagtcaaggaaagtatccttaatctaggggaaaaaaaggaagtttctaaattgttccacaatacacttcactaagaattgtactgtatgacaatgctaatttttaaaaataatatatatatatatttttgtttctgttaaggatggtggtatttgcttaatactggttttcctgtatagcagatattttcttatggctatatttacttgaatgaaaaatcaaagatgactacctgaatattccagtgtataattacagtacaacctcatgaaatggttgattctgtggtctcaagtctagaatccagaattgctgcccaatactgtaaatttattcagaacaaaataaggcagttggacgtggtggctcacgcctgtaatcccagcactttcggaggctgaggtgggcggatcacaaggtcaggagtttgagaccagcctggccaatatggtgaaaccccatctctgccaaaaatacaaaacttagccgggcgtgctggcgcatgcctgtaattccagctactcgggaggctgaggcaggagaatcacttgaacccggggggcgggggttgcagtgagccaagatcacgccactgcactccagcccaggcaacagaacaagactctgcctcaaaaaaaaaaaaaaaaaaaaaaaaaaacagaacaaaatataaccaattaactaagcacagtttacatcttttaaaaaaatcattttaatactacaggcttgaccatgaaataatgacatgtctatataaaagtgtaggttgacaaacttgtcatggaatgccaaggagactgtggagggagaggga

SEQ ID NO: 159258 - DNA, 1000 bp, Homo Sapiens
ttttaaaaagcaccccaaatatacaacttgcttttattaaattgaaaaaaaaatccccaagaggcagatatcccagtagttttagtgaaaacaaatttaatatcatcttgtttgaacaaagctttcagaataagtgagcaattaaattcttaaagtagggacagaacaccaacaggctctagactccggaagagctgtaagccgacaaatgggcattgttttgcttaacagttttagcttcaatgtaaatatatattattacttagaatattagcatctgaactatataatgactattttatcattttacttgaattaaaaccagaatttctggaacttccaaatagtctttaaagtttttcaatataaacataaactaacccctattcctctctacatatcaaatgtgaaataactgtcacaatatatcagcattttcacagaaagatgtttaaggcttctggcacataaaatgtgtaatttctgtgtgacaatgtcataattatatacagaaaatatttaaaattcttgtagaatttaagttctaaagattaaaaaaacaagagttccatgttaataaaatattaaaatactatgagcttcccataaaattgacagtgatttgtaattacataaagaatacacaaggcaagtctttcacactaagtgattcatcattgaaaataattattgaactgaatatacttatttggtatcactagttttctaaatcattctttcagcccaaaacaggctttcatataacttataaatatttccaattgctacactgaggcagcaaatgtcatatctatgtttgtcctagttgtatgtcatacaaatataaagtctatgaatcttatacttttgtctaagtcaccattgtagagaatgtgctggtaagtgaaatcaatacaaaggaattatttttcatttgtaaaaaatgaaaatcatttacaccttgttttaaagttctaaagcagcatattcaactcttaag

SEQ ID NO: 159259 - DNA, 1000 bp, Homo Sapiens
aagtttaaacactttaatcaactataagtcaataatcatatattatataaaaattctgattcatgcatcagattacataaattatacaattgtcacattatacaatgcttacatacttttgaatttgtacctgcaaaaatgtatacaagttatgagagcatttacttaagaagataagtgttatactcttcagttataaataatgcttctatctttcaaatacccgctaaatatatgcatttctagatctgcagcatttttttgtacctcaaaacacaaaccatctggaagcttcgaagactaacaggcccacatgtatcatgtattagacttcaactccactgtgagagtgcattttttgatggataaaacaaatggaatgaaacatcaactctattttaatgcttgaagagcttctatacctcttattaaatatatcagaaaatgcttcatatgcagattaattagctaaggtgctaccaattgcatattaaatacttccaatgattgcatctggattattaaagttctacatctgtgcaaatgggggctttccatgtgtgctgacagacccttctacataccatcatggcccagcagcactgtgatcctttcccttatttcaaagggaccaagtgaatgagcatgcatcatacttcacttacacatacacacaagtgacacctaccacctacaagacatatgagtacatgaacatcaaaaaagtttcagcttgatttacaaatccaaggtaaattgcttcttctgaaaagctacagaggaaaataaaagctctagtgtaacatttactgtagatatattagacaacagttttttgtttttttttttagattctctttgttaaagaataagcacccttccggggatggtaggcagggaggcgtggtggtgagggagttgctggaggaataacaagaagaaaacaagtctgtcactaatgagcttagttttacttaggtttccattcatgaaacccttt

SEQ ID NO: 159260 - DNA, 1000 bp, Homo Sapiens
ttttgaaacatatatttattatgctgtaaaaagcaacactacctgattgcatttaaaataaatgtttcccaatttcagaatacttacaacttgtagttttaagattagattcactttgggaggttttagaagcaaatacattcatagctgtgtaatccccaggaagaatctaaatctgacatcaggtcattcagtccctgccagacagacaacagcatcaaatggtcaacagctaatccagctctgcagctaaagggcagtgtcgggcagcagtggggtatagcatattaccaaagatgagaccagcaaaaacaacaatgtgtataaagctttaaattaacatgatcatatagagcgctcaggatacagaaaaagcacatatgatactaaagccaaaacaaaaagatctttggagtttactgacggcagcagttaatagcacagtcaacagcatttaaatcaaatatattattaccagccaacagcaaacagcccaagcaggaatcggcacatagtcataaataacatcaggggtaaataacggcacatttaattaaacaacaaagattttacagaatggttttgatctgaaaaaagatgaaaactctctttgttcccaaataatggttagaacctctttttattatagaaaagcctcaaaatcattggtaatcttcaagtcacacaattcaactgtcttgtttcattttagtcacacaaagcgggctgctctttgaataaagttatcttgattgatttcagttaaaacgtgtctaccctgtaatatctttggggataatgctgctcctgtgcagcatcttacaaatgctacctgtctccatggcttgctagatccacggcgtaggaaactgctcactcagcatcctccccatggaagctcaagcatgggaacagcttcgggcctggtgcagctaaggaacattggccgtggtttcaccaaaggaggtgccatctaggtaatgggagggcagtggcagga

SEQ ID NO: 159261 - DNA, 1000 bp, Homo Sapiens
tttttttttttttttttttttgtggtttctgcccagcctacacagcaggagctggggagactttattcgtttcggggaaagtgacaacaggaatgagatgaagtgtgaaagtgaaaggaaggggcaatactgagatgagaacagcctgaacaaagtctagtacaacactgcagccatccagagcttgagggagcggggaggtccatcaccaccaggccctgtgggccaagcacacccatgtttcttctctcttgtcagatttgatgaaaaggaaacttgggactccggagggccaagatggagcgagacggtcaatactgatggacttgcagctagcaccatggcagccctgcctggtctaaggaagctggcaggaggcgatggtacctggcgggggcagactgcccacctccccactccttcagaggactgtttcctgcccttcacaccatcatcatgttgggccctgcatgtacgttcctgcacttggagcgagcccagggacacagggcagacactgggctcacagatgttgctgcagctgagccagaaaacattccaggcaggaaaagcaggtgcacacattcacacaggcctctggtcactcgaccagccagaatgagacggactccttgacctgggaagtcaagtcccagtgggaagggctggaaatcacacgtggtcaacttcttggctctctctgctccccaaaccctggccctaggcttgctttatcatcacatcccaagtccagagggctgctactgtccccatcttggccctgctagaagagggataggggtggctggcatgatgggtgaggggaacatgagaatatgcagaggccttggaggaagaggactggcagttatgacaggaaggctctctatacctggctccccagtgttctgcccctggcactgagcatgaggagccaggctttggggagactttgcaatcacccccccaacctggtccattttccacaggtagctttctt

SEQ ID NO: 159262 - DNA, 1000 bp, Homo Sapiens
aatatttttacatgtcatatattaatatttaatgagaaacaaaatgtcacataaacagcccagtaataaaatcttatctttcagatcatataatttttctttaaaacctgtacatattctcttgatgctttccaaactagatcttgatttagatttgactcatcagtagaccctagaggggaagctattgatccagattccaattcagcagcagcttctttgagttctctagttatatttttttccaactcctgctgcatcttgctcaagtagttctccatgctattatttgaagcccgtggatttgaggtagagatcactaagttttctcttggaataagttttctgttgagatctaaactattattaagatttcccacacaaggtggctccatgactggcctggtagtgagagtggtgaacaaagatctgctctgctgtttttccacaagaagtttggtgttgacctctgctagcctctcattagttttggttagtttacttgacaaagattttctaacttttaattcttctagatagagttgcttatatttttccagttcggttttattaaagtcttcttgagaagtttttattttggagagttcagattccagatctttaattctgagttccatctgacttttcattgaagcaaaattattctctctaaactgctctaagttttcttgagatgctgcttgtgcctgtaaaaatagattgacttcttttaatttttctgctatttcctgtcttgctctttcttcaatctcctgtttatactgtttgacttgaccaagttctaccatattcctttctatatgacttctcaggttgatcacttcttgttccaacttctttttattcttctgtagtttttcacatttcttttgtactgttttcatagataacaactcctcttgaagaatttggttctttgtatccagatgtagacattttgaacctgcagtctccagttctgctgtaagatcatcaatct

SEQ ID NO: 159263 - DNA, 1000 bp, Homo Sapiens
tttttttttttttttttttttttttttttttttttttttttttttttttttttttttttttttttttttttttttttttttttgtttatgcaggagtttttattctttaaatcttccagtgttaaagcaacaagaaaacatttagaatgtcctttggtggaatcttattacacttgttatatatgtaaactgatattctttgatgccagcacgttcgttgcccttacagagaaatctctgcacagtgaaacaaaacagaacgaaagaggacaaaataaaatgtcagtctttgctgattcgaattagatacattaacagattgtctggtaacacaaattggcaataatacaaaaaatctacatattacagtagttcaagaaaaataacttcatttgaatacaaaaggatagatacactttcttttttcctatagccactcttgtatagtgggtgtgtgctcgcactggactcagtgctgctaagatatacaggggtatgactggcttgcgcttttagagggggctgttacacatgtgcatcactaacatcagacaaagaaatctttcaaccaacaagggttacagagcaacgttcactaaagcacaggttggaagggattcagggacggaagcaggccaatatggcagcttgtaacagatttccttatgcccacaatgcacctgacagcaaagaatgctatttggttggtccacacactgggcggagtcgtactagggcgcaccacgctagagtagccaatgtttttaggtcggttgatttgtttgttttttgtctttcctgtttggggggctgtcgcagcctttccaatccacaatatgctctgcagctggcaatgtgatttgcagtgataatatcaacagctgccaactcctctggagtcagaaattaacagtcttgactcggatgtgctgtccacgggtgataaatatggcttagttcagttaggccttcttagtttgtacactgtctgagtgggggt

SEQ ID NO: 159264 - DNA, 1000 bp, Homo Sapiens
cagataaagagacctttattttgtacagtacatggtactgtaaaagtaccatgtacttttaccatgtcacccagtgtcacatgggtgattttttgccataccagtaaaatgatggatccaggtagcaaccgtcacaatctggatggagaaagctgtcggcagcttgattccagtcagtcttatcagaaaatagtctcttattatgggcatctacttgagcaacccagatggttgtactaagcagctgtgacttttacccccactgtacaaagaaagggtgctttttaatctgtaatttccaattagaatatcaaatatctaggccacatccagagccaaggcttaacaaaaatgtaacatggtttatgaaatggagtattggccagagctgagaacatcctcgtgctctttccactgagaggagtgaccgcttcactttgggtttgttaatggcactgagtttgaacacacacaggatcctagtagtttcagttggcgaaagcatcagtgagccaggcccaattacagtaacctctatgaattgagggctctactaagccagcaactttgcttcgttctggaaagaggtgatacattatttcccttctaagagacagctactactattgcctatacagctgacatactgtggggccaggacaggtgctttcctgaatgccccattttcattccacaagtgaggcttgctgggtccttttcattttgttagttgttgagtccaagacgacaaactcctaaagtggaattttaggtcagaaccctctacccaaggaagagatatccaatgtgtaaaagagcccaagagtaaactaacagctgcttttcagaaggggtggacctggtacccttgtcagggaaccaagtcaatcccctggcccccagctcccaagggctgcccccttttgccagaagtttcaacccacaaaatcaccagtcacagagagagacttgaagcccaaaatgatcagagctgttggac

SEQ ID NO: 159265 - DNA, 1000 bp, Homo Sapiens
tttttttttttttttcgtaaactgccttcctttatttatatttgcaatatgaaatagaagctcggcacaaacgcacgcacactcacaccagcctgggaggagggagctggggacaaggtcacttggcaacagggctgggacctcagaccctcaaggcccctggggctgttgccggggaggcccctgctccccagagccggactggcctggttgaaagtgcagggtctgggcaaaggcacggcccccactcgggaccctctggcacccccacccacgctgggccgtcccccatggtggacctgagctaaaaggccgggtgtgggcgtggccgtctgcgctgcagcgtgggacagctgggcacgtgggtggcaaccttgggacccctaacaccagctcccgctgggacggaacagggaaggctgtgctttggagccgccagcccagttcggtgtcctcactctctctcgctctcctccctctctctatataatatataatatatgtttctctctctccattctctctatttgactctctgtatctttattctaggaggcaacgctccaaaacttctcttctcagtgcaaatgggggtgggttgggcctgtctccctggcaccagcctcctgggggtccagaggagagaatgtgggggtgtcagggtgatgagggcaatgggggccatcgtgggacccgccctgcccccaccccgggagatccacgggaggacggaagatttggccgccgctgccgcaccaggcagctattgggagcctggggatgcaggcccttccggggcagagccattgggtatcggaggaggcgtgagggcctgggcactctggctttggggaagccccaagggctctgggctcttctccccttctgtggtctgggggggctggtgggccccggaggctgggacagaggtagaggggtctctggttgcactgtccgaggagctgggggcagaacggatcccgtggaaggtggcctgaag

SEQ ID NO: 159266 - DNA, 1000 bp, Homo Sapiens
tttttaggattacacactttaatctgattgacactgaggaagtagggaggacatgaaagaaatttagttttagctctgctttatgcataaccagatgctccttttctaaaaagtatattgaggttttaaaaaacacatttatcagaatacttcaggaaaccatactatgtgtaatccaggaaatacactatttgcagaataggaaaatcatcactggcaacaaaagattaaaacaaaaataaagcaccagggttctgagcagttctaaggtgagtatatcagcagaaatagtgtaaatgctcttgactggttgctatgcaaacatgctaatgaggactagtccatgtcttataatttttttttttaacatgtttctttggaaaaatggcaatattgagtggaagagaagctgtccttttagacacccagcttattggcctgggtgagaacaactttgagaactggcatgaaagcagaggtctcactgaagttgctggtgctaactatgtgggtatgcatggtcaatccttctgagtagtttcgagtttcaatgctccttgcaatgttgtgtaaaccactggtgattgttggtgaaagtgtctgttccctaagtttatcatacagaaactccaaacgtttgctggcatcatctagcttcctcttggtttgagggtctgttgctgaagaaaggcagcgctgaataagatcctcaaatgtggtctttagaatgaggtgctcatctggaataggtttcttggtaattttttttgttggcaaagactgcacatgctggaaggtatttccaataggagcccctggggcaccttcaatattgggctttgaaaaagatggtggcatgcctgtttgaccaagaggttgctgtacgccatggaagggctggccacctggaagatgtggctgtgggaatgaagactggcttgacagtggtactggagctgaaggctgttgctgcagcatttgtgactgggggtcacccaac

SEQ ID NO: 159267 - DNA, 1000 bp, Homo Sapiens
aaagcacactgatgttattttatttacacactattttaagaattaacaataaatacacattttccatctcctccttgtccttcatttataactttatatgttaacaaggaagtaaaaccctccaaataaaaggaattaaatgcaataatccataaagcttatcagatatgggcacaagaaggagacacccaaaaacaatgtaaaaacattttaatcctttaatgttacaagaatttatctataaattcttatgccattcctagtggaataataatataaaacctatacacaaacattgaaatatgttttattctattgctatttaccagaagaattgcatataaataacagcagcagaactgtccctatgttatacatgaatgtacttattctgaattcactgactgaattaaaaacacttaactcaaacttttcctattaccttggggtattgttttcacaaacaagtaaatgtttcctagagccaaatactttctacacccagaaaatagagcagcatgttagttatttaacaaaatacacaccaaaaccttaatgtgaaaggctagttttactataagatttttctcagtgtactaaaggagtcaatggctttaacagtgataattttttaaaagatacaaatgaattaacacatagttcaatataatatatgttttattaaataaatactattcttcttgtcccatcaacatatactttttaaatttttgcttaatttacaattcgagttaatattttgagaacgtaaggaaagacaaataggtaaatgtcttgttgaaagggttaagatactgacaggacataccttcctgttccatcctatataaaatccactcatgagttggatgccaagtatagatttctgaaactcataaccaccaatcacgataatgcaatcattaaaactcacaccattgcaaggaccaagtataaaatattctgctactattttagatacttcaaaaacatccactac

SEQ ID NO: 159268 - DNA, 1000 bp, Homo Sapiens
ctaggactctcccaatctcttgccaatcctggtgacagccttggacgcctgctctggcagctgtgccgggtctgtgaggatggaggtggaggtgctcagctgccgcagcgtgctcaataccatcggcctgaggatgggcagggagcagtgctggtccagccaggagagcgccgtccggtgcagctcctccaggctgctggtggacaccatgcccttgaacgactcaaacagcggcttgatgatgatgctgaaaatccagaacttccaattctgcaaggtccgggttttcacgtattcgtcaaacatgtctttcatgtgatcaaactggcgccgggtaacggggactcccgtggcagggagcagctgctggcaggagatgatggtggcattgagctcctcgatctcctcccgcagccgccgggcctcctcctgcatctggcctctctcctgctgcagcttggtgatgtactccacggtcttctgcagtgtgatggcgtgactggtcagcttggaattgttggagatgaggctgttgagcatgtcgaagcacatcttgatgttgaagcgccttttctgctcagctgagatgtgcttcatctgccggttctttagtgcagccacatttttggggtcggatttccctgagcagttgttctggggagattgaggactggggctctgctccgatgcacacggagaggcctgccctgagtttgggcagtcccgactgggccctgtgacagtgacctgggggctgcccccatgcagcgggacctgctcgcccttccccagggggtcttgcgctgtgcttgggaagagccgggagacgggggcaggcgggctgctcgtgccatggccgagatctgtcaccaggatgctgctgtggaactccgggaccccaggagccctggcgatggcagcaggcgcaatgaccacgttggactgggacacggtggaggccaacatcccttctctcttcagaggccctgacgtcatgatc

SEQ ID NO: 159269 - DNA, 1000 bp, Homo Sapiens
cttttaaaaaataaatatttataaacttaaggaagattcaaagaatcagggtatcttttcctccaaaaacacaaatgtcccgtgtaagtcaaaccaaggtgcgaccaccaacccatgaatgaagtcccctccccctgcagctacagggttgaggggcaggtgggcaggggagctgctctctctcctgccttcagtcccccttggtgatgaggtcctcaatgtaggcgtccagctcatcatctgtgttgatgtctatgtcctcctgcaccttttgcaggagtgccacgatgttggtcctcagcttctgcagcttctcctccgtctcgcggagcttcctctcggaggtgcgcaggctttcctcggaggccttggcccgggagtcagcacggctctggtaggaattgcacaggttttggagccctacttcatattgcttgaagtactccttcagaggaaaagatattagctcatctgaattcatagcactcagctgcttcttggagatggggaaacttggaggcaggaagtaccgtaaacaattccggaggatctggacaagcaggtcgatggtctcgtgattggtgctcagggcagtggtgtcaggctcaatgcggaggcattcggaagtggagggctctgcgacagctatggcctgctgggccacagggcccacctcctcctccccgccctcctgttgtgtatcaaggctctgatgttccggagaagggggtttcatcagccgcacatcctcactgcctttctccacccagcggtctcttggtgtcgtgtctgtgggcacgtagtcaaacttcaccttccaccgcaccacatgcttgcccacctccacggctgtgacacggcccgtgtaccactccctgttcacacgcacctccacgtgcagccctttatctttctgagctctcttgaggtcagccgagtcctcttccccagcactgtctgagagctcattcgagtccttcttttcctccttcacaacaaa

SEQ ID NO: 159270 - DNA, 1000 bp, Homo Sapiens
ttttttttttttttaaaggttataaaaatgtttagtctttgctttattgagttacaacaaatgagcaacaagttagaaaaattggttttattcaaacttcctagcgtttgacttgtgcggtgtactcaaatggggggcagtgtgggacggggagggattgcaaccagagttcatactgcaacacgtacaccagatatgtctcttggttttccttcttttaaaagttaggactaactgaaaaagtgcactcaggtatctaaaattgtcccaaaacaaacacacacacaaacaaaaaaaatcaattcatggtgaggctttgagctaaaatcttgtcaaataccacaccgagaaaaggcagtgaagaagagaaatgaaaaccaaagccattcacctctgtaccctccagataggaagatcttattgttgttgttttaatgtcacaatagtactgatcatgctaacagaggcgggagcctcttctgctggtatttagaaaggtgcttaaagaagtcagccacctgctacccagttctcccagggctggctgggcacagcctggcccaagaggccgagcagttgagaagccagatcccctcttggcagttcagaaagccttgtgtggggctaaggcagggacccccaaaaaggcagccaggggaagaactggaaaggaatttgatttggaagatctgccgtctgtcacctctctccaagttgagacaggggcctggatttcagcccttcctgccgagaaatctcccaaatttcaacctacctttaaaaataaagtctccctacttaaaatccagtagatatcatggcactaatgctaacacccctttccccaaattaataaaacaaaaataaaaaaaagaaaaagagaaaagagaaaagcaaggtggttagccctccctcctgaaaaaaaccttacaatggtagtgctggaaaaggaagttgcccttgattaaaaaggtaacaaaattcccacattgtacaaatc

SEQ ID NO: 159271 - DNA, 1000 bp, Homo Sapiens
aactttggaatatagaggaggaaattttattaggtaaaaacaatggattaagaaatgtaataaaagtactttaacccaataattccattttatactatatactaaaatacagaaaataatcacattgtagaatgcatttataccatttataattattataattcattacatttatagttagtacagtcaaaatttaagccatttttatttagtaaatctaattccaccagtcaatcaaaaattatttgttgatttattactattttgatctggcacctttaattattggtaatattcttttatttttctttttcctacttatgtttagaggtctgcagttctgtatacctccttatgttcccaaaagagagtaactctagggttttttagactctaatatttccctaggcttatttgttttatttctcttaaagcagtagaattcacatgtatttgaacccttcagtgggtttttctctcctttctacccactatcacattgcaattaactctttctcagattttcacttagtctaattattagaatgaatattcaagttatcctactttacagcaagggttttttaaatgatgtaacttctgcacatactattaagaatactataaatctctgtgcttcttgttaaaacattggaataaatagtcataaaaataagcatttctcaaaataaataacatcttgatattgcagaagaaacaaaataatcataaggaattgggtacataaacagaaagaagtaaaactacaagtatattcagaataaggaaataaaattcatatggttaagtaatatatatatgtgcacatatatatatcaaacaaagcatttatagccagactaaaatctcaccaaatatttaacttctccattaaagattttttaaaacatgttaaccatcattttactgaatacttaaattttatcttgaaatttgaaagctgagaagcatggtttatacataaatattgagaataagt

SEQ ID NO: 159272 - DNA, 1000 bp, Homo Sapiens
ttttttttttttttttctaaatcaatacaatttctcaaatttatttttttcttaaagaagtacttctaatctctgtcaaaagggaggtgaggaaaggtccttcctcccttgtaaacactgaaatacagatctgggaaaccaggatcaacacacacaaaaagtgcattttacaaaatatcaactaaaatatattttacatggattatgcttccattgaaattctaccagctgcattttcaggttcgaaaaaatatttccacatctaagagatttcaaaagcatttaagttcggggcagccaagaccctacctcctgggaggagggccttcatctcctttcctgctaggtgaggctgggctccttggcagcaagggcccagaatgagcaggctccaaggctggctctgcagagcccccactgccactctgccaacctcatttactgccccatcctcccagacagacaccttcctccaaacagcttattcaatataaggagatccaagtcccttcccttcaggtttgggatcaggcttcccaagcataaattcacctctgaagcctccaggcctcacccaaacccaatgaccaatcaggagcaactcatctactaagggacagggcatggcaagttgggggagccctcagggttcatttccacctccctctgcagcccctgcccagctgtcctcacccagtgccacctcctaagcctgctgggttcatctgcccttcctccctaagggaagacccagggctgcagttctcagccccagcccctgcccccaggggtatgcccttgtggaagtgctcagctagcaggttcccagcaccaggcccaagccacactgcactccactccctctcccaccatactcctctttggtacagataggaaataaccaggctgctccagccccctcacagagtctcagggccagggccaaggcctagtctccacaaggacaacaggggactgagcctgttagtctactctgggg

SEQ ID NO: 159273 - DNA, 1000 bp, Homo Sapiens
tttttttttttttttttattaaaccagatttattctccacaagctgaagatacctgaggttacatgaggactggcattaaataatttataaatgtatttttgactgacagacttttatcataaggattcatgtgtttacaaaagcaaaatccaacctctccagagctagaaagtgggaaggtgcccgggctgcaagcacagccttgggggaggatgaggccacataattctctctgcccacactctcagaatgccccaagaagttagtagctacacaaagccaagccttgggggaaaacctggtccgtggtgtggactctccaaaatgcagacccaaccggaggccgggcccgcctttccatctggaggcactgcagggcttctgaaagcggcccatcccaggagcctggcaaacacccccagagaccctcaggatgcgccagccccggggctttgtcctgagaagctggagctccgtggcccagcttgtggatgggtgcccagggggcaggccccatgccctcagcacgtgctgacacgctccctccggctccaacaaccacaccagaaccttccgtagaacatttaagtaatgaagtctcaacattacagtaaaaaggtgcaaagggtctcttttacaaatatttatgtacagccaagatcttgttgagttcagtatagcatgctgcgcgtacacatacgcagtgtgcacacggattcagggaactgagcggcacactgaagacgagatcacacgtgtgcacacggattcggggaactgagcggcacgctggaagacgagatcacacatgatgctattttacttttgatcccatgtgctttcctgggcatgatattttagatggaactttttctggtctgtgatctttggtagaaaaaaggtctctaggattattataaaaatgttgcatctattaaaaagaaaagggaaaaaagacagcttgcctcagctggcccaacccctgtcgcaaacacctga

SEQ ID NO: 159274 - DNA, 1000 bp, Homo Sapiens
atttaaaaaagtcctttacatatgtacatcagaacttgctataaatacatagaaaccgcaggcgccaccctgccagctccgcggcctggggcctgggagaggtgagcgggcaataacttaggggtcagggaagggctgggggagggagaattgcatatattagcaggggtctgccccacggagcccccgagacgcggggccctgagcacctggggtttcctgagtttctagctcttgggaccacccggtttcacggatttcaagggtttgggcccactgagcccttgtgggtgcccagtcccagagcagccacccggagccccttcctacttaggaggagaggcacagagagggccctgccacgccccggcccccagctgtcctgagtgggccccgccagggctgaccaggtgggggcccgggtcgggcgctgaaggcactgcggccagggcctagggctcctctgagcagtggtcaggggaccttggccctgctccccaccgctgctcctaggggagaaacggtccctgtgtcttggggcatgtttcgcctaaaggcgtgtcagagaggagcctgggcgccggggaagggtgggctgaactggatcacgctctgccgctcgggaccaccgcccgccgcgccccccgcccccgcgccctcccccagcgcgccctcggagggcggccccgcgtgcagcgagcgcagcatgtcctccagcacctccttgaagttgatgtcgcagccctggtgcgcgagggccgcagggtcggcctgggcgtcgggggtgcccagcggcacgacgccggggccggcgtccagggacagcggcgccgggaaagagaagtgcgggggcggcgggaaggcctcggccggggggctgtaggtgaggtccagcacctctccggggccgcaaggcagcgccagcgggcgcggggcgggcggggcggggcagcccagggcgggcgcctgcctgcgcttcacgtccgcatccatcagccgc

SEQ ID NO: 159275 - DNA, 1000 bp, Homo Sapiens
gacccatttacatttataggagaaacagtggaccagggagcgacacactcagcttccctacttcaggcaactggccgactccgaccaacagagaaatcgggaacatcatcatacggcttttcggtcacctctgcggacgctcagtcccactccccctccccctcagcgtcgtcctcgtgcggcgcctccaggtcgttgaggtggaagttggccatcatgtcgcgcacagccagcatcagcctgttcaggccctggttgcggttcagacccccagccactccttcctcgggcctctccccctccatggtatagtttggcaacagtgaccggaagaagagagcaatggtgtttccatggctgataggacttagcctctctggcctgacgtaggagtagattgtgtccgaaggaggcagaggatcaaaccccatcacagactgcgtggtcacgtccgggggcagggcagcgacggcttccttgatctcagagaggatcacatggcggtggatattcctgggtgcacgctggtagagcaccttccgccggttctcacaggcttccacggctgggtccccggcgtccactgcttgcagaacctcgtggacgttctcctccagccagctcatggtggcgggctctttccagagaaagtgtgacctcccaaggtacaggttcaccagctggctcagggcagggggctggcttatttcagcattgggtccaaagaagcggtgactggaaacgctggcgtcgggccgcacactgcaagactcgagcaggggcaggaggactccagggaacatggtgagcgcctgctgtatcaggagagaggccttctgcctggcagagctctgctcacactcagggaggtctgtctgctggctcagcaggaaatacgccagtggaacagagaaggcaaaattagggagctgggacaggttccgatgagcctcccactcctggaagaggcggatcaggtactcgtagttccgggcccgca

SEQ ID NO: 159276 - DNA, 1000 bp, Homo Sapiens
aaaaactaagtcagatttttatttttttttccatagaccacatcatttaataataaaaaaaataaaaataaaaattgaacaaaaggaaaaggtggatataaagtggaacctgtgggaaagaggcaagggctgcaggacagaagagactgggaactgcaggggccctgggactcaggaggagatgctgattcagctcataggtgacccagtcctggccccggctgttcccaagagaaggctgtaagtacccagggaggtggtaagcaggatggaggaaaaatcagaggactggggcacctggctgttccccatctctggccaaccacctccttgcctaacctagctcttgcctctcagacttaatgggaaatgagagggagggtcgggctaagtcccaagagataggttaagggggtgtgtttggggggaaaaggatggccacttttccatttggtatgtatgtagggataggtgatgtgaaagacccttggctccagggtggtggagactgtgcctatccctctgtggccataaccccctggggccgagtggctggtacctgcagctctagtgttttcccagctagcggcgcccaccccggtcccgcacaggtgtgctccgactccggcttctgctgtggcgcttggtgtccctgcgatccctttccctgcctcgttctcggtccctttccctatcccgatctcggtcccccctgtcccgctccctttctctctctctctccctgtccctctcccgactgtgctcccgacgtttctctcgctccagctgtcggttccgttcccgctcggcttccttctcccgctccttttgctcttcttcttcttgctcctttcgccgcttctcccgctccttggcccgttcggcccgctctgcctctttctgaacgatctggctgtcagtcagtgggagccaatagatgcagggagctgccttggtctttcggaaaaggtcatccagcagcttggcaggtggttcctcc

SEQ ID NO: 159277 - DNA, 1000 bp, Homo Sapiens
ctttttttatttttattttttcctgtaaaacagcaaacacctccatgagaagtcttggaaacttggaagtgacttcatctctcttcaatgtactgcatccataatttatcgccatgtgcaacagctttgcgttttctaaggcacaatttttaatgaaatgatgtgtagatttcaatctaataacagctcatccaaatgacaaatatggtcgaaatccctccagtggctgaggaaatttctgcacctatatggaacccacatgcaaagaacccatctagcatgtaataaataatcgctagccatactcaataagacacggaaaaattattgcttacataacagaaaaacatctacttgacccccttttatgactacatcaatctattaggagtgtatccatagtctacattcacaaaatgtcatcttgacttatttgccattgatttaaggcagaataaatagtccccctttccccagtcttaacaacaaaaaacaaaaaaccagcctggagatctacattgtgatgctttttaataacttgactcctttcttggccagctgaaactcgtcgcacagggcagaaaataaaccagctctccacaagagttcctctctaaacttctccatgggcaaggtccggagttcttgatagcaaaaaaagtgatggagaatggaggagagtaggtattcattgaagtgggcagggcataatctgtgctgtaggttcttgctgatcacagaccaggggctgaccacatcatataccacatagattctattaagatggacttaacgcttttctttggacacctgtgcttcaggcccttaaggagaacttgccagcaagggtgagcagtgctcacacctaatgatgaacttatctcggtgcctcatcttccatatacctcatgttaagtctcttattgaagactcctaatctagtgcctcgagagaagcaggcaacagaggcctgatgtctgacattgactctttggaagat

SEQ ID NO: 159278 - DNA, 1000 bp, Homo Sapiens
ctttcttttggtggtaaataggtatttatttgaaatgaaaaaaaaattacttaagtacctggactattgcatttaatcatgtattgtaattgtgttactctacctttttgcatcagagacaaatatacaatgaacattcagatatcacagactgcacactagatagtaattcttcaggtcttttacataaccaccaagaaacagatattggtttctgcaatatagtataaaagtccacaatcaatccagtcttagccagtatcttcaatttacttctgttgctgtacaaataattggccattactagggcttacaagttaataacaggacaaaaaatatacattgcactgacacaaaaagtcagctgtgttaagagtcatgcaacaagtaaccaaacttgctgaaattaaaaatactttctaaaaacagttttaacggcataaatattttatacacagttcatttaccaaaacaaaatgtatttaaatgatacaaagcaaaaataagtttctaccaactttatacataagaaagtgcaaaataacttatctagagtgttttgctattatccagacggatggctgctatgggcagctattctcttcttcaaaagcatgacattagagttgcacactacatagaaatgttagaatacatggatgaacaaatgaacaggtggatggatgaatgaacaaactacaaagatcaggcaggagccctatgaggtactctcagaaaaagaatgcagaccatactaaggtagatgtacatgttgacaatagatgttggtaaataaatttacatggaacacagaaagatatccagagaaataattagtttatgtatgtgagtgtacttgtatgtgtgagtgattctgttgatttctgcattagaggcaaaaagaaaagaaacccgattgaacaaaacagttgcccacagcaccagctgccagaggaaatactaccatgagggttttggtttccaccttctagttatggaa

SEQ ID NO: 159279 - DNA, 1000 bp, Homo Sapiens
ttttttttttttttttggtgttaaatactaggttttaattctccgtttaggaaactccttacagatggacttccttgttctccggcaacaaaatgtaagacatgcaaacatgagagagtacaaagatgacagggagaaaaaaaatctcaactctaacaaacctaaggaacaatgagtctctaagagttggagtaagaaaacatggacttgaaaatccagctttatcatgacatgagttggcttaagccagctgatcacatctaaaattcttggcataatttgaacctaaagtaatgagctcacttccccaagatgcaaaaaagtagtctacctgctttatagttacaccctatatataatctgtatatatccatatgtttctatatattgcacttaaatttacaggactgtagtaagacggctgggagtacctcaaagaggcagagaagcagcaggcataaactttcctaaatcaagtaaacagtgtcaggaattccgagtgctggttataggtataccgaaacgcctgatgacccctatctaatttctagttatctacacttagtcatttacacacagtctcatttggcatccagaacatgtacacatgtgtggttctatagcactcagtgctggtcataccatgtcatttttactagtgttatattaaaagaagacactttagaccaaggatatatacttttatgaaaataaaacacacaggtcttcgatgtcaggcctccaaggtctacctcaaagaagactgccctcagaaggcttaacaaaggatgccagcaagtatggatggaaccagaccacatctctcttcagctctctggtgtagcagggctagagactcacttctatcctaaggaccatgaaagtctaagcacagaggctgagcattcagtctttggtccctgtataaatccaggtcaaaaatcctcttgccaccctggacagcctggcttgttcaatttagaatatatttccaccaaat

SEQ ID NO: 159280 - DNA, 1000 bp, Homo Sapiens
gtgttttatattttttaataaagtttgtaatccaatggacacacaaaacaaaactgcgctgagaaaaacagtttcataaattaataagtgttaggaagttgggggaagagatcaaggtaataggaagaggggttagccagtctttttgtacaggtgccgtgtgacacttccacatcgcgggagcaggacccgtgctgtaccgaagcgcacttatacaaatgagtgggcaatacaaagtctgaatatgaaaataagatttcctctgaaaacacatttttggcacagattaaaaaaaacgtatgtcgggggatttgattttttaagtcagtattatatatatttatatatattatatatttatatatacacacatcccaagttctgcatatcccaccaagagaaaacctttctgtttgctcttcaactgtaaactgtacatcccggtgaatcaaagacggtggcagcaggagaattaaggtgacgcatccaaatgagcaagggagatgggggtggacaaaaaaaaccaatgaaatgttccttgaccccaaggtctcagcagaagtttgaagtccttcctgcgttaagagtctgcaatgtgtgtctacacacaccaagacatccagagtgtcacagcctgtcttcactgggcaaaagtccaagtcactaatttagtgcaaaggcagttctgttttcttgtttcttaaaaacaaacaaacaaaaaattttcattccactgccctgttccttttctccaaaaagaggaaagagaaacccagccccggtgtctgcgagtccatgggttggtgatgtgtccttgggctaaagcattatgtaaacatacaaggtagcagcaccactcctagaggaagtctggccgactgagccgggcggcaggacagcaaacggctggccgtctggcagtggagtctgtccccttcggcagcttcttcctctgcttggctgggttgtcctttgtttttactgcagagccctgggaaga

SEQ ID NO: 159281 - DNA, 1000 bp, Homo Sapiens; identical to SEQ ID NO: 157573

SEQ ID NO: 159282 - DNA, 1000 bp, Homo Sapiens
aatagaagaacacagttgtacctctttattggcacagtaacttttcaaaggctggtatgaataaaaagttccaagtagcaagacaaggtggtctggagccactgctcagaactttccgacagccgacgaaagcacatcaatgaacaaggccttgcattatgggagggttgaggatatacagcgagggaatcatgcagtgtaagtcccgggggacgagcgctgtgcgatgcagcccctactgctcaaaccagtacatggcagcgtgctcatttgtactgtgtaggcctttgaatgaatatgatcattttacaccaccggctatggatttgaagccatacgtgtttaaccgtgtgccatgtgatttcctgtgatctatgctgaagtcgggaggtgaaatttaactaaagggtacacaatccacttatccagaaatacagggcataggaaagaacagcctcctcatccatgagtaacacctaaaacatggggctcaattcatagttttgcaaggggtgacactggcgaagctaaaacaacaatgtagtttcaagatttaggtgcgttaggtgaaaaaaaaggactgtggaggaaaaaaataatctagaaatgattttttaaaatctgtattttgaagaaaggaagcaccaccaattgcataaatttataaaattacagtaataaacatgtaaataattatcaggtttataataccaataaaacacaagtagctacaaagaaataaaatatatgtcccgtatactgtattataataaaaccattggaagtacaataaacagactgttgaaccgtagaaaaacaactgtacagagtgtgcatggattgctcctttcctccgctactctctcgctctggccacgtccacacttttcccagcctctctcttgctacctaggggtagcacagagccgtaaatgaggagcttgaaaatcagagtgtatcaccacgagatggataagaaagaacccacacacacacacac

SEQ ID NO: 159283 - DNA, 1000 bp, Homo Sapiens
cgcagcgttcatgaacctttaattcattatgaacctagaggcagggacattaggcaaaaaatacagcgtatccttcatctcgggtggggaaaaaccagggcactgggttttgccgcgtctttgcacagagtaagacacagagataccttcgtggggagagtgtgcagctccggcctgcccttctgtggcccatctgcgcaggccgcccaggagcccaccaggggatgggtgtgacccccaagggacaagggcagcaggggcacccgcccgcttctttacaatataaatagcattttcaaacaacataagaatacagtgtcagcgccacgccgggcgagggctgcgtgcagagggacacctccacgttttggctgacaccccccaacctccccgaccccggccctctccagggcaaccgcccccctcccccaccaaggaaatgaaaggcttgctcctgcgtaacactctctctgttttccttagtcctctctagcccggggactgttaggacactcttttataatataaacattgctttttttttttttttggagacagggtctcgctctgttgcccaggctggagtgcagtggtgcaatctgagctgactgcagcctcaacctcctggactcaagcaatcctcccaccacagcctcccgagtagctgggaccacaggtgcgcaccaccacacctagctaatttgtaaaaaatttgtagtgatggggtcttgctatatagcccaggctggtcccaaactcctgcctcagccattttttgtttttaatataagcaaattatctcctccatccctccctggggcaggagacagctaaggtggggaaggctccccagaggggtgcagagctggtgagggagaggcacctggagaaggcgcttcccagcctgggctgaaggccgttttttctctatcagctcaacccactcctaagaagcagattcccctcaggtgacagcagcgtgggtgggtggagcgaggac

SEQ ID NO: 159284 - DNA, 1000 bp, Homo Sapiens
tttttttttttttttcctagaacaaaatggttttaatcaattgcgtcaccctcactctcctgggagcggagcaacaaaaaggctcggctcctgcccccagaggacagtaaggcttatgtgtctctccacactgcagggcccaggctgggcaggcagggggtgggaagcaggacagggggcagggagggagggtgggaggcagggaggaaatggcaggtggctggaacacaagaaagcaaaggggacccagctggtccttgggccccagggcccagccccaatactcctgctctcccttctccctggctagagaaaggtcacggagaagagacaggggagcaggtcccagcagcaggagaagcagcagcagctgtttccttcaccaataaatatacttcattaccaagctagaagagaggggtgggaagagggactggggtgggaaggaagggggagaagctgccacctgtgttgctgggattaaagcaatgagatggtgccagaccccccaccactatcctcaccctccacttgtcttcttaaaactgtgaaaaagcttttaacatggccctcctgtctccagggctgctctgaagcctgactgagaggaggcacctggcagagacaggggctgagggagggagcgagggagtggagggagaggagaagggaggctgcttttccccaggggctgcagctggagggctggagccaagtaagcactgaaggggaagcagggagggagagagggggaaggatgaaccaactacctggagcagctggagctaagagccgggggcagaggggaggagaggcctggtgagtggtgggttgatcgctgcatccagtgtaaagcttggggctgctggggagggaggggccgagtaagggactttcccatctgagtggctcaggagacccacccctctcccctcagagcagcaggggacagagaaaagccatcacttctttggtctttgtggcggctcagcatgtggga

SEQ ID NO: 159285 - DNA, 1000 bp, Homo Sapiens
ttttttttttttttcgtttttaaacttgagtcaatataaaccttgttcaaaatgttatgaaaaaatgtacatgtttatacaaggcaggttatggcaggacactaggggttctccccacttgggtggccccaggaggagaggctggagtctcagtttgtatctcttatctcctcccaccacccttcccacccagtcccccaggaaccagcagcgccctgccccctagtgagtgtactcacacccctattccctggggaagcagctagttgacctttgccattttccccacacccctggagaaaagagccaggatcagccaggccctctcccttgcaattgttcgcccctctgggccaaaccaaagggacgctgctctgtacaggtagagtccaaggaggtgtcagctcatcatgtcattgctattcacgccataagtggaattcttcattgagtcgttgacttctcgacggaatgctgacaggttctgggtgaacctgtctctgtttttcgtaagaagatttcgctcgatgccttccatcaggttctcaaaacacaggtgcatggcctgctgcttctccggtggctggctgttcacaatactgtttcttaggtcagaaaaatacttttcattaagcaatatcaagccaagtagtggtcgggacatagaccactggttcctacagtcttcaaagatgatgatgttcagcaccgtggacagcatctgctggatcatctctggatgctgctgcatgatgtgcagaaagcggtcgctctcctggttcaggggtgtggtcctcttcttggtgctacgtgacagctgcttgaagaggtatgtcacaatgtggtccaggcaggagcagcagcctgtgcataccatggtgtcaagtgcagtaagtccttcagaaatggaagagagaatatacatgatgacgtgaggttccaggcttgcaataaagttcatatggtcctgggtcaggacttccagtagtgaataataaga

SEQ ID NO: 159286 - DNA, 1000 bp, Homo Sapiens
ttttttttttttttttttatacagaactgtaccatttattatacacacaagtatatcagttccctttgttaacaaaggctggttatagataatatggaatgttacagtaccatcttgcataaaattctagtacgattttgtacttgaaaaagggtgcaaaaacaccagactaataaatctgactgaattgaaatatctcttctttctttttaaaaagtacatcattaacacatacaccacaaactgtacataagctcactttaaatcaccaactggagatatggtagcatgtatactgtagtgttaattatccctcccatcagtttaatttattaaagccttacactgctgttcattcaggagcctttgttgatgtgcaagcctgtaatatgaattactgaactcaggtaagtagaatttaaaggaggccaacaacagctgccaagaattatttgcagtaagaaatgtccttctcacagaagactcaattaggagcaaacattttttagactatcttcctgctttcaaatatattgtagccggtcaagattctccattttgaactctggatgctggtggctgcatgaaatccttaaaaggaactagtgcctctttaagtgcagaacagacttctgaagaagaacaggtgatgcattctactaaagttgggtataaggcaattacttgtgcccaggtatttccatcaacattctcaggctgagttttcttaagtgaatcaataagagtactgactgcttttaaaacaaatataatttctgttacttgttgccttggaagagggcatttaccacttaatctttcatcctctatatagcgatgtagtacatcttgggacctctttaaaagcactgagagtgccattcgtgagatgtagccttcttgaggtgttgtgactttattactgaaggaaaactggagtaatgtttcaaaacacattttagaaaattcctctctcaaacgaatatcaatctctgcttct

SEQ ID NO: 159287 - DNA, 1000 bp, Homo Sapiens
ttttttttttttttttcgtttcttaacgtattttattatatatatttgtgtccaagaacaaagatactttgacatctttatcacagcaggggacagtaaggttggcttctctaatgcccaccatcttgtgttttcagaatctttccacttcgcctctggctgagccaccccactttgttgaacatattagatctaccttgatgtttttaaaaaaacacccatctccagctcacacactgttttctggaaataaagccctactctacaaaaaaaatgaagatggcttgtgggaaaagatctcttctccaggaagttaaaaaacatgaattaccaaagaaagcaccttcttggcctgacagaccattggtggggctggcacgaatccagatctggatcctacatctgttgggtcttaggcctccttccctcctcagtgtctttcaaatgactttcatcaaatgactttcaaaataaaaccttattttggcaaaggcatttgttgagacttattttttggtttactaaaaaattgatgtccagttttttttttggtcggtaataacgggcagaggagaacctacctctcactggtctatcggcagctatttcaggtacgtgggtaagtcttttgtaataagatttataaactgaattcactggtaacaatttcaagaacctttattgaaaccaacattcaaataatatctcaagggtgaaatgtttcagcaaaaccaatttaacaattccaaatatatataaaaacatgtaattttcttgaaggtgataatttacccctcccccattttatctgctatacttcattgcaccaaatagggaagactgtttaatcatctgcaccaaaaaaaaccccctgcattttgacaagtgtaaatgtcaaaaatcccatcaaatcagagtataattataggcttaatatactataactaaggcttccaatactacagtccagaaacccagtgtgaattttcccattttcagg

SEQ ID NO: 159288 - DNA, 1000 bp, Homo Sapiens
tttttttttttttttttttgttttttttgcataatacataattttttattcttgtttccagggagtttcacatgatattttaaagcagaagcagattctccacatgtagaacttggcagacaataataacgtattatctatgccctgctgggatacaagcacgcattcacacctcaatagcaatcctcgcaaatcgatactgcagagaggcgggaggcctcagtagcactaagcccctctgcgctgcaggctggctggacaccatatccagcaagcctgtcaagctaacaaaccccagggcttctccacagccaacagccatggaaaaatctccctgagtcacaaagcctaggagagttctggagcagtgcaacgtcacacgcggcagagggcctgaccacagccctagagtcagagcttcctgcccagccacgggctcttcccccgccgggccatcagaagaggcacgtcctggcttctgcctcttctcccttttcttcttctctttctgtttcaggatcttgctcctgaatgggtcactgtgtttggattcctggggcccacagtaatgccagtcctcatggagctggaggaagtcctccttggctgggacacagatcatggtgtgaggctcggggctgcccttgctgagcagggacaggctgacccaaaccagggccctggggaagtggcccaagatggacaggcaagcctctctggtcaatccttgctggcctctgccgggagctcgccggcctccccgactatcctcagaactgggcccacaccaggctgacagttgcttcagtaattttctactcctgagaacgcagaggtgactccctgtggcagcaacatggttttcactggcctcctggtctgtgatcctctcaggccctgccgattcttgacaccctgcatccattacctcctctgcctccctggggtgctctatggatgtgcccacttcatcagatggctgatgagtttttttaggcat

SEQ ID NO: 159289 - DNA, 1000 bp, Homo Sapiens
ttttttttttttttttttttttttttttttttcacaagttatattttattttaacacgagattaacatatagttacaaggtcaatacaagcctccagtggaagctctttatttggtttaattccatctccagagacaaacaggcaactctaggacctttacagtggcgatcggcctcacacagcaaaatgcctccaaagtttagaattagtgcaacacacatacgaacattttaaaggtgctcaacatcaggttaaaatagaattctggacctttttaaaaagtttttggatgatataagcacaggaggcagagccaataagaaacatgaaaccaatatttctggaaaaacacttagcatgaacgtcactttttgacgtcgtgtaaactttcttctgcaatgacggatgttaccaaaaggcatcgagacctttgcgctgcgctggttagacaagccgcaggcttatctccacggtgagcaggataaaaacccccaaggaacagcccatgacaaccttctgtgcctttttatactttcccatcctacaaaggaaaaactgggtaaaggacaagttcctccctttcactgcgtttctaagaacttttcagggcaggttcttttaaaattagtcatcttacaacacaacagtattctagcacggtggcgaagtgacaggcggcagatacgggggaggaaggagacgttcacgggaaattccacattctactctatgtgaactgctccagaaaaatacagacatgatttcacagtaggattcccagagtaaatgatgatacataggacaactgacctcctctaagaagcccggctggggcagcagtgagcttttcatggagccacgcagactggcccggaagcaacacccaggttcaacatttaagagcactcgctataacattctttttggacgcaggtggtggaaaagtttaaaaaacaggcggaggagtgacggggggatacaagcatatcctatactggg

SEQ ID NO: 159290 - DNA, 1000 bp, Homo Sapiens
ttttttttttttttttgtgaaatatatttatgtttttatttaggaataatcaaaaggtttgaagtaccattgaggcccatttcaaattgtacaagcaatttgtccgtgttcccctcccttatccaaatccacagatacaaaatctaggaaatgtgcaatttgcatcttagaaatagcagcatccccacaggggacctcgtgaggcctggagattcagccccaagagggcaaccccactcctgcctcagcacgaccacagtccaaaccgaagttaagttccatttttttgttaaaacgtttacccagggtaaagaattcccattctacccaaggcttaagtgatagagtatgctgttttctcggtttggtctctcacacctggccatggcaggagatgggaccctcttgcagagtttggctaaagtttcattgtgcctcaaaacaaacaaaaacagggcagttgcctcttacttgtttagcaccaagatgatcaccttttcagccatctctcctgacagcagactgctcaacagtcactccccagtcttattgcccagaagtccggccacagggaacaaggctttgtgctgaagaccaaaatgcaaatgggtgctagaaaaccaggaatcaagaccttgtcaggaggcatctacaggcctttggcaacctccctgacttccacaaaggctgccctcagtaaaactcaatgaacaatggccagcaggggagaaaggaaggtgggcgtgttttctctttaataacaattatggcacaatctgaccctcctaacacttctgaacaaagcaactgctcagaagcacagcgggaaccctctacacaggggtgactgcttctcccctggccccgacccagtctaaccgagaacaaccggattgctgtgctgggtccctgctgaggagtagggactggcgctcctcactcctgctgacaatctcatgtggggctctggccctgttccaagcaaactgcaagaacgaga

SEQ ID NO: 159291 - DNA, 1000 bp, Homo Sapiens
ttttttttttttttttttttttttacagtataaccgttacattttattattagttattgttgtcaatctcttaaggtgcctaattcataaacttaatcacaggtatgtatgcataggaaaaaacagtatgtataaggtttgttattatctgtggttttagacatccactgggggtctggttttagatatccactgtatcccctgtggataagggggtaactgctgtatcttttagtagaagcaagagcagccccatgtgggggctaacactggacactggtcagtttcagctcctcatgcaaagtgagggtatccttgtggctccagccctggggccccctgcggtcacctttggctccacagtctggttcttgaacccaagggcagacagcttgctacagcccaggcctgaggatgcacttccttcaccaggacccacaacccctgcccatgaagacctgtggagctcagggcatcccctgatgcaggttggtcaggacctgcccagcttgcaccagcaggttctgcgtctccatctgacctggcagaccttgcactcttccacccactgtggaggactaagtgtcttgaacttccagaacacagccagggccccatacttggcctggggagaagttgggaggcctaagcagtggttgggggccacagcaaggcattgcacacagtggtttttatttctttcagggatttattaaggcattgagcacagtgtaatttctagccaagtgaaatgaatccaaggaaatatatcaggacctgagggatgtttttttaaagttactggaaaggatgatgagctgagagcacgtgtacagccacgcctgtgcgcagcgcccactctgtgcaataaacatgttctgcccatgttcctcagtcaggaggttcaggctcccggagagcacctgagggttccatcactttggtgcccaacaagcacatgccccccaacctggtgccaagaggcaggaatgacccccat

SEQ ID NO: 159292 - DNA, 1000 bp, Homo Sapiens
agggcttgaaaggactttattgtggctgtggtgaagcaggccctggtcttggcagatgataccagaagggcactgagtgccagcgtgcaacttgaatttgatcccataaagtcaggcatcaggaagccattcagaatttttcaccctgtcagatgctcagatttgctagagaactctggtagtggcaagaaccagagctgttactcagaattgggacagaggcattgtcccaaaaaaaaaaaagcccaaatcagagcagtggcaatgtaagtgcagggaggacatgatgtgggattatttagaaaacaggccaaatgacatgcaactactctgcggatacagacgaagcaggaatcagggacccaataagtctcaggtgctttcaagtaagagcatgtaggtggaaaggggcaggactctgggttccattctaagtaactgagactgaagcaacagtggaacctccagatacagataacccctgacagactgaaatacgatctggcgacagcaaggaggtggcagcttgagagaggtctacaacccacctaatggtttagagccacctgactaccaggcctgtgtgtggacgggaaagtcctgaggattggactctggaaaaccatcacacttaagagacagaggaaaaagagcagtcacggaggtaggtcacgaaatgggtcaacaggacccccgaagagttcaagatactggaaagcactggccatgagtgccagatctccagcacacacatcatgaatttgcttctccccagaggaaaagaagctccttcagggtggtgcctggctcagggtagctggtcaacaactagcttttaaaaaaacagagacacggtctcactatgtagcccaggctggacttgaaatcctgggctcaagcggtcatcccactcagcctcccaaaatgctgggactacaggcgtgagccactgtgcacagccaataactacttgttaagtgaatgaagaggtaggagctgg

SEQ ID NO: 159293 - DNA, 1000 bp, Homo Sapiens
ttttttttttgaaaattcaagctactcatgtttattaactgatctacatttgacaaaacaaagataggggcacaaagagctgtttgacaaagtcaaatcccaggtatcgaacaatagtattcccctggctgccctagagggcacttgtgcccactctgagggggatgtcctctgccatgcgaccgctcagttatcacactgcactgctgttgggttgcatgtggagtacaggtctgcatgcatctgacatcagagaagtggcccactaaacactaagagccctagttctagatgtcacaagttgatgttagtaaccaccaagtactaattctgtactaaaatggtcagaaaagataacaagctttgagtactgtgtaaaattataccctttatagggaataggctcttgtaagctgccttttaacttatttcctcccttgccaaagtctattcatttatgtcaaatcaagaacatacagcacaacattttctaaaaaagcactttaacaatggtcattaacttctccctaaggactcatgcctaaggttatttacataagatttgggatcttcataatttaggagaacttttaattctgagctcgggaagatatttctcctattagacaataggacactcagaaatacctgaggtataatcactgaaaaccttcttaaaggcgaaaaaaaaaaaagattgaggtttcctatactggcatgaaagtacacatacaatttttatcgtagaaaagactaaaatgtgaatagtgacaaaacataacagataaattgggaggaatcagctattaggctccaattcttcttactatattttgcagacaattctagtattatagagattatcaggatataccaaaaatgattttaggtagaaacttcaaaaaacagcaaaacccagttttaagacaggattcctttctagagacattacacaacagtatacacttaaggtgtttctggtggaacatcaacatcaatg

SEQ ID NO: 159294 - DNA, 1000 bp, Homo Sapiens
ttggagggcaaagacttttttttttaattggacttggctttgacgagtactgacaaaccctgcagacactagtacaatttgatcgtaaacaaagtccttgccagcatagtccagcaaattctgataaaacacatacaaaagttaaaagacagctcgatttcatcttcctcccaacacctgcaactgtttccagattttctgtgtagtcttctttgtgctttcagttcagtaaaaattagaaaggataacaaacttgtaaagtcagatacctaattgtacaaaattgactagaccatggagaagggggaagcatcattttacaaaatattgttaagatcaccagcattaatttaaattattttcctttctggacttccaagtccacttggcaattttacttaggaaaatatcatgcgtaaatagaaaaccagtattctaaacacattttctttatgtgacatattcttgtgcgtctatgtaatgagaatttttaaaaaattgttttcttcctgctgtcaaaacttaggcattaaaaataagggactgtaaacctagttgacttacccataaaaaggagtaagttcggagaatgagagaaggaccaatagaatctaagaagcaccctgtcactcccagccgggacctctcaggcatggttttgacaggaggtgcatttataggacattcactggttcctcagaatggacagataatatagaaatgctaggaaaaaacattcctgcaatagtctgcagaacaaatgtgccagttttgccttagatgtcctaagacatctcaacaatgttggattatatggcccgtttggctatatgacccatctttaaagctgaaataaaaattgttagaaaaatattctaggaagaatgaaacttaaaaaaaaaaaagaaaagttaaaactatttgctcaccttaattgtttcactgtatcagttttggttctgaatgggatgtgaggatcctatctaatgcagccattaag

SEQ ID NO: 159295 - DNA, 1000 bp, Homo Sapiens
caaaattaaaagctttagtatttcaaaggacatcatcaaggaaatgaaacagctcacggagaaaaattttataatcatataccagttaaagggacttgtgccaggctataaaaggactcttacaactcaataataaaaagacaaataacccaattaaaaaatgagcaagtgatctaaagatagctgtcctaagaagatatgcaaatggccaataagctcatgaaaagatgctcaatatcattcgccatcagggaaatgcaaaccaaaatcacaatgagatgccacattacccctactaggatggctaagttaaaagatagataataaaaagcactgagggatgtggagtcatcagaaccctcatgccctgttgatgggatataaaattgtgtcaccacattggaaaacagtttgggagtccctcaagggttaaatagagtttcatatgatccagcaaatctgctcccaggcatataccaaagagaaatgaaaacatatgtccacacaaaaactcatacacaaaagttcctagcagcattatgtataatagtcaagaagtagaaacgatccaaatgtccaccaatcgatgcatgataaataaaatgtagtactaccattccatacaatggaatattacccgatgaaaaaataaagttgaacacatgctacaacatggatgaactttgcttataagaacattgaaaagaaaatgccaaaagaaaaatgagttttagctcaaatttttttttaagaggcctagcctgctcaagttatcctgttaaaaaaaaaaaaaaaaaaaaaactcttcccatatctaaggtgaaaataaaaaacatttttaaaagtttaatataaagaatgaaataatttcaggtcaagtttattatacagaaattatattaatgggtgggataaatactttacaggagagggtcacactctcagacactttggctcccaaagggcttggagcttttgtgaggctgagcatcttccaacc

SEQ ID NO: 159296 - DNA, 1000 bp, Homo Sapiens
ggcagtaaacaagacaaagtctttattcaagataatacatcagttctctaatacaaccaccatagcagcaaaaatagaagaagtctgattgttaagccacatcaccccaccctttacagtgcatattttcactgtttaggttaagtcatcaataagtaagggccgaactgtatttcatgggtagcaaaatcaaaccagattttaacttgaaatgctactagcaaaaggtcacagaaacaaatatctttagaggtgggtaagattttaggggttttattccatcactttacaaataaaattgaggctcacaggagttatttgcttaaggtcacagaaccaaccaaacaaggcagatacagtagggcaagaactaagtcttgggtcatttttcggttaatacacgttaacaattatatgtattttgtacatgtatactctaggtttattgggctatattaaaataaaaaaatttactgcttatgctaatagagtaaaggaagggcatgaattcataaaactcataaaacaatatttttttattttgtattagtgaaaaatttaatactaactaaacttttatgtccagggacatgacgtaaaattgttaattaatgttgttcctttcaccttttacctccttttccttctttttaccatctactcgtccctccccattaataaagtattagtaagttgcaaaataaactaaggtaggtactagatgagacagagacagtgaaaaccaaaaccaaacaacccctaccaccagaatccataagctagataatctggaataactgaaaattgctgcagtgaggtcaaaaatcagcgtgataggatattttcaaagtagcagttaatatttattgggtattactatatgccaggaactgttctaagtgttttgcctgtaataactcatttgctcctaattaccataggaagttggtggtatgattattcctgacttacagatgatgacactaacacacagattaag

SEQ ID NO: 159297 - DNA, 1000 bp, Homo Sapiens
caaagtcaattaaattttatttcaaccaagaatataaaataaatgcaatgtaatttattttagttttaacagtcatttcaagaaggaagtcaggtcaactcaaaagcaggaaaccctcgctccaaagcagtagctcgtcctgcactccatggagcaggcctcgctggggtgcagcggctctgagcacaaacctcgcagtggagcacgaaaagctacagtcatctctataaccatataaagggggatgcgtgcagaaaatgactgaaaaaagagacaagaacaggtacacttcacaaataggaattataggaatatacaaactaggcagtttagaaaggatatactacataacatatataaaaagtactttaaattgttgttaaaaaggacaccttcagtccagattttgtgtaatacttttagtgtctacacagacaaatctttaaaaaaattaaatagtattaatttactaaatatttaggagataacagtgcattaagggtttttttttttatataatacatacatatcacccctttgcagtgatagcatagaagagtaagtatggccttaggtacaacacgttttttaaaaaccctaaaacaatgaactttgttatatttgtgactatttttgaggattatggggacctaaactgctatgttttatacaaaatattacttgtacttgaatccttcaagcctctgttggtctaactgccatttcactgcctttctctactccctaggaagacatcatcatagagttttggatttgtaatttccatagaattcttccttcattgtatagtttctgctgcataaatttactcaaaagcacatcaagttgcatgtcttattttccaactatttttttcttttcttttacctttagcagagaaaacagcatcattttagaggcatagagaacaagtagcagttgcttcaccaggaatgaggcagcacacataggtaaatgtcatccctttccattcttaaga

SEQ ID NO: 159298 - DNA, 1000 bp, Homo Sapiens
acttttttttttcttttatgtgctgggttctgtcagatcacatgtacttttaatgtggatttaatagcagccatttgtttagtagcccctctgtgccagctactgtccacatatgaccttactgaatccttgtcacagtacatgatgtagcaggatttactggtgaggaaggggagacataggttaagtgactactcccggtcacacagctgtgaggtggtggtgccagagttggaatatggccctttcggactccagagtatggtatttatttcttcacaggtgctctcttttctgctgtggcctgtgtgaatagcctggccatgctgacggcctccggcatcttcaactcactctacccagccactctgaactttatgaaggggttccccttcctcctgggagctggcctcctgctcatcccggctgttctgattgggtaatgcagggccctgaacccatgctcataatggagccctttctcttaaaagtttcctcttctcctcccaaccagaaatggcagcttcattcctggaatccttaccctctgggtgtcttgtcccaggttgcccctctccttgcagatggctgcctaatcctccaggagccattttccaagggcgagatggcgagctaggtggaggaaggatcaggctaacattgctgcttggcaaggctgtgttctctctcccagttcccctatttccctccattcccattttatagatggaactatggcagcagaactgtgttaaagggaaggccaggaagctttgtcagctagttgtggctgggccacaggctagcttgacccgctgactttttcctgtatgatattaagaattatatttcatggccgggcgtggaggctcttgcctgtaatcccgatcctgtgggaggctgaggcaggaggaccacttgagcccgggaattcaagatcagcctgggcaacatagcaagaccttgtctgtataaaaaatttaaaaaatcacccaggcat

SEQ ID NO: 159299 - DNA, 1000 bp, Homo Sapiens
tgatcccggaacatttatttccagaggcttttgatagaagagcacaatcttgaataaaattacaccactgtacttaagggcaacactacatagtaagcaaaatctgctctgaaccctttcacagaagagacacttcagaaaggaattttacatctcctgacagttttacaacattcatacctctgatgcacttcaagccccaacccatctctcattttctaacttctttaacagaaatgtgtgttcacaagttgtgtgtgcgtgcacatgtgcctctgtgtgtacacaaaaggctcattttacctacttgataaatgagctgagacgatgttttgggaaaaaaaaaattggaaaaaaaatgttaccccaacacgatggagaagccaatccaaaaaagcttcatgctagagctagctttctcctcagaaacttacatcctaaaaacatccctatgggtgcctaaaaatggaaatccagtgagttcatggccttgagttcactcctgtcctgaatttctcccagtgcaggtccagaagggcgagatgtggcagaaaggagaatgtgggaatgtgtgagtatcccacagccagctcacagtgcagcttgcactcagaaaggagactcagggacacaaggtctcaggatgcacagttcaccttggcctcatgtacctgggctggggagagggagaccattcaaaagcctgtgcttggccgggtgtggtggctcacgcctatcatcccagcactttgggaggctgaggcgggcagatcacttgaggtcaggaggttgagaccagcctgaccaacatggtgaaaccccatctctactaaaaatgcaaaaattagaaaggtgtggtggtatgcacctgtaatcccacctactaaaggaggccgaggcaggagaattgcttgaacctgggagtcggaggttgcagtgagccaagattgcgccactgcactccagcctgggtgacagaatgagactctgtctcaaaaaa

SEQ ID NO: 159300 - DNA, 1000 bp, Homo Sapiens
ttttttttttttttttttgcttagcagccaaacacatttattagtcttttttcttttttttccaggaacccaaaaatattttgtagttataatgtaagcaactgagttgcacataatacaatcatatctttccaaaataaaataaaataaaaaaactaaacaaaaacaaaaataagctgtttaaaagcccaaaaaaaacccttcagaaaactcttatatatgcattacatcatctctcagttttaatgaaatgacgacgacttaattccttattactcaacctgtcacaatccaataaaacaccaccctttagttttttttgtttttgatacttttttttttttttttgaaatccagcatgagaaatacagtacctgctatggcaaaaaatacacataaaatgcaacttttcagcttatttgtacattagtagagtttaacattttattgtttgtttttttaagtgaaccagtgattttaagtaccactatactaaaaaggaaaataaaatatagaaaagggggcccagcctgccatgcaagtgcacctctaaagtgcctagtttctgtgtccatgtaaaaccagtaatatgaggagcaatttcaacatatgggagtttgattaaacctctatgctaaaaaaaaaaaaaaaaaaaaaaaaaaagacaatgccacatcctcccttttctcccccaggcgtccttaaatcccattatctacttcctctattgcccatcaaagagagaaaagaaagccaccaaaataatatcgtaaaagcaacttcaagtataagaaaaaaaaaacacttaaaggtaacttgcagagagcatcaatatgtgcagctgattagtcatttttacaggttttgtttctgctgacagtgtttcagatgagaggatttttgctgtaccttcctgttacctgtttgtgtgcaaagttggaaagctgccttttaaaaaatccagcctctttttgatgcccttttctgcaccttctgtcta

SEQ ID NO: 159301 - DNA, 1000 bp, Homo Sapiens
ttttttttttttttttttttttttttttttttacaatctggaatatataattttaattagttctcagcagtgcagtaaatgaacaacacttattaataattaatttgggagagaatagcaggaggaaaaatataaacagtagctttttgtgaccatttttaagtagctgacatctcagtatgtttctggaatgaacaaattaagggtgtattgtatatagtgatttaaataatcagctttcttatagtcttatcaactgagattataaaattgtaaacacaatttttccatgtttacatctactagctttcatttggacacattaaaccatacttttccattatgtagttaattcatttcttgagtgcctgcctgccattagatgccaggtgcttatctaattttccagttagttactgttcagcttaagtcactctacttggttgtcaacagtagttaaagcagtatcttaaaccagaggtcaaaattaaatcaatattttgattcgaaatgattacaaacatatccaaaggtcataaaatgctactgagaagagttgtgtttaaaatgcattttcttcttacagataagctgtaatatatacatgcgtatgtagctatatacctttgattgtggtagctacacctgaaaaatcttttctcctcagatgaacttacaaaattcaagagaccaccactgatacaagaccgtctaaagttaaaataaaactgagtgacttgttacacagtgagacagaaaaactgatatacattattaactttttcaagtaatgttatgtacagttttattgccagtatatgcacaacagtaagcatagaactataaatacacaatgtaattaacagtagaaaacaaaattgttacaggtagagggagaggatatagagaaacttttcctgctgctagaacagaaagaaaggggaaagcctatgacaaatcatccattcagtactcttgtcttaaattctttacatatatt

SEQ ID NO: 159302 - DNA, 1000 bp, Homo Sapiens
ttttttttttttttttgccaagataaatcacttttatctctataggaaagggaggatctaaaaaaaatataaattacattagtaacacaacataagaaaaagacagggacaaaaacaacagagaagtctgaatgatgctaccctaacctatttataaaaaggccctgcatcagaaattcacaatcctacccacttctaaaaatatatttagacatgtacagaagcggtgggcttgtttttaaattgtttgctttttttgtaaaaatatattaaaggtgaatagaaatcctctctcccttccccctgtccagcccccagctagggactggagatcaggggtaactatctcatggtgttctaaaccttgattactaacactcccaacccctccccaactcacttcacttagaacctgaaacattaaaaaaaacaaaaacaaagacatcagcctctttggaaaagcataactctgagggtaaacttgcttttcattggaaacaacacaaaacaacaaacagggggctccaagaacccaactaagctaaatgaaacccagtcaaacagaggctgggtttcagctccacagaaaacttctaacaaagaaatagagggaaaaggccggaatcggggggatttgctagcaattagctgcctttgaaagatcaagaaggggtgttaatggacaaaagggctggggacctgatcttggttacagcagtcaccgcatagtcaggcagttgcctatacaggacagaggcttctcctgctctcccctcactaccctctgctgccttgaaatccccaaaataagcaaagctgggcagaaacagaggggaggggagtagggactcacgtgctaggggggaggtagccaggctttttgcctttggtgtgactagatggagaactgcttggcccctggggtccccaaggtagagaaagcaaatgggctaaaggaacccctgattccaaggaaggaaagtagaggcagggctatgga

SEQ ID NO: 159303 - DNA, 1000 bp, Homo Sapiens
ttttttttttttttttagtgaatctccttttattcagttgagccatacttataaacagaatttaacaaaaaaaattcccaagttccctctctttacttttattaagaaggttgagtgaatgtaatacggcgccgccgcctttggaaagcctttaaattccatgtgtttggttccagcatatgagggccattgtagacaaacaaaactgtcatcttttcagaataaggaagattttgcaggagctttggtgttatgaaaaagtattgagatgtattttctttacaggcagtatttacaaccatttcaaacactctccgttcattgattgggtccattccctgattgatttcatcaactactctgaatggacatctatttagctcctgaagtgccatcaagtataacatggtagaaacacttctttcacctccactttgatgatgaggagttaattcatgcagttgagtactacttcgaaatttgactctaattcgaattccatatttatcataatcttcctcattttctgtatggagatcaacttcaccagcacactgcatggaactaaaaaaattgctgaatttttcattaattttttctaccagctcttttaaaggattaagccacctttcttttacctgtgaaatgttttccctgtattgatctagttcaactttctttccctttagttcctcagttaactgttctatttcttcttctctttttgtatattcctgaacaattgtaggattcagtcccgtgaagcaggaagctcttgatctttcttcagttaataaagcatcaatttcatccaatgtgtttggaaggtcttggaaaaccatggggagtgaggagttgtgtccatttggaatggtgggtacttgtgtctggtattcttgaggaagagtctgctctgcacccaggttacatacttgcctagctcttttcataagttccttgcatttctgcaataatctctgtctattttcatccaattcaa

SEQ ID NO: 159304 - DNA, 1000 bp, Homo Sapiens
gatggtttccaggagcatatattacacaggtctgagtgcaagaaatggcaaacaactgctatgtttgctttaaaagctcatctggaaccaatgccaaatcccgatgcttttgatggccccctggttcttggcccctcctgaggctgggctcagacttctgggtgagggggcagcctcggcatggaacgtcctgccttctgtcacctgaggcatcaggcacttgggtgatgctcagggctggatcctctttcactgcttgtgcacactcagactcccatagccagccctggctgggatcctcataagatggatgggccagtctgggggcactaggtggctgtgtcttcccctgctccctgggagacaggttcttaggctgggctggagttgtgtttccaaatcctggaggttggctagcccacctgccatggttgcctttctgcttggggatgccctgtctgggccctcaataagggatttccaggaccacatgctcagcttcccagaggtggagctgggaggagagcaactgctggtgggggtgagtcccgaagtgctgggagaaagtgctgttagtgcctgggtgtggaggtgctgggccttccagcaaccttcaggagggatggggtctgtggctccagactgacctaggttggggcctgctgaggaggagctggcagcctcctcaatggcttgtgggctcccgagcctcctgtggggaccactgggactttccattctgggaggccccagtgtgatccctgtcaataggcttgggaccattgggcccaggctcctagggcctctggacgggaaaggatcctcttccccactctctcctgctcctttaggggccacactctggctcacttctgggtgaggtgccaagctcagctcctgtgcaccctggctgttctcaggcccttcctcggtgtcgtcctctgaggagtccacctcacgaatggcttcttgcttctgcagcgactcccgtcgttcggct

SEQ ID NO: 159305 - DNA, 1000 bp, Homo Sapiens
tttttttttttttttctgaaaccaaacacaaatactttttattcatgggatatcattttacatcaatgtcattgaaacctaaaaccagtttgctgtactcaagttaggtggcataacagtatttcagttaagctgggagtcacaggacttgcacacttttatgaatgtaatgcaaatactgacgacacgaagcattcacagttataggttacctgctgtcattgaacagtaacccccaatagaaattattttatgaaaaaagcaacccacgttttggtctcatttacagacacccaacattttagttggtcaatgaaatctatacatttattatacaacatatgaaagaataaaggataaggcttacagaggtattttagcagttttaagaataaaaaccaagggcacaaactaacttttaaagctttctgtataaacttcaaaagcactgttaaaatggagactgagagagaaaataaatccattgtgaaaccagaatctaggtttgcctagtcagatttataaaaacataattcagagttcatgcttcaaaaaaggtgcatgtaacattacagtggatgtttgaggcaaatcaaataatacaatttctgacctacttcagcagtaaacatctaaaggttgtattccatgacaacagagtattgcaatgtggagttcgaaacacaatagaaaaagagaaagggttgtagacttaggtactaaagaaaacccagatgaaggcaccctaatttattcaacattagccagtaaataagtgcttgatgattgttcagttttgtgcaacttagagaagtttttaagaaaatgtatcatattactctgtctgacccctttttctccccttagaaataaatatataaaatcaagacaatcaagggtaagcactctgccgctcagcagtcaaagaggtttatttttcaaggcagtttaaagattatttggagttttcttaatatgcaagattatccctttggaatac

SEQ ID NO: 159306 - DNA, 1000 bp, Homo Sapiens
tgagccttagcacaaagcattttaggtttatttaaataaaaattataatttatacaatactttttctttaaacaaacaaagttttcttaaaaaaatgttacaggagaatttttttcatcggttcttaatacagtacaatccttttgttgaacaaaagtcacactggcaatgattatttacagatccaaaatagactcaggcttcagacataaaaaatttaacattcgtctagttcagtgattagtcacagaaattaaacatctgcccagatgtacacaatttggtaaaaactacagcttctctccacggggagcccagagcccgtgccgatccgcgctccgctcccgaggacttccagggaggggcctgtgctggcagcagagccagtcggtggccctcccccgaccccccgctccccgaatgtggccctccctgggggcttcggccacacctggcacgtggtcagttttcatctccctttctccacaaaagggactcgaactaaaccacccgacgctggtaaagccccatctgccccagggacccctcccgctgtgtttggggactgaatcccagcacctaggaagaggcgctcattggccccgaggccccggacccatccttgggcactgccgggccctggggagagaggtgtggccattgtctgcgggcactgcctctgcagccgcccctgggggtgggtcagtgcccaccctgtgttgcctcaggcgccaaggtggggttcactgggatatgtccccctcccctggtgcaccaagagagccagtcccctacaggagccagacccacggctcagagcgggttctgtccccattcgggaaaggccgccgtgtggtcatcctgacgccaacgtccgcgcagtccagagccacgggggctccgctccaccgcctgggataggacatgtgcttaatctggtgatcggcgcagctccccccaaagcacccccggcaccagcgtgtgactctgcggcccctcg

SEQ ID NO: 159307 - DNA, 1000 bp, Homo Sapiens
gtgtgttaaacagctttaatctcgctcattgcggcttctcggcacagtaagaaatattgcacatgatcaacatgttttgttctggggaagggggcaagggcagggggaatcaccttcttagaaagtacaacccaagttgggagggcagagggggtgaggagaaaaccctccccgtgcctgtggcaaagtgcaggagcccccacccccaaactaacctgagtccagcccctctggggaaaaaaggggtgcatgaactccccctattccacaggcgcctccctgtggcccaaggcctgcaccaccctccagcttgcagccctcacaggagccattttgcataaagtgaaaagctctgaaggtcacacgctccaggttatgtacaggggcttggaggagggagactgcccctgcagcccctcagctgccccccagcaccgggagggagcttcgagggaagggggtatttacaagaggagcaggcctcattccgccccaaactggagaggacgaaatggctttacccgggaggagataaccttcctgcccccacatactgtccatgtcctgagggggtactataagtcctggcatcttctcaggggtccctcacctgcctgtggcagctgtggagggacctgggggtgggggggagggctggggagccccctcccagccaggctgtccaggccccgactctgggggtggaggcagtggcggggcagcctgggccgtgccagagtccgagctgggtgaggtggggtcagggccccctgcggggctgggagtgggggcaggggcagcagcggtgccagtggggggcggtacagggagaggagcctcagctccagggggctgctccgtgggagtggcagcctgcatgatcttctggcgcacctcacggatcttcaactgcagacaaaccttggagggaaagatgtctgcatagcgggcctggaaggcggctgtggcctgggctgacgggaagaagccatggtcctga

SEQ ID NO: 159308 - DNA, 1000 bp, Homo Sapiens
tttttttttttttttttttttttgtgcaagatttaataaaaaacaaacaaaaataggaatggttgctttcaacattttccaggttgtgaaaggtttgccacgactctcaggggtgtggttctaagctgcatcagtggaacaaatacaaaatgctgtcctcctcctgggctggaaggcagtgcactttctcctcttaacagccagactagcgggtgaggagtcagtgctgtgacccaggccaagctggagtgtccgcatagctttttctctgaccagtggggattccatctaccttgaggcgtgctggctgggccccgtttccacaccagcacatggtgagacagggtagcttatcaacaggctgctgggccttaatactgacagtgagtgtggcgggtcacagccaggaaaggactaacacagatgccctcccagcccccactgctggcctaattttagaataccacggaaaaaagctttgatgaagacaacaggaagtcaacacagcagagagtggtgtggacaacccagaagccagcctcacgcattccatgcccacagttaacgatgacaacaacagcaataataataataataataaaacaaaggtacaggtgaaaagcagcgcttggggtgtgctgctgcaagctggggaaggcgcgtgctcaacttggatgggacacacctagtctttcttcaagtccctggattcaaagagcttcaaccgttcttgcaccgtcaggccttccttcagactcttggacctgatgtttctgagttgccgggtgacacaggatctgtctttcttcaagaagtcagggttgcttttagatttcattatatcatatccggacaccgtggcactgtcaggggacttctcccccagtgcttccgttgcagccttgagctgctccttcaacctgctgatgtcacagtcagccttagccttcgcgatgctgagctctgtgtagatgtctttgtacttgtcacttgcgtactt

SEQ ID NO: 159309 - DNA, 1000 bp, Homo Sapiens
tttttttttttttttttttttacatttcaaaaactaactttattgcatttaatacagatataagcacgaataagacaaattagttccattttcagacaggaagaaaaacattttgggtagggagaagttaattgctggtaaagtgtagtagtattattattctaaaagataatgagttcagaagtattaaggaaatatgtgtgtgtgtacgcataggtattcaggtaaacaccaataacaataaaactctataagcggtcacagacaacacaagtacaggaggaacatttaaatgttaaccaatgtcatgaaagaaagagtgatataagcaattctatacagcaaaaagagaatgattaacaatttattgagttttatttatctacaaaaatatagcaatacagtgaacttcaccaaatcctaaatattcagtacctgaactggctacaacaccgtgtgcacacccagttcctgcagaatctcttgcagatatgggagagtcagccagtgaaaagatccatttcttgggaatccttgtcaacaagaccagttcagaaatccaggatatatagaagcctactgtaatttaaaaacagtaacaaaaaccccaacaaaacccaaatcaacaaagaccaagataaaggtgtgataaacattaattgtaatggttttcctttacatgcaatacatgcattttaaaatcactaagaaacacgaaattttgtagagcaaagtttgtgtttcacgtaagtgcaaatgaatatatattttattttttatactattaaattatatatattttttccatacaaaagcacacagtgttaatctataaaatgacatccaagtggatgatgattgtttttgcatgtccccctgcttagatttttttaaaatatatagtcaaaaattaacatccttctttaaaaatacagaaggaaaaaagggcaataaaaaaaatacaacttggctttacggactggtgaagcatttttcctga

SEQ ID NO: 159310 - DNA, 1000 bp, Homo Sapiens
aaaatttttattttcagtacattaaatttactcataaaaacattctaaaaatgtacaatttgtcctttttaacaaagtataataaaacataaaaaccccaaaaacagaatacttgacatttacaattcaaaatcaaattagcggaatattaaatatttacaaaactatatcttttaaaaatatttataaagttacatgcaattttgtagaattgacaaaagaatggctcaaaaatgggagaattttccttcattcctaaaaagaaaatatgtccaatagaagctgtgaaggtatcgagtacacaaggtgtccagtttcagtaccaaagccttctctttttgtgcacgtaagactcacacatgtgatgagggcttgttacaacgcacgtgaggccgcggcggatggccactgcccccttccttggtgaacagtggagcaatgttaacctttggcctcaaccagcacagtatatggttttctagaatattgcgagtgttgagtgttgattaaagatgctttcattcagacccttgggacttttcaacaaattcgcctcttcagaacccatggctttcagtgccacctgactcattctttggaagtcacctgcatgctggaaatggcagccacccccgctcaggtcgcacaggactctcctctgggacagcagtcgagtcaagcagggagacggctttcctcacaaccttgaagaccatcagtcatcatgatgtacaacgagcaaggcataaaataaaacactggttgccacagcattctgaaacagaccacactttcaggaaaatgactaagtacttgaaagggtcagtatgttctgtgttttcagatgaggaagtctgatgaccgcaaaacgctcttcagacgcgccgaccttggtggcttttggagagatgcatccgagctcgctgctggcaaactctcaagtccaagtgtgcggctccctccggaaagaggcctcacggatgggtggttccattttctc

SEQ ID NO: 159311 - DNA, 1000 bp, Homo Sapiens
tttttttttttttttttttagtttggaaggattcattgtaaataaaaatagtaactcagccctccattcagggaggagaaaggcattttaaagctagtatattgaaggtttcccccttgacttcagtgttgaatggctcttgcaaggacttcttgaaggttttttttctcactagccagtgtttggccgacaggttgcacctctgcctgagaagatgccaggttaaaccccttcacatgggtgctccattgccgccatgggctttttgtcagggataagggtgcagccagccagcatgtccagagaggccaagatagagtcatacaggcgatctgcgtggctctccagctcaccagactgctttgcgatcctcccaaggacatcctctaaaactggggtgttctccaacaggcactgaagaagaatctcccccttctgtaagacactctccgtcagagactgatgttcatctatatctttcttaaattgccggtaaagctgcagagaagacttgagacttgtaagattggacctggctgcagtcccgtggtcagtaacatctgcaacattatacagccagcagatcagctcttccagctgacagcaaaatgtctgtgtcagccgagcggggagggcaagatactcgtcatcactttccacttcctcttctgatttccacctagactctgtgcaggtagggcgccgggcactctggctggtcctcttctccctctctggcctgggcgagggccaccctctgtcccgtgtccttagctggggagagcccatatcaaggtgcttgcctatagtcagccggtccttcgcacccctcagggctggctctctgcgctcccaacgagcatccctactgcctggggctctgggggtagatgcaagttggctccaagatgccaagcccatgccaccctgtttctggggtactctggagggccactgcttaaggcttggctctctgggcccagaaaatggcagggcagtg

SEQ ID NO: 159312 - DNA, 1000 bp, Homo Sapiens
aactgtttactaacaaaggtgctttaatttgaaaagcatttgaggaaataaattaatgaaatagtctggccatttgactaaccagttctacaaatttcacatatccgtcactcagatgagcatataccaagtcagaggaaacaaaacatgcacatatacaaaagtagaaagagaaaacactcatgccttcagaagttcacaaattaaaagccctttaataatataaaacagttgaacactggaatgtttttttctaggtcatgaaaaaagtgaattccaaatctatgtaataaatctaaaataatacagcatcactgtcttctgttctggtgtttatcaaacctgcacatgagtttttagaaggtgaattggggatgcttcagaatgtattttctccaaacagatggagcctgaaaactgtgtgattttccaaaccaagtggagaaaagcaggaagaaattggtgtttagctggtcagcagacggggatccccgggatgcaaacagccttggccattaggagcctcgcctggaacggggcccccacaaagctcctgagcctgggccacatcactcaggctcctgttccccatctccaggctcgcagcggacagaactccactttctggcttgtttactcgaaacacctcttcccatgtatagtcagcaagattcacaggctgtgttacccacgggtctgtcaccagcttctccaaggtggtgcgtctctcagggactggctgcagcagcccagacacaaggctcatgagttctttggacaccaggtatggcgggtgtatggcagcctccacggtctcctccagctcacagaaggggttctcctcaaagaccagcgtgtacagagtgactcccagagaccacatctccagctccggccctctgtagggattccccatgagaacttccggtgcacagtactcgatggtcccacaaaaagtataaaataattttcccctttccaagtaggcggccgagccaaa

SEQ ID NO: 159313 - DNA, 1000 bp, Homo Sapiens
tttttttttccctttgggtctggcagcacatgccagccaagtcccaaactagtttattagtttaaccaaaaggtaaacagatgatggagatgcagaaagacaagcatgcgagcagctaaaagcattacccggctgtccaccaggaaacaaatttaagacatttaaagtggcattaaataaatgaagctaagttttagctacttggaatttccattgtctttaaaaaaggtaaatatatatatattttacattgcagtatataaatctagactctacatatacagtataaatacacaggatgaacacgggcacaacatatatgtcttggtggtcacgccctcaaccaggccaatggttttatttattttttttttttttaccttcgcaccaagaatatcaggctgaggctacatatacttcaacctgcatgagggctgccaccctggccatctctcctacaagcacagaagcacaaatcgaacagggattgaaaacagaagaaagtgctttttgactagttgaaacccagtcagtctttacaatgtgtagtccaatctcctggaaagaccaaaggaaattggaggacttcctggcccgttcttcggtccattgccgcaaatctctaaactttccctggtgcttcttgtggaattcacatggctatttatgcaacgcaaatcccacacaacttttaggagctgtattatgggattaggaaaaaaaaatagctccatgttacaatctgcacttcatattccgggtttgttctctaaatttttggaataaaaactggtattttgagaatcatttcttaaaaaggacaacattctgaaagtgcttcttacacatgtcaatattccacatatggcttttagttcaaaccccagcacagctcagacttggaaggaagagtgtgatggtgttatgagagacaaaagtgtcacttaacaatgatactgtgatagcaagcacgggaacctggaaaaaaaaaagttattga

SEQ ID NO: 159314 - DNA, 1000 bp, Homo Sapiens
ttttttttttttttttttttttttttttttttcacggtgcactaactcatagatgatttattgccgtaagtaactaaacaagagaagagacaggctgtgggtttggtcaagacaatcagcattccctctccaaggttcgccagttgcatctacctaaagccttaatactttctggacgatatacacatgataaacacagcatacatgggtaacaacttgaccaatgttacactgattaaaatagcacataacaagggcgccagccagtcccgatgccctgaagtgacagaagtaatgtggtttgtatgatgtgctgagtacaaaacctttaaaaacaactttttggcattaatactaacacagaatacttccttgaacattctgcaaaagtaggtgcagagacagaattacttcttcatttccagattaccagtatctataggactattttgagaaaagctgggaggcggagcacctcccctccccaatgtcattttctttgtcaaagcagaagagtcgaaggggtttaggtggaggagggcagctgacagggctcctggagttgttaagtcaccaagtagctgcaggggatggacactgccccacacgatgtgggatgaacagcagccttggtttgtagcccagggtgtccatggatttgacccgaatgctccctggaggccctgtggcgaggacaggcactggatggtccagaccctctggctggaggagtggtggagccaggactgggccttcagccatgagggctagaataacctgacctcttgcattctaacactgggtcattaatgacacctttccagtggatgtgcaaaaaccaacactgtcaggaacctggccctgggagggctcaggtgagctcacaaggagaggtcaagccaagccaaagggtaggtaacacacaacaccagggaaaccagcccccaaaccagctgttggtaagatgccttgggtttggcaactcacctagttttagcac

SEQ ID NO: 159315 - DNA, 1000 bp, Homo Sapiens
aaagctttaaagaagaaattcttttactactgaatttcaagtcacacacacaaaataggtgagaaattattttatcatatttagaatcaaaatatcccttaaaatatttacattttacagtaaaaaggatagcaaaacacaagatcatgtacaagcttaagtattcaagtttctgaagagccaaaaatgaaaatgaaaataatggcctaccacaaagctgtagtatatggtaataaatgacttcaatgagtgcagattaaagcaataaatgtaccccttgggcttctgattcttggtcaaaaactgctcaactaaatgattagcataatctgattatgaagttgcttggatttttgttgctcctctacagtttctttaaaaacagtgcaatttaaaacaaacttacagagcacacattactcccaaattagtcattatataaaggacattcactagaggaagtaaatatattccatagttaaccatatttaccaattaaggaataaaactaaaatttctaagcctttattgcatattaataaaacaaatctttgaatatacagcaatgtaaaacttttaaaaatattaaattcctataactagggaccgttggtatgaagaagggatgatgagcactggtacagagcactctgtaccaacacacagaatttactgttctgcaaatgaccaatagtaaaaattttaaagatggcacaatcctagcaggcaatctttcttttgtttacaagatacaacattttaacagttatttaaatgtaatcctgaagcagcctgcaaattttaccttttgcttttagttctgtcagtgtggtccctatctttgtggtacctatccctgtccttttctccttctctgtgtttacttttctctcgttctttgtccttctcatagtcttcacttttaggtttatctggcttcttgtctacattcctactatctctgcttgcttttccatctgttcctcgatcaccatgtgat

SEQ ID NO: 159316 - DNA, 1000 bp, Homo Sapiens
gaacagtgcctaaatctttattttcataacctacattttttttcaaattagacagttttacactgaatgacacaaaaggaaacttaaattaccaatagtttacatgtaagcttgattccagtcttaatgaagcagaacaaaaacgaaaccctcgaggagcgaccacatgacccccgcgctgtgagctgctggcggccagcgccctcgcctcgattgtctgcagccctgtagtgggccgcgaggcacgcaagccgcaactacagctcgccagcggggcacacagacaggcatgcaccaccactacccgtcgcccggatacactgaactggttttgaagcctgaactgcagagatcctaatatagcaacgcaggacgtttacggccacccgccagtgacagccggtgatgtgatgacaggagggcctgggtgaaaatgtcaagacactcactctcagagaacgacgactccacttgaaattcatgtctggtgaaacgggaccaggtttttattcttctatttcaaaatgataagcatcatcacacgattttacaagttaaaatgccatttgtcactgctgcatctctgattctataacctgagatactgctgggggtaaaggagggtgttaacttaaaaaaaaaaaaagtatgaaagccactctcatcgctgtatgtgacacagcacagttggcatggaccgccacagcttcctattatgataactctcattttcttctgagcagaaactcttgaagtagtatcaggttttttcagacattatatagcaatctgtatttcacctttaattaaaaaggatgctataaaaatcacctccgagcaaggtttcagttcttgatgcagaagactgctgctggctaggcagtaactacagtgtattgaccggagggcagcagagccctccagtggcgactggctaatgcacgcgctgccctcctcatgcagctgttgagctcccacttcggtcgacaaagtgaaggac

SEQ ID NO: 159317 - DNA, 1000 bp, Homo Sapiens
cacttccgtagtccaaaggctttattgttctgctgaaatgcttacaaatactgaaaacccccagcctgggcccaggcaaccaagggctcaatgctgggaaggagagcaggggaggtgggcttagtgttaaggcgtgaagggcgaggccagacagctggaggcctggtcctccactctccatttccatcacccttcggaggctgaaggaagggcggcggcaccacagggcccttcccctctgctgcatcatctcctgctcaggctttctctctaggcgcattggaggaatcctctttccctgtcggaaactcaacactgtacagaactccaaccataacccttctagcttcctctcccaactgcatcgctcctcctctgttccatagatcccccggcttcatcccttctggctctaagcaaggcaccagtggaagggagagggctggactggggggctggcagcctgtgcatcagggctgaagacacaggcagggggaaggaaaaaggtattcagtcccttccccccagcatgagatgcccaggggcctgggctggagagatgatggcacgtaccctcagatggcccacagctgaagcagtgggctgggccacagagctgcagcaattagtatgtaaccatggcaatgaagcagtcactatggtaaccatggtgatgagtctgcaactaggggatggagctgggacctcaaggttgacacttgagatctctggcccttgagcaaggtaataaaaagtataagggaaaggagaacaatggggcagagcggggtttgagaaatgggaagcgggccgcctgagctattaccccactctggatgtggctctgctcagcccccaaagcccctggcaaaggggtctgaggcaggaggggatctttggcagcttatggtaccataatttgtcttttagaaaagagaaaacaggctggggagagcaggtgtcaggtcagagctgaggccctctctgtgacagctcctca

SEQ ID NO: 159318 - DNA, 1000 bp, Homo Sapiens
gtacaaaatacttatgtatttatgaatccatgaccaaattaaatatgaaaccttatataaaaagaggtgtggtttttgtctcccgccccccaacctcccctcctcctgtgaatcagctctgagtgacaggaaaccagggctgtgctcctgctgggactccttccttcctccctcccctctgttttcaggcttggcctcctgggggtgtttcctgaatccgactccccagagtttaaagagctaggttcctggggactgggattcatacctccttcccctctctctcctgcctgctcctccctctggggacagggacaccaatgttggcctggctcacccacagcctcccaggagagttctctgggctgccgggttgcatctggttccgacagctctcggggaatgggcggtgggtccctgaagttggggggccggccctgtttctcagggaatcccgtggtcactctcctatggcttcctacagccctgggtcgaccttcgctttctctgccccggccttccctgcatccccaccagggtacccaggttgctcagcgcttcaggcacctaggagacctatttcccgttccccttgccctggaggacccgctctccctttcgtccacagcttccgggaggcccaggtgtgcccccacgctgtccatcttccctagaagtggaggtgctccgggttcccccttcgtccccccagccctgcccatgggcttctgggcctcacttggagccctgggctgcgctgagctgcagggaggccgagcagcctgtagagggcagcatacgcgtggctttccagccagccgccctggaggccgtggaggggaggcagccacagtcctggaggggcctgggcctggacaacatggccgcccccagggttagagccgcttgtcctccagccgcctggtctctcttgatgaggatttaacctctggtcattaggtcctgcctgctacctttgtttcaggttagctcaatccca

SEQ ID NO: 159319 - DNA, 1000 bp, Homo Sapiens
ttttttttttttttttggtagtcaattgtataaaaataattttatttactactgtaaataaagtagtgcaaagagtagtttggacccacaatattgcattactgatttattcactaccttagcagcatgtagtatacagacattctgctcttcctcttcctctctaacacacacacacacacacacacacacatatccctgtacagactcacgcaggcatgaggggtagggatgaaactataagctagaggcttacttgctgcatattccgttgctgccagtctattctaacgtgtaattcatggagaagactacagttaagtactaagaatcttctaaatgtaatttcatggattgcaattgaaatgtaaaagatatccgacaatgccattaaatgattcggaagcactaggaccctagaaaaattcaaggagaaaaatgtaaaccaatttacaaagctattgccctccctgcatttccaggcacaaacaatttatttcaaggtgccttataactgctaggtcttggaagtcaaagagaaatctatcaattcagctttgaggaacagggctgtggcaagcacaggtaccaaaatattatccaccttgtagagtagtcataattttctgttcttcaataaagggatgaagcacgcactgtgattcttaagacacatcttagtgtataagaatccagatctgccgtagggcatgctatgactcctaatacatacaatcactagaacaaaagtctgtgatggcccagtaaacttccccacatgccctatgatcaagatgttccttgtatgtgtttgatgacctttggtattaccactgcctgatctgggtacttccttgtaatttgactttaaaaaaaatgacaccaattgcaaaatttgcatccagttgacaagacatttaaggtgtttatcaggatcatgccctggccccagcttcccaataccagctgttgaaaagattctctctcatctggagagaac

SEQ ID NO: 159320 - DNA, 1000 bp, Homo Sapiens
tttttttttttttttaatcatcatgtcttaccttttttattgaattatatacacctcttacaaaaatgcttgaagtaatttaacacctgtacatcagtacaaaacctggctgagtaaaatgaagagaggatctattcaagatcattaagaccaaatgtaaactgggaagtatgtggaagatagctgtccagcaagtgtctggaaggtgttctagctgggtagagagcctattctaacagacacgcacatcgcagaaagcagcatgaacagaaccacatcctagataagagttctgtgtacagaagatccatggaggcaagtgctgtcaggaaggacactgcctccctccaccctcccaaatgtcaccaccaagttccttcaggtgagacctcacacaatgtcaagtgctttctaggaaatactaagatcaggttgagagattctgcttggtctagtcaatctgaaaaattcaggctggaaagacaccttttctcaagagctgaattgacttttgccttcaaatcttgcctgcaccttgcctacgatggcatcaatttacacctaaggacctttgaagagaaaaattccattatttcttttctttcttgagagcagattttttccctcctcctttggaagatttgcagtactttgcttccatctgagccagaaaattgtccatttccttttgccgatccttttgtctgctctgaatggctgccttcaggctatccacgccttcatcaagccccaactcctttctgctcatttctgcttctttggcctcttcctgagccctccttttccttgcattcatcttttgtttcgattctttgacaaaggcattataggatgggacctctccggcgtcaatagcttgctgaatgatattccttatcctgggttcctctgtgtactgcacgcaaagcacagactccatgatctgatccatgtcacccttgaagtccagataggcctgcttaatatcagccagctcttc

SEQ ID NO: 159321 - DNA, 1000 bp, Homo Sapiens
tttttttttttttttttcattaaaaaatttattttcatataaaagtgccaaaatatccaccaatgtcataatctatctcaataaccagtttacactagtaatcaaaacacaagcctctttattcacattgtttaaaaatccaattattttcacacattcccacagtaactcgagtctctagacagtgggaaatttgcattcctattcgctgtggtagtccatatgtccaggttcatataggcgcgaaacgggttgaaccccgggtagtattccttgcacacgaccgcttggttttccatgtgggtcgaatgttccgtggtggggttgatggggcagcaattttcatacacatcgctttgcggggcccagatggaaccaaaaagtccagacattggagacaagcttcgggtgcttgtgaggtagggcggagagctgatgaaactggcatgtccccaggcagcaggcatgttgggtggggtgttccaggtagactgagagttgtgatcaataaagtctgtctgaacatctgcaggacaggggaagccattggcatagttcatgttttcttctggaaaggcattgtaatcgttcaattccaatggacagtatgcgctggaaaactggccttcgcatgttgcactccaatcaatgaaactattatgaaccggggccgactcctgaatcacacaaggcacgccgttctccagggtgcagtttaagctgcttgtcacacacactggcggagtgggccacaggtctccaggtgagtaaagacctttatcttcttcaacacctgtgggcccggcaggaaggctgggacaggaaggctctgcgtattgtgggagactattcacggtcatgggattgcagatgttatgagaaagattcaaggagatgggagcttcagaaggaaaatcattttgtgaaacactgtctccggccggcaggaagtgctgggcgtccaccatgggcttcttatccccgtcggagctgctggtgc

SEQ ID NO: 159322 - DNA, 1000 bp, Homo Sapiens
ctagaaggtggccttggagtgtccgaagatgcagatggggaagtgcttcacgtgcgaggaccactgcgcggccagctggaagaacttgacgtcgctgcactccacgccgtcgatgaggacccgcagcatgttctgctgctgcctggcagtgcagatgagccggctgatgccctcaatgcactggctcttagactccacgtccttgtccttcgctttcttgggcagaaacatcaccttcttgttcttctccttggtgaccacggtcatggacatggtgggcgtggctgcagcctcgccgctgctgggcagcctgctgacctggagggaccggaaagtgcacttgagcgtgtttttggtgacaggcaggtccttcttctcggcgtccctcttcctgtccgcaggctgtgctgccgtccagtagtccacctgcagccccatcagctcggcgccgacaccctggctgggggaggacaggcctccgctcaccgacggggaggagggcggggtgggtgaggcctccttggccgcacgagatgcggacggcggggtggatgagagcgtgccagagcccgagggggccgcgtcgtccgagtcgcctgatgtggccgaagatggctccacaattccaaccttcacaaccccgacaaagggaatgaacttttgggaggactcttcgtcagggctcttctgcttgtatgtcagcatggcctctgcgatggggagctggtgggcacaattggcccctgcgatgtactgcgtgatgcgtgacacaatgtctggcgtgtcctgtaccgcactctgggcctccagcttgttgaacaggtctctccaggccaggtcctggaagaagttgttgtagcggtagtccacggagcctaggtacctggccacggggtgggagcccagtgggatgaccaggaagcgcatgtagccgagccagtcgggtgtcttgtgggacagctgctccacaaagagccgcaggatggcactgaggtaatgc

SEQ ID NO: 159323 - DNA, 1000 bp, Homo Sapiens
aatgctgcatttcttggttttatttgaaacagtgcatatttttagcattttatggtaggattttacacttgtcatttacacaaattacaaggttctgcttcaagtttttaaaaaaaatttaaaaattcagcccatgtgcagcacaagaatatgcaaaactactttacattatacacactttttatcaaaggagatacaaaattctggcttgttgttttagacaaatacaagaagcttcaaactagacacaaagggttaacattaattctcaaatataagtctgcacttttgtgttgtagttctctgagatgtgaataccaaattcctaagggattttaatgttttcctttgaaaaggaaaactaaaaaaattcccgtaaacaagtccctccccatcagcttggtctttccacaaccctactcttgcttcccttagtgccagacacttgcatcatgttacaaaattggggtgggccacttacatcatacaaggagcaaatccttttaacttctctcctgcaaaaatctaaacaggaatatattgatgcagatggttctgctacattttatttaatatgatgtaacacttggtaatctagtaaactgtgatgccgggcaattaatcaaagggaggaagagacaaaggtccctatcaatgcactttttgttggtgacacactggaaaccttaggaatcaagttgtctgatgctaagagaactttaaactctctctaaatagaacacacctactgattgcttgagggacttctctgatacttatgcatagatactctttttcagcatgttggaggcaatattttatactttctaaagggttctgaagaggcaataaggaagagtggggatttttctgcccctgtaaaggtatcattttctatcattggtatccattgttccctaagcatcttctgatacctaaatgtgtgtaaatgcatatttaaaataattacccatctttcagtcaatacacagccaactct

SEQ ID NO: 159324 - DNA, 1000 bp, Homo Sapiens
ttttttttttttttttttaatacaaacaacttggggaaggtagataagtgcaatgggagggaggattgaattgaatagtaaaacgtaagcgtatgtgatttcttactttggaagagaggccctttgttataataaaaaaaaaatcgagaaagagaaaacaaataaaaacaacaacaataaaccaaactcctacttccaatgttctctagactgttcaaaatgcctttccctcggtttccatcagtacctgggagggaagaatgggcgttttggtgcaaagaacggagggcccctagcaaaaggtggcctgggtctctttaaactgtgaaatgggtctctgctgagaaaaggttccctaggccgaaagtctggccggggactccgtaagattataccactccggctgatggtgtctctgtgtgagggacccaagggggggccactgctgctgttgctgcctcccccacctcctcctccatggggtgggcccaggtgttccagagaatgggagggtagggtgaggctctctcgtacacggctaaggccagggccgttgaggtcccgttgggtggggcccccgtggtccctgggtcctgggagtaccccaaaatgctcagccagggtcccttgaaggagggaactatggtccttgggaaatactgccacagcccctgccactccgtgctctgccagtggtggggctgggaagggtacaactccagagtggtcaacagggggtggaggagggggtggagtagaaaaggggacaccactcccaccactgctgctatgttccccaggagggggaggaggaggtggggtagggaaaggaattccactgtgctctccaggaggagggggtggggcagcatgggccagggctgcctcctttgtgaaggggttcgaaagatccacagagggtagatgagtgggtgcatctcgagagaagataccaccatgatccttaggagggacaggtggggcagatgatggccccact

SEQ ID NO: 159325 - DNA, 1000 bp, Homo Sapiens
ctataaaaatataactctttattaaataacatgcacaaatatcaactagtcattaaacagatatttagaacaaattgtaaagaaatacaaatccttaggtacaatttagtatcttgttcatgatatttgaagagtttaaaaagaatcactgattaaactaaccatcctttttctttctgaatccaaaaccttttcaggcatatactccattccaaatttttttctagcatttcagagcttcagaatatctttaataccaaaagcccttaactacttatttgattatacatttccaatgagaaggcattaacttttcttttaagctatcattagctttgagtctctttataaaagaaatttgtagaagcataatcatggcagagaggctccagctttttgaggtaccatttaagagagtgagaactgtggttaagactaaaaagctgggatgactaaaattcaccagattccttcttgtcgcttttatcttctaaaagcctgttctgtttgggccaacagtgctatttcccagacctctggttgaaccatcagaacaaaatgccctataaacttacccctctctgattttctataacttcaaagttcaattatctggttttttatgatttgccacagtatcccatccaatttcctttttaggcaaaagtataaacaaactttgcagtaagttttcatattaaaaagtattgcttttataaattagcttttaatgttcccaggcttaataaacttaacttcaacagaaccagtgcttcgaaatctaccctgcctttctggcccaatttatccaataaaaaaggccaaaatctctcacctaaatttctaaggaaaactacatccaacctttataataaagtccttgcactgtgtatttttttttacatgtgctgctttattgcgcatgccaagtacagtaagaattaaaatataaactgacgtaaaaattcaaaaatccctaagcttaatatgtacctttgca

SEQ ID NO: 159326 - DNA, 1000 bp, Homo Sapiens
caccataaaggcaccactaaaaggttttatttagaacctcagcagcctgtagaggctacacaatttcaggttcatcagcttttacaactattttcaacgtaagaatagaagctattagcaaataacttctatcaaatataaaagggaggcctaggatatacaacatctttgctttataaagatgcacctaacatgaactaacttgtcaactttagactcttacagcagctcaaacagttgcaaaaacaatgaacatcagtgatttctggcaataagtctgtcagttctaagagagtaaacaacacttttttaaagctacattctagtctttcttcatacactacacataagaaagaaatgcaggttcaaaaataaatcacccaaaagtcttttccatgtccactgagacttagccttcagttcaacacaaacaagagataagtgtactccaaaatgccttctgaatctcaagaatctgtttccaaactagaacattttctaaagataagcaataagttccttaaaaacatgtctaccccacccaaaacaaatcaaacccaaaataggctttacaccctgtcaagtactaatcaataaagtgtggcaactataaactatcatcaaagaattaaagacacaaaccacccccagctatgcagaaaaaaatggcaagtgtttatatgaagccagtggttaaaagtaatagggccttttgcttttccattcatttccaaagaggaagattatcttccaaagaccccagtggtgagtaagtggcaggcaacatgcaggaaatgacgcagctgaggagaggaaaattgcagcaacaaacaggtggattttctggggaaggatccctcaatgtccgtattaagcagccatagatgggtcatttttactgtaaaggctgatcaaggaagataccctgggtttggtagatctctttgaggacgagcaatactgtatcttcagactcccagtagcatagatggctttgtaa

SEQ ID NO: 159327 - DNA, 1000 bp, Homo Sapiens
ttttttttttttttttggggaaattttcttcatttttaatttacagcagaaagaatataaagcattcagaaaacattttccatattttaagggcaattcaaaacattttgcatggtttccagcagctgagttcttcaacagatccattgattcaatgatgctttacatgcacaattacaaaaataaaacttacaaaaaaagaagacatctagactagttttacatgcaagtctcagggaccccccattgggcgccaactactgtgtggaactgccataagcgaccgtgcagccagagaggggttcgtattattgtctttatttcgttcacacagtacagctgatttcgaatgggtaacaatagcaattaaatcttcaggagatagaataagattagctattaattttataatgaaatcctactcctggcacttgggaattcagattatccaagaaagctgcgcttacctatcatcttatattcgaaattaagattcataaccaagaaaaagcggtcagaaatgcttcgtttcagtggaagtgcatttttgcctcgcctaggattcacagttgtactggtaggttacactggtaggctttaaacctacttcctatcccctccatgagaaccctcttaattctatggaagtctctaccatctgtcattttctaacgtattcagctaataatgtaacatgtgaaacattaaaaaaaaaatgtgagggttaaagcaaatccactgaggtcattactctggttaaaacatcagttatttgtaccataataaatggaataaagatatctaaattcagtattaatagaggatattctgaaagagctggctttcacgttctattcccatttatgaatgcagttgtgtttgtaaattactcagtgtcctcctataggtcaaattgtgtaaaataataggtatctgggggactgcaacagctgcaacataacccacacatttaaaaacaaaatggagtcaggtcagttta

SEQ ID NO: 159328 - DNA, 1000 bp, Homo Sapiens
ccctccatcatgaagtggtgcaaagtacatttatttttacaatgaaagctcatctatgaatctgataaaggccttccttcaactggagacaatttgggatgttgcaaaacaaggtttgggaagcccttctatggatcggttttgtgtccaagtctgtccctgccaaaagccatcaaaagtctccatcacccctgggctccagtctgctacccccagacttggcagctgggatctctccttcctggttcatagttctcattcccacccctcagcgatggagttagagttccaggcccacgtggtgaacgagattgtgagtgtcaagagggaatacgtagtttatgatctgaagacccaagtcccaccccagcagctggtgccctgcttccaggtgacggtgagtcaagtcgggaggaggccgacagagggctgctggaggcgggtgggagtgaggatgcacggccagaggccaggccccatgcccccgatgcccacctccttcccccccgccgggaaggccctgacttttccccttccagctgaggctgaagaacacggcgctcaagtccatcatcgctctcttggtgcctgcagaggcactgctgttggctgacgtgtgcggggggttgctgcccctccgggccattgagcgcataggctacaaggtgacattgctgctgagttacctcgtcctccactcctccctggtgcaggccctgcccagctcctcctcctgcaacccactgctcagtaagccctgctcccttacccagtctgccctgtttctccccggtcacccactggtgctcagctcgctgggcaccagagacacagggactggcccctgagcatctccctgtgccctgcctcccccagtttactacttcaccatcctgctgctgctgctcttcctcagcaccatagagactgtgctgctggctgggctgctggcccggggcaaccttggggccaagagcggccccagcccagccccgagagg

SEQ ID NO: 159329 - DNA, 1000 bp, Homo Sapiens
cgcaggtttcaaaaactcactttattccaatgtgaaatgaggacgtgatggtttaaaaacaagaaaaagttcttgctcagcggtggggatgctctgcttgcccgctcacgcccatcccccttgaaacaaggtgtctggacggaccacacccataagcggctctccgcaaacccaggcagacgcccgtctcctccgggtctcagggtggccacatcctcccccaccagggctctgacagcaggcacagagcagcagcacgggcagggtggagcgggagcagcgtgtgggggcccccgccacccccagagctagtctcagaccaggaagggagctgggcaccagagaagcgacatcacgtcggcacctgtaactcccgggatccgtaattgggccccgcttcccccagcctcgcccccggcccactgtgcgttcggcagctcaggttaaaactgaggggagggatacattcagaccgcaggccccaaggctgcgcccagctgggtgcagggagtagggagccgagtcagagccacccactgggctctgagggcccagcaagccaaccccgacccctccgttcgggagcagcagccagaccacgccagtcacaacggcggctcccgtcccgccccaaactaaagtgcaccccagccctccagccccgccacagagctccggctccccacccctccccaccgggtttttcggcctaaaccctgaactttcagacaggctgggcccgggggtggtggcagccaaagcagcagccatcatgtcgaccatacaaatgacctgagaaatcccgtctgcgcgtcacccactcaggagtcacccactcaggactggctcgggctatgtacaggggagaggaacggtcaacactcacagccaggggcgcactcgcacacgccggccggagggcgggggccgaagcaacacctgccccccagccgggaactgatggccgcacacgccattcacgtgtctccaatggggcctc

SEQ ID NO: 159330 - DNA, 1000 bp, Homo Sapiens
caagtagacttgtaaaacaattttaatgtttactcaaaataaatgagatgtcatcattagcccttatctctcacacttgaaaaatggagacagttgttcagaatagaaagggaaacagctattagagtttaagctcaagtttcaagaagaattcagataaggcaggtaaaaactctagatacttttccactgtccaacatcaccaaatattaatttccacatacctctttatttcataaaaatataaatatttattagaaatagtatgtttaagattagtttttctttctaaataacatgatttcttgctttaaaggaagattccctaatagtgccacctatttcataaactgtcctgcagttttgtgctttttaaaaattctaatttactttgatttaaagaataaatatctcatacccatggtgaactattttatcaccccaaaatacaaatgatccgtattttacaatgaagaaattcatagcatctaccaccacatcactgtactatgattggactgactgaagtatgggcctgtgaatatagattgaaaaataaaaaagaaatgctaaaaaaaaaaaacttagctacataatgtttaatatcaaaactcaccagacaatccaattttaaagaaactgatggaaaaatgcttcccctaacatgaactatggttagatagcattgtctgtcaggaaattcaccaattcagtagctgatctttatgtggaaacaaaaatagggctttgtccttattcataagtacagggaagagaccacacctttacttaaaaaaagaaaaaaaaacctagattaaatgtgaccaggtagcccccaaatgtatagtaaaccaccaactagcccctggctccataatggccatatattgtattcttccagttatttctgacaactcggagaaaaacattacaaccttaataataatttaaaaaaatctaaaaatcaaacaaaacaacaggaccctgtggtgatgaattt

SEQ ID NO: 159331 - DNA, 1000 bp, Homo Sapiens
ttgttaattaaagtatataatgtaaatatggtattgaaagtataaaaattaaaggcttctgaaaaactcaagaagggtcaaaaggctatacaagcaagtagtatacagattgtttccttaaaagataaattttaatatacagaataaaatccaagatgattttattatttttcactttcccaaaacttgtgagcatgaatgcttctaaatctgaccaatgaagtttacattttggtccaatacattatgagactaacttgtatgatcaagtccagcttgattatcataaatcatagaagttaacaatttactctgagaatctgttgctaatatagatgatggatttccaattttttcttagctaagaatttactcaactttagctcagaaccagattcaaaatatcttctttaattagctggtcatcattttaggcttaatctaggcaaattatttaatactcaattgaagatcatataaaacctccaaaataaataaaaagtacacaaaattattagcttttgtgtacaatacagaaaatacaggtcagttctggaccaaaataattgcattaaaatacaaaaggtgatagggaagaattaaaagatttgcagtgactgcttttggtggtcagctacaacaagccaacaaccctcagctattttggaaagtgaaggtgagtcttaatttgcagataatgaatgtcttcggtagtttaaaaaaatataaactctaaaaaagctcgtgaatcatatacaaaagcagctatttgagaccaaggttgaacaccagaaattgtgttagcaccaccagcaagcacagggtcctctgactcttccgccctcctatcttgtgcagaatgcagacttgaatgttgtacacatcatttacagttacaaaaatcggccttgagtacagggttcctgtagggtagtcttaagtcctaagaggcaccaagcggttacaaaggctaggtgacaatccaaatcacaaggtccga

SEQ ID NO: 159332 - DNA, 1000 bp, Homo Sapiens
ttttttttttttttttcataaatatttatattttttaatgaaatacacaccaaaaaaaagcacacatgcagataattcacaaacaatcaaatccttgggaaaggctctgccatttgttcaacaaggtcaagtgtcattaggagcacagaacaaccgaatgtaaaatttctttccaggagctttccacgtggttggaataaacacaatttagaccatgcaaaactcttaatgtatattggtctgggaacttaaagatggaaacagagaatacatagggagctatgcaacacaccaagggccagtatccacaataataataacagtgacaacagcaataataatatacaatgctataagattattaaaatctattctataatgcacagagaagtacctgcttgaagccattaaatatatgacagggtctgtcttcagtgcaacatatcaaatttggcaattgaagggtatatcaaatatatattttttgctttcaaaatgtggaacaaactaaaatataaggcttttctgataaactataaaaatttaatcagcacttggatctaatgacatatctttataatacttcctctgcagatacattcacttagttcaaaccttaacatacaaagttagtctcaggaggatcatatttccttccattcatttcttataaatattgttatccacttgaagtcgttctgatgaaggaatttcctccctattttttcagcctttttttcctcctcttagctaagaagacatcaggaagatactgcccaaagtattcattccccatgacttgctttcagtttccatttttgagccattaaaaaaaaattctcaatgttgcactgagtgattatattagatcattaacatggaaatcttacaatatggctcttaatgttgtttgtctttatttgttcctattttcatctttctctttttcttctttttccctttctccctgtttccctcccttctttccttccttccttcc

SEQ ID NO: 159333 - DNA, 1000 bp, Homo Sapiens
tttttttttttttttttacaatatcttctaaatctcaatcagttgtttattggttggcaaacaagtttcacttttacaacaaatattagtaatgaggtcatccaactttgagaccatacaaaatggatcataaattaaaaaaaaattatatgtgctgctaatttaccttttgtattcctacattactcaaaatcctgtcaaataaataaattttcctgttaataaacagaagacttttttttaaaaaaatcacttcaaaataatttgaccttccaatgcttacgagggagtgaatttcctctaaaaagtggtagtgcaggtgcccacttgttgatcagactgagcattcagcactttaatgcctatggaaaaccgtttttcacatgcagaagccccactagttctatagacaccttttgacttctagaatcatagctagtgtcctggtgatgaactgcttgccaaatatgctttgcattacaacagacgtgccctgtaaacataaaagtttgtcctgctctaatttgcaaaaaacactgttggaaatattctgactgcataaagatatatagtgagggaaggaagtctaattttatttattttgtttttttgtaaaaaataatttgtttgcattactagaaaatgattcttataaagtgatagttccatttatttattttttgccaggcgaaattttaaaggaataaaaggcaaaaaagaaaaaaagaaaatgaagaaagagaagaaaggaaggaaactttgctctcttactggtagacaaacttgcaagaccagcacaaaagaaaaagaaaatttcttttttttttttctactacattaacaggactcaaattctggaggaacagaaagcagactatatgtgcaatgctagtatctgtacattacatagaaattgctcaacttctttttctgccattagttttatcatcagttaatacagcaaatcataaaatatgcatttagcatataattctagaat

SEQ ID NO: 159334 - DNA, 1000 bp, Homo Sapiens
tttttttttttttttttttttttctttttgaaaggccactttattgatggagataaaactgaatggagttccccacagccctcccctcactcatgttagtggcttcactgggcatctgagaccagcgtggcctgtcacccacatagactaggctgcttagcccacccagcctatcacactgcccgctccacgttgggcagccacataaaaacacgtcacagctcaagaagatccgtggatgcacctctgaatcccccccaatggtttctgtgcatttttttaatattgtacaaaatatgttaactaggaaaaattagctgtactgtgacaagtgcgggacgtcctattaggattaccgtcccccaggcattacttcttattgcagtaagacctctaaaaggtggagctgtacaaaccaaaaaaaatctaaacgattttaagaagagcagcaactcaatactgctttagttcatttaaattttctttcccaaaaatacactcctaaatatacaaactatacaatcttattattttaatgctggttttttttgtttctgtttttgtgtgtgtgtgtgttttgtttttgttctgtttttaataacaacagtaggacccaaactaaaaagtcggttcatcttcaaaccaacaagagcactagaggacttgtgactcagtaccttcatataacaccacataaataactttagccacagtcaatgttcacagcctggtcagtggaacaaaggaaatacttttctggcgattagacgtcatctgcagagagagctgggatattcatccgaggccgggtgaaaaatgccatcttctccctgaaagactgaacttctgggggttccttacagctctggcctcggagcctgtgcacatccttggcagctgccctcatcatcttgtctgtctgaagctcacccttgtgctccgctcggtccatctgccgcttctccagcatcctcagcagcaggcggaaacgctcgtcctc

SEQ ID NO: 159335 - DNA, 1000 bp, Homo Sapiens
ttttttttttttttttttaaggctgcgttcatgtcgcttctcatttattaattcagtctgttctaagttgtgtacagttatgaaaataacaaaaccaaagctggaagcccagaaatatttacactctcttgggtactgaggtcagtctatgttgttgcacagattggttatgtttggtacctcaaagtgtttataattcagacaaaatcagacagattaacaattttatatacagtaaaacaaaagggaaagtcattcaagtatcaaaatacagagacaaagattaaataacattttcattacagttcagtccattgccacaccatgagcaacaatacttctgagctgctttctgctggcctgggcatctcaaagacagacccaattcagactggttttctaatgtctctgactgcagctctgcctgctccctgctcaaacccgagcatctcgggaactcccattagtgtctgacgctggagggcccaggagggacgcagagagctgcacacgcagagcctgtcgggaaggtcttatgcgctgagcagctggtgggcaggggagaagaggtggacaagaagcctgtggctgggacaggtactgagcccatctgaagtctcccacccgaatgggctccttcacagttcagaaacgcagcgacagggtctgcccctggtgtgacctgcacttggagaagtgcaaaagtaggggccttcccacttgaagcctgtccttaaagttataataacctttctaggaaagggagactacccatcccagaggagaagaaaagaaagaaaggcccagtcattttcctttcttgaatattcagaaataaaccaatctctaaacagaacccagagctagagcagactagccaaggcttccaatatgaaaataccctgaataaataaagatgatatagcagcttcaagcagaagaaacacctatggatgatctaagcacaaaagacagcttgaggagtgcatcgtagtgtctg

SEQ ID NO: 159336 - DNA, 1000 bp, Homo Sapiens
tgtgctttgtctttttattattctttattggtcctaccaatgtgactctttacccaggcccactgttcctatgcgcactggctttgtaggcattcacatcatatgtctgtgtcctgaaaatctcaattaatttctccttcctattccttttccatgctctgcctcattttctcagaaattgaaggcatttgattattatttttttgtttgggtctgtgtaaaggttccttggcaggagaacatgcatatgactttaaaataaagaccaacattctgacactaaggtaatgcacagaaaaaatacagtactcagacatcattgcaaataaataccccatacagatgaagttatctcaaatgtaacaatatttcttatgaatcaacactgtaacggaaggtaaaaataggagtccctacaactaggaataagaaatgcttattccaggaaacagaattcttttatttttgtcatttatattattataatttttccttttttggagaaggaaggacagtttttcttcctccaagagtaccaatttgaccactcccactaacctcactcagcaaacaaaacaggatgtagacctggtttgctaaggagttttaatgagttctgtttcctgaaattaacagtgattagttacaccaagcaagagaagatataatgtctcgctttcacatttgcaaagaatactatggctaaccctcatcccctactgcgcatgccaacacagcgtcggccctcctgataccctcagctcttcacaaacgtggcgttcatacagcttgctcagcttgtcccagaaggtccatttggttcccaaagcacactcaaggttttgtgtttgctttcattttctaagcccctgaatttgcaagtaaagaatcactgactaacagaattttgcacaatgactgttttctttccctcaatgaagatgcccaggtctgggtgtgaggagcacctgcctcacctgctgtccacgctggccttcag

SEQ ID NO: 159337 - DNA, 1000 bp, Homo Sapiens
attaaataaaatcattttatcatatggctttcaaaagacaatgagtgaaaacttaaggcaatacaataagtcatatttatgagtacgttcaagaattcacaaaaaagggtacaattctggcttctctttaatcattaaatttcagtttttacaaataattcaggttcaggttttgagggggaaacagttcttgtattattacatgctcatttttcttctgtaaatgactctattggctagatttacaaacattgtcacagaaacaaattttttaagccatagatcactgcatttatatttacaaaaaagccataaacatgcatttctcctttattaggacttaaatagatgcttgaatattaaggcagtgatgattctaaaacataatgaaattctaagttaaggctttatgtttcttttgaaacccacactcataggcaactgtgaccaaaccaaactcttacctactaggttgagctcatctgcccgggatatgttatttatccattaccaacacttcttttgtgtcaaatgtatgggataggaattagtagcaaaaccatcaatttactttaatgaatcattagtccccttactaggttttgaggatttagctttcagtaatacaggcatgtgccacagaaaggagcatgtcgtgtgtgtgtgtgtgtgtgtgtgtgtgtgtcaatgtggagaacttacaggctgcactgattcctacttgactggaacttagccaacaattaagaatccaggatctcctaaatacagaaaatccccaaagcatacttgatcatgctcctacctcaaaacacacaaagcattcttgattattgaagcaataggtcttcaccttgttttctttgaagactggtattattcacttaagaaaaaaaaccaaaatgcagaataccatattttagatgaatctatcctataattgctagcctcaaggcacaagtaatatccttgctagatactttttcttattcaaagaaaa

SEQ ID NO: 159338 - DNA, 1000 bp, Homo Sapiens
tttttttttttttttttttatctataaaacttttattaaaattggaattagaaactataccaaaaactttaaaaatacattaagacattgttcttttttcttacagaaaagagggtgaaaataagacccatggcaaagagccatccctgataattttgttcctttcaaacattcatgaacatttaaataaaattacaaatatttaaataaccctaaggtattacccacaggctaaaacttgccagtaattccttagccctgctatttcaatatcaattccacaaacatggaaaattatggtaactgcaggctgtaacagtttctaatattcacattatgagctatttgttatgttgtcataagaatgtgctcatgctataggcaaattcagaggtgatttcatcattttcaaattatcatcaagagtgtgaaagaggaagatgacacacacgtgggatggtgtggaaatccaaagccccacattttgggagtctgtgaccactcccatctgccactaaagctacgagttggtgttggcatgaatctgctttgtttattcccagcaggctctggctcgtgtcacataaggcaccaacatccttttcaaggtagtaaccatctagaatcaactcaattgtaacctgaattcataagcttaagtcaccaaaagacatcactgggtcataattatataggttcccctaaaaaaataaaaaaaaaatcaatttctgctatgtagaaaaagaaacaaaaggtttaggtgcctttgccttgtgcaatggatatttcatatgtttattaattggtttcagttaatatgtaatatgaaggcatgataaatgtgtcaaactgttctcttgtttcagatacaattcttggcatttcaatataggttattatctcatatgtcagacttgagtccagagaatactagaaggacatttaatttcctttcctcctccttcctttcactactcaattcaaagaaaagttatgagta

SEQ ID NO: 159339 - DNA, 1000 bp, Homo Sapiens
agttactaatttgctaatctcaaatgttttctgaatcaggtttgctaaatgctgtaaagaatagctatccttcatacaatactaggttttattttttttagtatgtcagcataataaggtacatgcgcattcattccaccaacctgtttagataatactcagcttgggtcatattcaaatctacacagagattctctgttttcaatacaactgcttagaaagcagaattgcctagtgatgactgtagtgtgccttttaactgaaatgtatataaaaataaaaccccaatctttatagaatgtcaagaattctgttagggatgttaaaagcattgggcaaaaccctggttttcagcgtgccatctgcaccacaggagaagagccgattgccctggatgatgtcaatctgcatgactccagccccaatgtttcgaaatatggactgcttagcatattcacttttaaatgaatgaattaggccatggcctgtcaatctccaaacctttatgttaccttctgctgaacctgtggtaaaatattcctcatagggatccaaggccagagccttaatagctgagtcatgggcctggaacgtgtgaatgagctgcctttgcctgatgtcaaaaatgcagacgtgtcctttcctaccccccgagattaggagttgctgtttgggtgcatactgcagtaccgtggcaccatgatcgtggcacgtgaaaccatgaatgaggctgtttccgggtgatattaatgtgtcccagaggcaaacatttctattgtcattggagtgtccagatgtggcaactagacttgaagaggtaataaatgcaaagtcacttgtggctttactgtggcactgccaactcatataaggtttaggatttgatgcagtttggttaacttgccagatactcagaaaaccctctccatccgcaacaccacacttgttgccttgtgaattaaaatataatctagtaactcttgcattgccagcttgacga

SEQ ID NO: 159340 - DNA, 1000 bp, Homo Sapiens; identical to SEQ ID NO: 157514

SEQ ID NO: 159341 - DNA, 1000 bp, Homo Sapiens
ggagaaaacaagctttattataatgatttgagattttgtgcatggtaaagagatacacatgaatcctgtttctcctatgtttcaagacagaattaattgaaagtttcattgtagactaaagcatccaaaatactgtggtacgtatgtagctacgaacatacaaacactttgatgcacagcgttcattcttttctttaaataggcagtcaacattttgattcataaaagaacaaatgacgagaatatatcagtatcaatgtcagagagtgcaagacttagtgttctatacataaaacatatgaaacagacctataaagatggaatgtacaaaatctaaaaagaaaacaaagcaaaaaaaaaaaaaccccttcatattcatacataggcttgaaagtctatagaattgagaacgatataaagaattctattacaagaatacactccattgatgacagaacattcccatgtcataaagcaaaagcattgagtttaaggctgtgttgctttcaaaagttaatggaagtgctgtacattcattggaacaacatagccaatttattaatctattctagaatattaatagctttcatacattctccacaaacagaccaatcactgccacacaattcatctttagaaagtttttaagcatcatgatttgtagcttactgtcattgaaaacaaaacaaataattctttatttataccaaacaaatctttgatgggcacttagtttcctttatggcaatactagatttctagttatcaaaaatattaaagtaattataaagtttaaaaccctgcaacatttacagaaaccaacagtattaccactttcacttttaagctaaattagataatgtttgcatgaaatagctttcattttttcctacctggagatgtcttgtttttaaattattaaattgtcaaactaaaaatactcctcccttttcagaagctagtgaatagagagggtactatagagtctacaaaaagattt

SEQ ID NO: 159342 - DNA, 1000 bp, Homo Sapiens
aattaagtctcatttattctagggcaaactcaaaagggttttttttttttcttttttagcaaatcctagcacattattaacaaaaaaatctgtacatttgccatgatacacttgaaagtgaaacaaataagatataaatacagatatggatgtaacatgaaaaagccccccccccaaaaaaacccaaaaaacaaaaaaacccacccaacctgggggtgtggggaccatgcgtgtgaacacagtgccaacataactattttggtggctgatattttttcagagcacttctttatttccaaacattattgttagcaaagtcctggtgggattctacaaagttcttatttgctgtcctttaaagtgtaacattacgcttgataaataaagggtggcagggaaagaaaaagactgatgagacaaagtcagttgcattacctgcacagggtggtaagctagtgaggcgcatagaaaaggcaggcccgtggcatcgccgcaggtccgggaagcacacacagtgtacttgaaggaagctgcgtgccccgaggaccggctgcaccctgcccagaccctggctgcaggggaggcagcagcttggaggaagcagggagtcagcccgcccagccccgcagtggagcagcgggggtcttgggccctggccagtccggtagacagggaggcagagacaggcttaggtgctctgctcttttgtgttctgtttttcattggaacaggggccctgcagggaggcggcggcaaggcaaggcagctgcagctgtcagggtctagggggcgacggtgggctcggcgccctcccagtgaggtggtggcggcatgcgagtctcctcggcgcggcggcagcagttttcagattgaggccaagagacctgtgacgtgattgtatctctaagtcaggagactgaagactgggcgagtgacattcaaggctagccctttgtgagtactatgaggacgtccagcaatgttcgagatcctttctaag

SEQ ID NO: 159343 - DNA, 1000 bp, Homo Sapiens
aaaggtcaggacaatttttaaaggtgagaatttagcaggttacaggttgcggagaaggaccgagggaaggaaaggttttggaaagtactggaggcaggaggcggtgggtggacactgagatgtctgggaaagggcttgcccctcagccatcactgaagtgtctctgaaagtgctgggatacctgggcatcgtgacccaggtgccatggactggagacctggggagacggacgagggctggcacagtcagggaatcctggaagaggtgcagagagagccaagggaggcaaggcctccagtccatcttccccacaggatccacctgatggctggccgagtaccccagggagctgatcgaatagcagtcaaggctgagatggaggccgtttttctggagaacctgaggcatgcagctggggttttggctcaggtgagaaaggtggaaacacacacgtacttacatgtctctgtgggtgtgcggagaagggggtgcacagtggggacagcacgtgaggctgccagcctaggtcagaggaacaggtgagggccttgaccagtgactgactgatgggggacaaacttgggaaggagctctattcacagcacccgacatgctgctaggaggacctcgtgggactgctggagcccatcaacacccgcatcactgacccccagtacttcctggacacgccccagcagggtacgaccccagccctgtctctccttctgtcccttttgattcctgtgctcttgaggctcacggtcccctccctggcttctcttacagcggcagccatcttacagaaggtaggaagacccaacctccaattacaaatggtaagtggaagggggtacttcgcagatcggaaggagggcggggcctgcggggtctcggaatgtagtatcctcttccctaggacatattccactggcagatcatggatgggaacctgacaggaaacatccgggagttcctgcccattgttggtgagaggaccttc

SEQ ID NO: 159344 - DNA, 1000 bp, Homo Sapiens
ttttttttttttttttttttaggcttggtttcttgctttattaggtttattataaggagcagtgatgagatctttatcagtcctcactacaaagctttcatctccagccttctccatagctctgtggagggcagagagttgagggaaggaagaatggagcttgggagcatgggatcatgtatgtataccaggaaagaaaacacacattctttattctattgcttcaaagacagtttgtgagaatggaagataacaagcacagctggccaggaaggcagggcacacatggcaggtcaagttcctgctatccagggaggtggcccagagcttccctgctgctcctggaggaagcagagtccaagctggcccagatgaggccccgggcagcactgcttctgtgtgggtatggccagtcgggacgtggcgccacacactgctcctccgaactctggtgaagggctgcccagcctcacaggcctgagcagagtctcccacatctgcgaatggggccaatggcactcactgtctcttcaggcccccacggacggcatgcctggggaagcctagtctacttaccatcagcacgttgatctgtcacacagcatggagccatagtttacaaaggaccacggcaggtcaaggacaggccactaaaactgttggtgctgggcaccatcacccaccctcaccaccatcaaagacactggtgcagtgagacttcgagtctgcaaaaaccccggggaggacaggaggcagggccactctccctgtgtgtcatcagcctgcagtgcctgaaactccagcctgtgcacctctggcaggatgccccacactgctccacaggtttggcggtgagttatttttaaaccagcgtcctgctgttcttgccccccgcgtcccctctgctgtgcctaaacacctctcaggaacacttggcagcacgccattgtcagttccaggtccactcatcccctgcgtgttgccgggacccaccttcctg

SEQ ID NO: 159345 - DNA, 1000 bp, Homo Sapiens
tttttttttttttttttttgagtatgatgtttaatgtaagatccagtggcttggcagagttggtgcaaaactgtaaagtaccagattaagttctagtcagtgagttagcagcctaggcacttgggcaaaaaaattggccctgctgtcccaagtcctccaaagccctctccgtatcaccagctaggagctccaagactgatatgccactacttggaggcttgagtagaatccacgcgtcctcagtttccaaagtgacaagagactggccccagccatcaaagcagtagaattttcaggacagggttgaggacagtggggacagaactggacatgggggcctgagctgctgaacatttgctacatgcagtagtctaagaggctcacagctggagaggttagcctgtccaccttcccacccatgtgtggtagggaagaaggtgaccatctagttaaagaaaaaaagatccttccaaagctgtatttggcataagctaataccactgctagtgctgccactggccaggcacagatacagaaggccctgaggagttgggaggaagggagaacaatgtgcaggcaaagcaggaaacagccagctcaggtccccgccccaggggcccagaaggataaaggccgtgcagtaaagggaacatacggttcttctctttggtcaggcaaaggcccgaatatgggcctgttaggtgaaagggctgaagggcacaggctctgcccttggaccctagctttaggctcatcacattgaggcggtgatggagcgagacgaaggcaggaagacagagcagtcaggctgggactcgccagctcctaggagctgcccttgtccttgttgtccatcaggtcataccaccgggctacaccctgggaaaggtctgtctcagctaggtccagctgcaccttccccagcagctcacgctctcttgacatgaaggaggaattagacttgacagagacatccagctttcgtctctgggcctcatcc

SEQ ID NO: 159346 - DNA, 1000 bp, Homo Sapiens
tttttttttttttttctcaagttgattttattaacaaaaagtgcaaactattttgaacaaaagtaaactatgagtcacagcattcagcaagacatcagacacggaagagtgaacaatattcactaagtaaaatacagcagatgagatgtctctcacatgtatatttaattattcatgctttttcaatagtctcttagtcaactttcagtgtaatttccacaaatatatagcagctcaaacacaaatgcaggagcacaatggcaaagtttggcaactgttttgggctaattatgagtatgaaagaaaaccttatatcacagtttcacgttcatgtaagccactgtgcaacatgaatgaatctttaaatgtgttgacactgaaatcaatgtacaactaatgaaaataaagaagaaaagggggctttaaaatatttgttgcactacagtcgtatagtaagaggcagaaaaaaatgaaagaattttaaataatcttacacgtgtctacagggccaggaacgtaatgaatccatgttaacttaatttcatttaaaattacatttgtagaagtcacacaacagaaagataccatgcggttgaacagtgtgcctgtacttgaacaagtgagagaagatacatactccaaaaaggagattcagtctagtgttacttcagttattcacatagtgtctacagggcagaatctcttccaaagcaattttctgttcactaatctacaggcactaatggaactgtaattaaaaccccaaatataaagatgattatttaaacacaactaagctctagccaaagacagtagagcaccaatgccgggcgggttactgacggcatgcagggcctggaggtacattttctggcagttaaccagccttctgctgtagtagacaaactgccttttgtgaatgtacaaatttgctaaattaatagagaactacattgttatttccttacattacaaagaactcttcccatactgtttttcc

SEQ ID NO: 159347 - DNA, 1000 bp, Homo Sapiens
gttttatgcttattatcatttattccttacaacaaccctatgaggtaggtactattattcccattttaaagatgtgaaaattctatacagagaggttaagtaacttgcatcaagtcagagagttaataaatgagggagctgattaaaattcaggcgcctggtacccaagttcctgttcttaaccactacactctagcagcctctaagtttagccctgcaaccagagttcctccagggaaggaacgcttcaggtcatggagaagttcaaggggaaaatatccaaatggctctgtctccaaatggggagatcctaagggccagagaaggtgaggccaaggggagcctccactacagagagccaggcaggaccaaggacacccagggcaaatgattgtgttccaccggcagcttactaccagcccagtctgactgcggagtatgatgaagacagcccaggaggggactttgactttttctccaacctcgtaaccaaatgggaagctgcagccaggcttcctggagattctacacgccaggtggtggtgcgctcaggtgagaaacgggcctgggtatcagacagggttggaatgtcttctctgggctggggaagtgatgggattaggagagctgagattacaattacagagtgagaggatgccaccacttctagccaacctgcagatgagaaggtgtgaggtcttaaagacagccatactgctcacttctgttacagagccaagtcagcatggggagagtgaggaaggggaaacagaaaccaggaggagcagtgggctccttcaaggctgagaggacccctgtaccttccctctttcctgctctaggggttgtgctgggccgtgggggtggtgccatgggccacatgctgctgccctttcgcctgggcctggggggccccatcggctcaggccaccaattcttcccctggatacacatcggggacctggcaggaatcctgacccatgcccttgaagcaaaccac

SEQ ID NO: 159348 - DNA, 1000 bp, Homo Sapiens
ttttttatggactaattacaacaacaataaagaacgtgtgctttaaagcatcacattttgtaataagcccaaaattgtcagtttgactttaagtgctcttaatactaaagttactaagactgcacaggctgcctttttttttttttttcttttctttctgtatttcccaaattacagggagctatgcccttggtattgcacacagtacactgcaaaagattcacaaggttagttgaaagtcatttttgccctggtgattcaaagctcaaagaattttctagcataaagtcttattaaaaattttaatcaaaatattatttgagtttaagtttaataaaacaataccactatatatactctcaacaacttcattatataatcagtcctatgaggttgtacttgcttttcatatcacactgattaaggacaaaaataattttgatgtacatgtaccatacactgatatgcaatctacacactgatgcatttacatacatacaactataaatacccacaaatacaacaatggcaggtgacagcattttctttgatgactgacatactgcctgtaagaatagtctccaaaagcctgcaatactacagatacacacacaaattacaaaggatgaaccgaagagacttaagaaaacctactgtatatacaattatgtaacttgcaaaattttcctgctgttgcattcaagtcaaactgtcatgcagattcaagtatttaatgacattctctctatgaagacattctctctgcatgcaatgggccaattattgtcataagcagaaggctgcccacgtgggttctggatactgtaggtacaaaaggagaatgcctttggatttcagtccttcctttatggatgagagatggaaaaggaatctgagagaaaaatcagtgacaaagcccctctctattgctatcaataatctatcacggggttattctgtgatgatttgatcatgtaagatgctataagactggtggaaa

SEQ ID NO: 159349 - DNA, 1000 bp, Homo Sapiens
cacatgcaaatacagagttttattgtctccattcctaggaggtggctatcaaagagcaagtgggaatggtacaggtatttctttgttccaccagatatgtatctgtatctgtatctatatatatagatatagatatatgtttgtaaacaaagccaggcatacaaacaggttaatttccgcaaagtacatttgaatagtcttaatctttaaaatgtttaactaaaagatggtataaactactaagcattttattacgcttattagctccgtcagccaaatgtgcccttgaatgactgaaaactaaaatattatcccaagaataagtcaaattacaagtatttcaaaaccaaaatacagcaaatgcccaaagtaagcgagccttctgagctaaaatgctgttggtaaaagcacagaaatgttggtatgtgaagaagcccagcactggggacaggaaaaatagaggcatatgcttcatttagggtaggattaaaaccaaagttatcttcaggtgcgtcataaaagctggcctacctcactgaactttatacttaaaaatagttacaatagcaaattttgttatatatatatttcaccacaattaaaaatcaataatataccaaaacccatctgattatacactttaaatggatgaattatatgatatgtgaatatctcaataaagctattaaaaaaacaacaaacctgccccacatgctagggcaagcccacctgccagcactgtcatgaaggtttagccttgttgctagggatgctctaataagcaggaagatgtctgacagtcactgacaggaaaattaattacaggctcctcgactcctcaacttttctaatataacttggacaagacaaatcaaccagaatacaaagtaaaagtcacatgcttggttcctttaagcttatttaatatttgaaatcttattttctattttcccagaccccagaaaacagaaagtttttagatgaccaatattttgttcca

SEQ ID NO: 159350 - DNA, 1000 bp, Homo Sapiens
ccggggtgagacgggtttattgtgcacatttacacagcgtcagcagcgtctgggctggcagcggccatgctcctgtggtcgggctgctctacaagggcgttcacttttcttcaccacactatgtacagtcagtgctccaaggtgatgggctacagtgctgcatcagtgagtctgtacacacatttttacataaattacacacgactcatacatgaaaaatagagcctaagggcctgtattttaatgagaaaaaaaaaaatttccaacatagttcgggtagctttgaatggtctagtcaaaaaatacttttggtatataaaaagcctgtacgtacaattcacacctcagtgaagcgccctccttgccttgaggctgggcctgggacaaaggtggcctcacagccagcccaggcagggagatcggcagagaggggtggcccctgaccccagctcctctgccccagctgctgctccttggtggcggcccctcctgacaccaggcgtctgccatccttcaggcaccaaacagccccgtctacctggccctggtctgccctcacaccagtccacccccagccccaaccccaaccaccctccgctgccacggcctccagcacctgactccattcagggaactgaatttgagcttgcaggggtgagaaccacactgagcagcatgacaggctgtgagatcggaggagaagagtatatgctgaggctctcccagttgtcacttggtcttaggggtcctggtgcccgtggcgcggcagtccagccacagtgctgggcctgcacaatcagcctttaggtgaactggaacaggaagcggaacccccaaggcggccgagcagagtgggtactgggaggcatacacactgggcagcaacactggacatgtttccatacagaggctcctttggtgatgaagggaagaaggatcatgtgtgggaagtgtgagaaaggatgagtgtccgattcggtgacggggggcagggcggtcg

SEQ ID NO: 159351 - DNA, 1000 bp, Homo Sapiens
ttttttttttttttttttttttttttttttttttttttttttcaccgctcatctcggacacgtttattgctagaatcaggtcttaagttctaaagcgggtcagaaatatcccgcagtgaggaaatgttgtaatcattgtaaaaataattagcaggtgactaagatcatgaccacaactgacaaagacgtgtgcagatcccacgaaaataggaacatttgctcgactgtcaactttacaaataaaatcgggctccaacccaggagtggccgaggggcactggcgagggaagggctgtcggcgctgccgcccgatgcctagcacgactgagacccctctgccacatggcggggacgcggggttcccaccgcgtggccgagcagaaattccttgaacttctcccccatccaaggaattgtggcatctcggagggctggaccggcacacgccggctcaggagggtgccagggtctgggaatgttctcttcacaacagaacaggaatgtacagtcagcttctgtaaagtgctccgatactcagtacaaaaatacaaaacactgatgataaacatggcacacatgggatctgacggggggcggacagcgtcgctgatggccagggaccgggctgggcagagttgaggtcgtcggaggggccaggagcctggggacacctggccactgtgttctcaggaccttgtcaccaatgggctgtatggctgtggggctctggttcccggttggcaccagctcctgccccgccccctcctgagcccacagcacccagtgggcgcctctgcccaggggagcacttcctgatggagtttcccctcccttgtgcccatctgtccccgagtggcgggaatgtccctgttcactgtattcagcgtcacaggagtgcctctgccagcacagtgggagaagggctgaatccccccgggatctgcagttcccaggaccctgggttcgggagaaggacttggccctggcaggggctcacatg

SEQ ID NO: 159352 - DNA, 1000 bp, Homo Sapiens
agcagccaggttacttttcataaatttatttatgaaattaaatgtggtttctggcttggagaaggaatagtgcaagagtgactgtccatgctgctgaatcctgtgggctccacgccagctcgccaggccctggctctgctcctggcgccccttggcaggacagggcgccatctccacacacccgctgcctgggctgtgggtcagtcctgtgtgctgagccacagaattcggtctctctcttatggcttctcacgctcacgagcgtaaggcaatcttctgtgtcactaagaatcaattctttttctccattgtttgttgttagaaaaacaagatgccaaaatccaaacaaaaccaggaacgaggtggttctggagctaccgcacagcagcaggcagactgaccacactcccgactgggagtatgcagccgactgcaccgtcttgtccttttccgctacacacacacacacaagtgaagagggtgtccagcagccagcggtgtcttgaggggctgggaggcgaagggcgggctccgggcgcaacacaagggtgtggaattcctggcttctgccctcccaagtggcaagctgcctggcaccactggccgggctggggacttggagaactagagggcagaggggcacatggcctggcattgcaggccacagaaggccagagagtcctgcccagaggaaatgaaaggaggattaggtttccagagaagagggtcccacgcaggtagcgccttctccccagctgggcctgggctgagctgcggtttccccgctccagcagtgaggccctacacaggtccagagggcggatggggcccaagctgcagcggcggtgtggcgagtgcggggtctgcccccttgctggtctcttcagggcaccaggagcagggaaaaagacaacaggagtacagacctggcacgtcttggtggcacaagcaactccccagcccatccctgctcacttgcaggcagaggaaggccaggccg

SEQ ID NO: 159353 - DNA, 1000 bp, Homo Sapiens
tttttttttttttttttttttttttgtgattaaaagtcctttactttttagcaccacattaaacgactttacatatccagtcacttaatgaaatccaacaaactcttcaagagttctggggatctggtcttggtagttaatgtcattagcccgaactgctcgggcagccaggcacttgagactcatcttcatttgagttttaagcagtatttcagataccccagttgtacttttgtctagcggagtcttattctgtttattcgtcatgtcagtgtgagctccggcttcaactaggctaatgatgatggagtgcaaggtcaaaaaatcactgatgggcctgttgtactgaacgataatatgaagggcactgtttccctcattgtccacggcattcacctcagcaccacagtccagcaggagctttgtgacaagtgcatttggaaagctgcagacgtcattggtgtggaaatcatcaactggagtattggagttgacagccagatgcagcaaggtgaaaccttcacgagttctgggatcaaggtgaatcaggttgtagatctgcttgttaattttgcactgatcttcttcgctgcactgtgttttggtagagatgcacactaaatacagaaaggtatagagattacattcataattgtccatagcattgtggacatcagcatctgaaatatttttcactctgttcatactttgttctatttccaaaacactgcatctcaaaacacattctatgtctggggccttcacagtttcattcaaatgtatcatttgtgagaaaacttgagcaaatcgaagaagatccttgtgggtgttcctgttacctttttgtctgaggtgcagggcatgaagccacaacttgatacactgctcaaattccatattatccgcataaacagctcctctgtaaatgatgggatgagaaacatcaatattgtcagcacctaaaatccgttcccgaactataaggccttccatatgaaga

SEQ ID NO: 159354 - DNA, 1000 bp, Homo Sapiens
tttttttttttttttttttttttttttctcacaataaactctttattgtttagctagccccagtgactttatgcatcttataaccaagaagccttcagtagagcaagtctgagccagaggttttatcacactttgtcctcagggtccaccaggaaccaggtcttggctcacagccaggctggaaacagtcttcacagttctgagcctggagtttgagatctgcctcccctttcaaggaagatccagaggtcacctgcgcttgtagagacatggctgaagctgcaggcctgaaagctgagccttgggccctaccagagggggcccagtcttttggaaatcaaacaagaagaaatggctgttggtcaggtccttggagacaatcttgaagcctagcttggtcacagcccgcagaaaggttcgaacatcctcaaagcggctgctgacctcagccactttcaggagaccccctggcttcagtactctatttgcctcctctaggaagtccctgatgttggttcccatcagtgaaaggcaaaacacagccacatccacagactcatcctccagaggaacctgggccatgtcacacacagtgaccctagggtccagagaagccaagtcaaagcaatgcacagggttccggatacttgaagccaagcggcaatccccacagccgaagtcagccaccactagggatgcaggccgctggcgaagatccctggcgatgcggtccactggctgcagtggccacttcttcacttggctctggaagccgcggtggtagagaagaaaagcctcagggtcttcctggaagagacgctgtgcagcactgctgggccctgagtacaactgttcattgaggtagcgaaatcgggccccatccagccgctgtgccatgcgggctcgcaaagcccctgcccgagcctcatggctgtctgtcctgggaacaggagacacctctgtcttctctgtgggggcctcagctggggcctggtctggc

SEQ ID NO: 159355 - DNA, 1000 bp, Homo Sapiens
cgaaacctaaaaatgtattttattttgaagttgtgctttggattttccccaatccaacatctgttgagtgacagtcttaggttcacacaaagcatctccaagcatacatacaatattccagttatcaacactattttaaagaatataccattttacacaaatgtgacatacaagtcagacgccacaacattgcgattccctggaagatgtgacttctcttctgcatgggaagtagatctgcaccagcccttccagtgctctgcgcatcccggtgctggcatcaccgctcctcatctccttggggagaagccagggcgccctgaggaggttggctgagaccagtgtttccagtttacaggctgctggctacaaactcctctattttctaaattgggatgctagtagccccaccccacctctcttccccgaagactgacccttcagagtccacaccaggaaaaggatccatgccatgaggggtggagcagggctctttgaagcatcatgctggtttcggcaagcatagctgaggaaggctggtctccctaggccctggatggccagctccttttggcttttcggtgtaaaaatcacagtgtgcaacctcaattccagttgtttgcagtgagctctgccgagaaggactctcctcctatcggttcctagtcctctcgacaggaccatctcacaggtgttaggagcaccagagatggggaagacagctctgcccccagagctgggtttagtaggtgaccactcacacactgttcagttcatgatgcaaattagcgcggatggacactgatcaaggggatggtgaacacgagtcatgtacagggttgaaagagaaataaggcaggagcaacagaacaggcccaaagtgttgccattaagaaagctttgcttttactttcttagaggggagtgtgctggagagagggagaaagggcaagtgtgggtaccagttttgatcagttggattgaaaggaatgtaaagtga

SEQ ID NO: 159356 - DNA, 1000 bp, Homo Sapiens
ttttggctcctgtaagtcattttactttgaatatataggaaacaaaatccacaaacaggaagctatgttctatggttatgtcttttaaacaatgttctgtatttacaaattgtttttttccctaagtaaaagcaccagctgaaaagttataggctgctaaaaccgttacaaatattacaaacccattaaaagacattatgccaaacgtacttattaaaaaccttaacaaaacgaagagacaactgacaacgcaaccaaccaattgagccaccatgctgggctgggtggcagttccaatttccttgcctgtgtttctgataaacggggctgggagtgcttatcccagggagaggatcctcgcccaccggcaggtgactacagggacagagctggggagaggcagctgtgtctcaaggaaacatggcagcctcacttcctgctgtaggtggcctcctggtcagaccccctcaacccacaggacaagggcagaggcatacaggagggtctggccagctttcggctgttcatctgtcaacagaatgcctttctgcgaccttgtcctcatccactgaagggtttggagtttttgttttttcctagacacttagctacaggacactgtgtgatgtgtcctcagggacttgctgtctgccttccattgtttttttttttttttttgagacaaagtctcaccgtcacccaggctggagtgcagtgtcgcgatcatgctcactgcagcctcaatctcctgggctcaagtgatcctcctgcctcagcctcccagttagctgggactacaggcatgcgccaccgtgtctggcctctattcttgcaattgaatgagatgctatgaggcgctgagcgacccacaggaaagtacttatcaaaagctttgtgtcatgagaagatgcggctgtggaaggaggttcaaagcttgcacacacgcacacacacacatgcacatgatttggcttccataaagctcgagtagaatattaaa

SEQ ID NO: 159357 - DNA, 1000 bp, Homo Sapiens
ttttttttttcgtgtgggataatctattttaatgaaactcattatatatatatttacaaaaagaataaaggaaaaagacaaaaacaaaaatagatattacagcttaataaaaagtacaactgagcactgtgggctggaggtgggatacccacccgcagcacgcccaccctaatgtgccatctgagggcctggagaaaggacagtgggaaggagacagtaggctcagcccagagatgcccctgtcctcaggggctcaatgtagtttgaccctgacattaaaccttttatgtccttcccagtcaggaaggtggctgggtacaggggtgggggtgaggagcagagagaggtacagggcaggaaggaaaaagtagaagggtcctgaagggcaaattagggtgggtaactagggagttaaacaggagcaagaagcttctatttgtaatcccaaaatctggcatgagtagagaaggaagaggaaatggggaaggggtgatgggaaaggggagcggaggaagggaggcaatttatttatttctccctgtctcttttggatagttccactcttttatgttaatcccaatctgagacaggcccagggaggttccagtgacaaattagtggttgtgtcccagtgggacagatgctctaggaagtgaactgctgagctggcaagaaaagctggggtcctcctcagtatgacacagctcctggctcccggggagcaatgaaaaggacatcagctttggcattgatgcagtaggtgacgatgagggagaagatgaggatgccgaagcccactgtcagggtgatcaactcaagctctttgctggcgatgagaaatatccgggcacggatatctttccagcggctctcagtccatgtagagtattcagtagagctccactgactcagttcaaaggcaggagacaaggccctggctaatcgtgcagtagaacgcacacaccgggggagtcggtccgtctcattagaatgcaaaggg

SEQ ID NO: 159358 - DNA, 1000 bp, Homo Sapiens
ttttttttttttttttttttgcttaaataccaatttattgcaaaccaacaccaaggagctggaatagctttgcaggctggacacctcactctcctcgggccctggacaagggaaatgagtcaccccgctttcctcggacctcagctggtgggacttagtggctggccaaactgcggctgttgtgtctaaaaagagaaaacaggcagggtgtgccagctctggagactgggccagtccagggtggtggctcagggcagagaatcacccaccagacagcgtggctcaacgggagcaaggcgcgcagggacaggctccacaaccacaccaagcaccgcagtgtggcaccgggaccagatgcaagtggctgttcctgccatggggccaatacccaatactatccctcagtcattcttcctagatattggtttgctgtttattaaagcagggcagggagtggggagaaatgcaacacagaatataaaatcaggcaaaacaaacactagtcaccatggaagtgaatgactctcaaagtctcccaaataacaaggtgcagggcatctcacaccactgcatcacttctggaagactacccacagggtgggggctgcaatgggggccaactcgggaactatagagaagagaggagacacacaccacaagacctcctttcattaggcaggaaagctcttgtgggacagtggtgtgcaaatcctaggacctcaatgggaagaactccaggaaaaaaaatgacaagtctttctcaggacccctcatagatgacaagaattctgctccccagggtcgagatctctttagaggggcttcaccagctcagtggcaaatatcagacaacaagactctcacattccaaagggggtatctagggccttttgctctcctgtgatgatcggagcaacatgtttggacccacagaagacttcccaggaatgctttcttacaaggggtgtcagccaccactgtaaaccagaaacaaaccaca

SEQ ID NO: 159359 - DNA, 1000 bp, Homo Sapiens
tgcaggttgtacgggtttattgttccaataccacaagagacatacagaagcagtgctttctctgggcagcctcatggaccagatcagtgtcaaactgtacccttgagtgtccccaaaggttccagcagagggaagaagaggactggacatgtttgggcccctgttcccggtctttggtaaacagacgcttaagttgacaacttggacttggccaatactgcattctaaatcaccacatcattcccaacttgtcactcatgcttcagatgacgaaaatgccacatcagattaaatgagaaaaaaacctttcagataaaatgagacttgaagtcatacaaattttatacttgatctaaattaagcaagaaccctcaactctgtaataagtcgaaatacaagatataaggcaggaaacaaggcaagggaaaacacacacaggggcatctacttgctggaaacatgttgggagagaggcaggagcaggcatggctttgtttcttcccaaacctgcctgatgtcaaaagtacgtcaaaaggagcctcacagtcccaggagagcatggtcccaggtattgctgtgacaggtggtgaccctggagccagatctggaaggccttcctgggggctgcccagggaactcacccatgaatccagaagcacttaacactggtggtggtgatttgtcacatatggcagcaagcagccattaaggctgtaggaggagagatgtgaaaagcaagatgcgtttgctcggtggcatgtgggcaggctgactgtggctctgcaggctgcagcaggtccagccggtgacccaacagggcatcgggcaacctggcaggtcacaagtcaatcatttcaccctcacgtcgagcagcacagcactcagtggctctgacaacagatgtagagaaggagattacaccactttaatgcaatgatgctgaagatgtaaaattaggaagagacgttcatgttctctgtacaatacatccatttacaga

SEQ ID NO: 159360 - DNA, 1000 bp, Homo Sapiens
catagatgataaacattttattacactaaaaaagtcatctgttaactgctgaactgcagggggaccacatgtgaggctacttcagaaaaatggcatcagataacatatatagatttctggcattataaaatggctagattctcccctaccttccctcattaaatattaatcagtggcttaggtcagttctagtgggaacacttaattgctgacttcacataaaaccaggattagcctaatgtgccaatggtatgagtccattcctggccatcttcccaacagccagaccgctgtggcttggacaccggaggcaacatctggggggcctcagttccactcctctgtggtgagcttgctcttcctaataactggctctggagtcacatcaacaatggtggcattgccatctggggcccacatgagccctctggggcgtgctgcatccctactgggctgcggtggggctctgaggttgggaccagcagcctgagcctggttccacttcactacacagcaaattgtatacccaagggagtggttatgacttgctgctcctcattcatgtgaggaagtggtgccttgcctgggatcctgtgtgtcagaaccacagcaggcctgggaggcacatccagctggggttggggaggacaggcctgcatgacagagctggggagtggtggggacacaggcagaggaaccagcactgcctgccttttgattcaaagcaacttcagaagatccctgtgtccatttccacatattggttatttgaacatttcctaaatgacttcctcatccagcctgaaggcaaagagaccattcactaccatctggaggctcagttagcagttccaagtggctggcacattgcacctgagtcctgcagttcctcaggctggcctcaaattcccgagaagtgcctaaggcagagccatttcccagatccgcaggcttcctggctgctcgaggggcactgctccttcctgctcccaccagcagt

SEQ ID NO: 159361 - DNA, 1000 bp, Homo Sapiens
tttttttttttttttttttttaaaaaatagcctttaataaaaaatacaaaaatactgtatctttgaaacatgatctgtatattcagcaagtcctaagcttcctaatgtaaaataatctgtttaatattgtatttttatttgcaagtacattaaaacaaatcttattttacttgacagtaatatttatgatgctgacatcctcatagggcttatctgttttgggattgactttgacgttggagatcctctgtacaacttccattcctttagtcactcgtccaaatactgtatgcttattatcaagccaaggcgttggtactaccgttatgaaaaactgggatccattagtatttgatcccgcgttagccatgctgagtgtgtacggcctgtcatgtcgtaatgttgaatgaaattcatcttcaaattctcctccccatatgctttctcctcccataccagtacctgttggatctccagtctgaatcataaagcccttaattatacggtgaaatgtatgcccattataataaccatttctgctgtgaacacagaagttttccactgtcttagggcactcaacaggaaaaagtttggtgtgaatgtctcccatgctggtgtggataatggcactgtccgaaactcgtttaggtccttcagcttgagtagctgccatgacttcttctttagaaggtttctcattaaaaacatctcgatcagaatctgcacttttcgtatcttctggttctcgtttggtaaacatataaaatctattctttttgaatgatgtacagactattgttgggtcagcttgaatattctgaagaacaggattttcagaagctttcatttctatagtagttgcagcacgatgctttttggctatcccctggaacaaagccaattgcatcactctaatattttcttgtttgcctaaaatccgcacacaccggtttgtctctacatttataactttaatgcccagcattgttccatacagcac

SEQ ID NO: 159362 - DNA, 1000 bp, Homo Sapiens
ttttttttttttttttttgatatttaaaatctttattgtttcatcatcaaaagttttctttccatagaagaatggtaatgttgtatcagtgcatattctatggaaaattcatatctcaagtaactagcctagaaatcagagacagcactatgtcaagctagtatacaaggtcaaagacacaatgctgccaatgcaattagtatatagaaataatacgcagctgttagaaaaagtctgtggccaagtggataaaacagtagcagtgcactgcactgacatccagaacagaaaatagggaaggaccagagaatgcacttcctgcaaaaaaaaagtccagtagatcacaagcacaaagagttcccaactgtctcaccagctctctaactcatgtgtacctgcaccttcctcttgaaatctgaacattataataccacaagccactttcagcctccagtgggaaggctccagccacacgccgatatttcgtcctgcttcccgtcatctcatatctaaaagtcatggcttaagttaggcaataaaacctgtggctttaggcatctttagtaaaaaagctgaacaaatcccaaatttattcccattttcttgagaaataaacttcataaaacaacagacagctgtcatgattactgagttttggctgatggcgaaataatttttatgtaagtatactgaataaacatacaaacaaatatccttaacaaaatactgtcagaccaacttgaatgtttttataacccactcctgaaaaaagtcctgataattattagatgtaaacgaccactataaattgatcatgcctggttactgggaattttttggtcaggtatgtttctgaagctgctatatagctggacttggctactttgcattaactcacacaacaaatgccttttataaggaaacagcagatctatcatgatgaactcaaaatcaaaacagttcagaggtatacaggaaacttggcttaaaaatactttta

SEQ ID NO: 159363 - DNA, 1000 bp, Homo Sapiens
tttttcattttcccaaatctttggctgtattgcaatggttgtttcaatttgtaatctccaactaaacatttcctaaccatggattaacaatatagttactgactggtttcttttaacagtatttatccaacataacaaaataaactgcaatttgttatagtttttttttttttacaaaacattttataaatatttttacaaaatgtatacaaagcaatttcaagtgagacgtactatacaaatgaaggtatttaagcaaataaagcccacaccacactgacagcgagtgacgcgtcctctttaagtaaagtcagtctgtaaggcctccctaatctaacagaatctactaaatccttcagagctaaaatatttctttttcataattgccagattaaaattttgcttcatcttcaggaagtacttaaggacacagaaaatcaaatgcttaataacaaattcacgcttttccacaacagaaaaaaaaaaaaaaaaagaaaatgatttttgttactgagtacaaatagttctaaaacttaactttgacgaatgaacctgaacaactgaatgttggccatccgaggctgagctctcctacccttcactagagggggctcgacatgcgagttatgacccatgtgcgtagaacctaatcacaggagtgaaatacatgtcataatcttcatttgtcattatctagaatccttcctccataaaaagtaaacttacatacaatgacacaaaaatttacaagtttcattttggtaaattaggctctccatttgctagacaagtgttagggcttaaaaaccctttaggatggtatatagaaaagctaggattgggacagcagggcaggatagggaagaaagagaggtgacaaatgtacatgaagcttatcttgtctcttgagaattccactgatttgcagtaattaatgtaactcactagcagcccacatgaaggcttccagggataaagttctgcaatgagaagaatttga

SEQ ID NO: 159364 - DNA, 1000 bp, Homo Sapiens
ttttttttttttttttttgagattcagaagtttcatatctttattcacacaaaaaaagtcacagcatttcagactattcaaacacacaaacaggaacagagggtgcccaccagtgacagcctcgtccctaagtctggatcaaaggccacgctggagggtggggtgtcctctcgggcctcctctctcagcatcccgtggctccctgctcccagcctcactgacatccccaagagcagttacaactgtgcagaaacaaagtcactttagaggaggctgggccccacctcattgccatggaaaaaggccagattctgaggaaaagacagaatcagtgctactgtgtcatcagttgggggatgctgggcactcctgggcctggctggcatcacctgcgtcccagacctggggcagagaaaaaggcaggaccctccccacttggcagtactgggcagcagagagtgtgggtcactggtcacgtgacagccccaaactgccacgcagacctctctgatgtgatcagccagacactcagagggcacaacgctttcaagcaagaacaccagcctggttcctaaagggggtgggtgaacaacgctcccagaaatcttaagaacccagagtcctggagcgctggaacaatacaggtgtcattgggttgcagcgaggagggaaacttggtgaacaccagccctccgagagggcggaaataccactcctgtctatttcccagagcacgtgcctgtgccttggggctcaagagcagtcttttcatggcggcaactatggaatctaagaggaatgaaggaaacggcgccctcaggaggtgctcaacattggtgtctgacccccaggcctccttgctgaacctggtgagaaagctggggttggtctaggagctccagcccacgctgatcaggcatgccccaggaaagcagacagggacaagcgcctcaacgagactgggcacaaggccgcaaaccaagctgcttttcctctgtca

SEQ ID NO: 159365 - DNA, 1000 bp, Homo Sapiens
atattattgaactttatgtacaaaatcatttgatttcaaataaacatttaatgtaaaaacaaatgttcttttaaactgaattttttttacatctactgtaccattcaaatgctttatcatcttacaggatttcttcaaaatctgttatcaagggtacatatagaaaagcactttttttataaatagaaacaaagggatttttccagcttttacgatgacataaaaagtttactcaacagaagtaattttattactatttggggtgggaatcaccaactttttgtgcaaacaatgctagccttcttttaagcattaagagcataactgcttaagaaatgacataagcaataattctacacctacatctcccctaaaataatctttttttttttttttttacatatgtgcacagctttagcaaattaaagcccgagataaacgctcgagatctactatccagaggcaaaaatcagagtttactagaactcatcatttggagagcttaccaatcaaggaatctgtaatgaaagctgcagtttccctctttcctatttttttttaaacacaaaaatcaatgactaagaacttaatactggatgacaaatcacatccacactattcgttaaatagcctcacagttaaacacatcttaaagaccagtcaaatcagtatttacattttataaatttctgaagacaccattagaaagcttatatatcccttcattaaacaaaatagggaactgcatctgatggtggtggaatgaaattttaaaattaaaaatacctgtatttacagcagcattgatcctttataaataaagaatatgaaaatgcaatatctttaaggataataaaaaattgaggtgatgttactcaaccacagtgctcggagttggaataaaaacctattggtgcttgttaatgtgccagtagtgaatccactttctgttggagaaaatccaactgcaaatatgtgcgtgaaacacatataacacagg

SEQ ID NO: 159366 - DNA, 1000 bp, Homo Sapiens
tttttttttttttttttttttttacccacctgtatacatttttattaaaaaaatgtaatgcttatgtataaacatgtatgtaatatgctttctatgaatgatgtttgatttaaatataatacatattaaaatgtatgggagaaccaaatccacacttgcaggcatttgtagtcaactgtaatcaaacaggtggtcaataatttaaaatctcacattcctttagctgactctacaagtagaggctggcagcaaacacaatatctctcttgattttggtgattccttctgcaaatttattttccagctcagtgtttccaatggcttttgctgcttgacacatttgtcgaagcaattcttccaggcgcctcatacaacgaattatgctgccttcaaagacatctgtcattttgcagatatgggcaaatgtagctccagttgcccaggtatatactacatccattaagtgaggtttaaatgagcttagataagtttcctcatcaatttccaatttggcttctgctgaaacttttgcaattcttttagcacattcctgcatttgacgaagtggtcctgctaatcgttctgttaatttgggcatctcactagaattctcttgaaacacaaagcagcttaataatgctgttgcctgttctgcagaaaggtcattgaaaaggccattaaacatcatctcagttagaaggagctcatcagcactgcttatctcacaagccactcgtcctttcatctctattacatcagaagaagtagcaaatcccaaccttcttaaaacacgtttgcgacatttgagttcatccatttgtaggactgttcttgctttcttcagttctcgctttgcagatttaatatctattgcaatctgtgcttttttttcacaaagcgtatacacagtttccaaatttggatcattgtgaagtggatgagaatacattcgatgctcaaaagcttctactttctgaatgacttttttcagcccttgatc

SEQ ID NO: 159367 - DNA, 587 bp, Homo Sapiens
aaatactcaatttattctaatttgaattaggttggtgtaggatgacaaactccaagcaaaagagcatttcttctgggctcccagaaatagcttcaacaacacatttgtattttcccttagaaaattttattcccttgaaggagaatgatattgttgtattcacagtctctcccttcagagctctgcaaaaagagtaatcgtcatcagatcctcggcaaataacttctttgcgctttggaagattcatggtgttgacagttatatagagattgaaatataattgctttaaatctctccttggaatgtagaaaatgtgcaataatcctttggatcctttcaattctatacaggggttaacattaattgaaattgggtattgcattttatcacagtaggtgtatgaaatacttgcatcggatgagttgcagacccaatactgcttctgagcttcagtaaatatggaagaaaacagggtggaaaaaaacagaaatggtaacatgattcaatatctccaaagctttacaaatgcaaagaggatcagtaactaatcatcagactcttccttttcagtaagcagaaaagattta

SEQ ID NO: 159368 - DNA, 1000 bp, Homo Sapiens
tttttttttttttttcggttttaacattttattgggtaaatgattttaaaggtaataacaatagtgtcaaaactactacaatatctttccacagccataccttacagacccacataaaccttctcatattttttctttttgctcatatttaatattgtaaagccatacatgtcatataaaatgcccatttccaatagtttcttcaaactattaagcaattaaatgtggaaggaaggagggcctagttatactggaaggggtttcaggtaatctgtgatgtcttacggtaatcaaaaaacaggttactaagaaagaaggaaaagaggagctactccaggtagctttttgctcattacaagtctcaccattgtatcaccaagaactcattatgctggtgacagattcaaagtaattttggggaacatataaaacactaaaataacttagaaactagatccaaatatttcaaaagtaatcaactttgatatacaaaagtagtcagaggtggttacaaaagtttgtttgctcagtgcgtctatgtaccagcgcagttactgggtagagcaaaataaaaggttcattttcttctgaaatagcaataaaaaacaaggaaaacatatatttgtatataaaggatcaatgctggtcttaagaataatgtcatcagaaacccttaaatcgagaggcacacaacgggtttccacttttaaaaaataaaaggaaagtcaccagtttatttaaatggaggaggtgctcacacccctcaaataaacttaattcattttaacatcactagcaaaaatcacttagaaactgtacaaaaataaaaaagttaacacatttaatcctgcaaggtttttgtaaggactggaaggcaggcttttgaagcagcatttgggcatggctgggggcttctttggtttgatctaacacacataagagatggaacctattccagatgacagtttcaaatttcctgcacatttgaagacaagataag

SEQ ID NO: 159369 - DNA, 1000 bp, Homo Sapiens
cagctcttgggcgtcatttattttttgcataggcataaattaggatctggagataaaaaacttaagaaccaatagtgcagcatttgtgacaggagagcgcaaaacaaaccctggctgcctcgggatggagcggggcggcctcaccaccactgcatccagcctcatgctccagagcggatttgaggctcagtgctgcagtgaaggcctgcccgccttcttgccccttccccgcagccagaccaccagacacagccggaaccagtgccccaggcccctctccacggccaggaacaagaaactgagtatcacccagtgccccacagaacggggctaggaatcaagcccttagcttttcagttagaaaaacagaccttgaaaaatatatacataatacagtggggcctgctggctctaaaagtcccctcctcccccttccctatccagggtaacttctgccagcctcttcccccagcccccaccaactgccccacagagaacaaaccagaagggcgactacctgaacaagagctgcaagagcccaagggggcagcctgagcggacgacccctacatcagggcctggttagatgtgggggccggtgcagacagacctcgcaccccgataccctgaacgtccccacaagagcccaggagttccatgctccccactcttcttgctataaccccagatgctaatggccccaaagacaggtctaggtctccataccctgggagaatgtggaaagcaagctcaggggcactggcaggccctagcaggaacagggagcagggtgggccccaacctagcatcaggagagagaaaagcaactaccgtccccagcagaggggaagcctacagggttggccctgggccccttagaagatcacagcagccagtcccctttagggcacaagaagccccatggcccactgctaccctccccgggacaaatacacacttttgtcgaaggccctcagggaccctgtggttcatgcttccc

SEQ ID NO: 159370 - DNA, 1000 bp, Homo Sapiens
ttttttttttttttttttttttttttcggagtgtgtctttaacatttattgacggggtttcccacagggtccgcagtcaaagaatcgctgaaccgcgtttcctcgagagacggtgtgtggcatgggcgccttgctgctgccccagtcccagagcttctcctgtaggggtgtcggctacaggaaccttatcccagctccaaactggacgccatcacatatcctgtcgcctgtctgtactcccatggggacgcagtaattaagttccaaccgagcgatgttgccaagcctgaggacaatcccggccccgtacgaccagcggatgcactcagccagcttacgaatatgagctttggggccctccccatagttgaggttgcagaggtttcctgcgttgagaaagaagtgtgttcggaaaagttctccaaagccaccctggcctggccggaaaggtaatggggtgtagaggtgcaggccgccggcccagtacgcttctccacctaggtagtctccttcgctctgtggcccgatgctgtgcatgctgaatccgcggacgcttgtgggtcccccgaggtaaaacctatcagcaatgcttgacggcttatcaccaatgggtaccaacattccgccccagaaagacgctgaaaaaactgaatcaaatatgagttgcttgttcaactgaagttcaaaatcttctttgatgaagctcacatccccgccagtgtagcctgccagttcctggttaactttcagcaaagcacctctccttggtaagatggaagaattccgagaatcgatgaccatggcgtgcgaaagagatgatttcagtgaatgtccgctttcttttcgaacagcaaatgacgccgtccttgagaggcagcccagttctcgccatacgccttcccacttgacagtgtggctggtcttccatatgggaaaactgtactcagctgacattcctctgtccgtctcccgcagtgagctccaagggaactgtccagta

SEQ ID NO: 159371 - DNA, 1000 bp, Homo Sapiens
ccaaggagtagctttattcagggatcataaacatcacagcctctcctcaaagtcaagcctaactgctaggtccccagatgtacccaagttgtctaggactggcaggggtagcttgtttgctgtagtgtttgagggcaagagactgaccatccatgcagaaagctggcctgggctgctcgctgcctgccgtggctttcccacctcattaggagcccgcttctctcggtggggagatgctgcccccagagcatcacctggccaggtctgagggcagagcatggagtgggtccagactttgtttctctgctgccagccgtagaaaggtctgggctgtcagatctcccccaagccagacagcctcgctcagctccttggctggggccccttagggaacaggcctgcaagtgtgatgagccaggtgtgctcatccaggcagctacaggcgcagcctcttgatatcttcactgcggaagtctatccgcagggccagcacctggcgcacttcagcaggggtgaggcgccacgtcaatgggccggaattgggtccccagtaatcgaggatctcggtcacccgctccagattgaggatggtggccatctgggagagccgggcaaacttgtctcggatggtccaggtggtcaccgtggtaaggtaggcaatgagcgacctcagctccttgtcaaactgcagaccacccagccggttaaaggtggatttcagcaccactttctccaactcgacggcaacaaggctagtcatgaggccggttaggctgtcgtagatgaccggggacaggctggccttgaactctgccatttgctgctccaggttaaggatgaactgttgtacccaagggtcgttggcctcatagtcattgaattcttcctcctcgatgttgtgggagacggagaaaaagctgttgatccaaggctgcacctgtggcttgatggctgtgctgttgagctccgtcagcccttcctgcaagaggtctcggaattt

SEQ ID NO: 159372 - DNA, 1000 bp, Homo Sapiens
tttttttttttttttttttattttcttttggagatgttttatgatcaattccaaacatacagtacagggaaggtgaaatgagtaagaaaaaaaaatcatatttaagtccccgttaacactaagccatattattcaaaatgtgtttcaaaatactcagccagatcaccaaatctcagtcactaccttagtataaatattcactaagaaaatagtcaagcaacagaaatccattgtgagacaccatctagagagaacagctacactgctatatataatttattaacttagtagtttagtttctcaatatttagcaagtttaaaaattaccattaccattggtttatagtgccattaatataaatccataatttcaaagtcatcattcctttcactgtgaactaagacttcttaaaagatagttgtgggttggggaacagtaatgactgtagctgatgggcagtgttcaaagccaaaaagactggcaagcttggaaaggcatacactatacatacacacactctcagtatactactgttccccttatttttgctgtacattcttgtctgaaaagatggtataaattattcccttaaatttgaaaaaacaattaagatgaatacattttcatcttcaaaattatccttctaaataaaaaagttcctcatgtttgttaaatctgttcaaaagttggatttaaatactttcttcacaacatgtacaatgttttcacccttactgcctcattacaatcagtttggcaataagacctccagtgctttatcaaaaatggcattcaatagattataagattgttaaatctgcatttcaatcattcttaccacaatgaattataacaaagtccaaaaaaatgtatgactattcatcaacacccttggaacctatgaattattgcaaataatctcacacgtgcatgtaatccaaacataaacttcgtgggagagggggtgtaaaataaatactatggtatttcttcaattct

SEQ ID NO: 159373 - DNA, 1000 bp, Homo Sapiens
tttttttggttttttttttttttgcagttccagacttcaatcaacattttaattaccaagtctatatttagcaagacaatgtgggagagataaagaggaaggaaggggtaggtggggaggggttctcaaaggagctgacccattttctgcattggctgcagagccttgcagtcctggccaggagttcttggccttgtgcctttcagaagtgccgacaggcatcaaggaggtacttacgcagctacagctcagtggcagctgcaaaccccatctacgaaacatgtcatcaggactgtcctttaatagtcttcctcctctctgcagctgcgggaaagaggactggccaagaatttcaggtggggtcagtgtgactgcagggtcaccgcaacagctttggctgtggcgttgaggacggtggtgggaagccgagcagcagggagcatggcagggatgtctctggggaccctctggatgggcgggatgttggggccctccagtgtgtccaggatcccctctaccactttgtggtaggcaaaatgcagatagagcaggaagagcatgtgtagggcagccagggtgccacagaggagcagccgctgtgtggggcccacggtccgagacaccaacactgctaccatgcgcagtgtggacagtccacccaccaacagccagaagaggtagaagagggcgtggaggtggatattataggtgatgaacaggacaatgcaatgcccaaagaggccatagcccagcagtgccaacatctgcagcatggtgatctgggcgttgcacaggtaggcaaggaagtaaatgaaggatgagactcccagccagtagccgaagcaggtgccaatggctgtgcccatcagggtgccctcccggataatagtgtcagacgtcttcatcccatggagtaggatagcaaccagagtgaagaccagcatgagaggtccatagagttcacctgcaattttctgggggaagttgaccatcttgatag

SEQ ID NO: 159374 - DNA, 1000 bp, Homo Sapiens
tttttttttttttttttttttttttttttgtaaggatgagaagagattttagttattcagtgttttcagagtttcaacaagggatacagatacaagcagcttcttacagagtttacaatctggggagagaacatgaaagacactgtttaacaggcaaataattccaggaataaatatacatgaatgtgtttttcaaaatacaggttcttatacaaatgtataactaaatactgattccatagtggggtggttgtaactgaaagggctttgagaaaaggctttgaataaaactagtcatccacctagccaaagatcctttccagcagcacaaaaggaatttgtaaggagaacagagattaactgtcagatatctttctaatctgtaaatttatccaaagtttgaaaataccatgaagaatcttaggaatgccagtaaccagggaatgggatatttgcatatcacaacatctacaggctaaatacactccgaatgcttctcaatgtggggaagtatgagaagttaataattctcctagtgtctggcttcctttttctttgcctttccctctcatacgttcaatcacctgtgttacaggacacacataagtagttggaaggtgttaaactttgacagcaaagcaaaatcagaggtagaggcaaatgtttaaccaatcatgttcaaatataagctactcaatgaagagttttaggtttaaagagcgaaatattcaccattactgagaaatctcagtttctcattcaatttcgcattgcactttgctaccacaaactaaatgggtgtacatttttgagtgctgatttattactcaaaggtttgaatttggagactgaaacaaaccgtgctttatctgtgtactttgagaaaatccatccacaagaaaggagccaagcgtcagtttccaatggggggaacattctcatggaggtactgtaaggctaagtctgtccacttcatttcttgttctttgacagattctgt

SEQ ID NO: 159375 - DNA, 1000 bp, Homo Sapiens
tttttttttttttttttttttttttttttttttttttttttttttttttttttttttttttctgaaatggactttaattggcttttgtctctagaattacccacccgttcctgcgctctacggttctccatgccccctccagtttgggggtctaaaccgaacaggagaggtgcaggggaccaggaggtgtcctggcacaaaggttcgggggtctccctggcaaggggtcccagggcctggagcccgaggcccagccaaaagcacacagcatcaaaacatgtttttagtgggaagctccaggccctgcccctccccgggggcctcgaggtcggggagcaggtgggcgtctgtctgcctccaggtcatggcagtgcaggcggtgagctgggggccggcaggggcgcggacagtgcggcgtggtcgaacagagggttgcgcacctccatttccccggtcggggccaggcccgggcactcgtacaccgtgaagtctccgtcctcattctcctcatccgaggaggccgtgtccagctccttgggtggctctttatgccgctccaggcacagcatctgttgccgttggtgctggtagtggtacatctccgcgctctgtgccagccgttggtccccaggcgagatccggggagctgcaggtgagccaggggccttcgcagtggcgtagtcggccttctgagtcaggcggatctcacgatgcagcctgcaccagcagagggaggctacggagagggcggctgcaccggccacacagaacgccaggatcagcacaagggcgaggccgtcgccttgccctccccggggctccaggggcgacatgtgcaccgggtcggatgacacaggggagcccatggaggtgtggggcgtgggcgtgggggttcctggagtggaggggaggcccagctccagcccctgcccccgtgccgagaagcccagggtggcaggctccgggagccgctgtcggtccttgggtaggggcggagttg

SEQ ID NO: 159376 - DNA, 1000 bp, Homo Sapiens
tttttgaagcttttatcaactttaattgatataattataattggtatgcaatatgtcttacaacaaatgtggatacaatgacatcaaatatcaaagaattttcccacctttccatctttaaatgacttcagctaacttaccccaagagaaaaatctggcattgatctcttggttagcattattaccaatatcaactagcactattaaaatcaaagttgaaatggtacattcatttgccaaaaaaaaaaaaaagaaaaaaaaggcttaaaggcaaagaaggtgaatcaacgtgcaaattagcatctggcccaattgcaaaattcatttcctggatgtgagggattgaaccatgcacacttgcaagcaagatgaagggcaaacagatgacatcaaatcaaaattaaccccacaaagaatccagaagacctcagatggtaaaggacagaggtctacgtctactgctgttagtgctcaggtatccatcctgttttccctaatctcctgattctgatccaagagtctttgagacctatgtcctaggccatcctttcatctagaaatggaaaccatggctgtggcaccaggcatggtcaaccctgcagtgattcagctgcacaaaggggtagtccagagcttagatagctgtctgatgtggctaggacacaactgtcattttatggaataagttaaaacaacacattagtatcacagcaaacaagaaactgagatcacttatatatctatgtaatagttaaactgtctataagtatttttctccagaaactgaaaataccatagacataattttattaatcctcacaacacatctgtgaggtagtatggggtgaggtcaatatgaaagcatcacccccattttagaaatgaagacacagacgtgcagggagggcaggaggtttcactggggccacaggaaaagaaaacaaagttgaatcccgctctttcatcatctgcagtcgatggccgagaagaggcggcttgc

SEQ ID NO: 159377 - DNA, 1000 bp, Homo Sapiens
gcactggaataatttttatttttttccttggcaaaaagtcaagtgctacatttttaaaaacagaaaatctcaaacaatcaaacgcattacccattacagaagagggtctagcaatagtacaaaacatcctactgaagattttttttttaaatatacaagtcagtttaaaatgatagaagttctgtgagaactaagaaatctacagcctgtagtttaataatagaaaaaaaattaagacaattaaaagatctatagcatccagcattttgcttaattccctgtttatagcacctatttctctaggttcgaagatgagaattccagaacctgtggtatgtgctgtgtaacaagttagggtggacttgctgtctctcctctccagtagccccccaccattaaaaggagaatatatatataattttttttccaatttcccttcttacacccagagaagagggggacaactgggagaacaagttaaaaaactggggtgcaggaataaatatgacttttcctttccccaaaatgggatgttgacagaaaagcagagtatgtgcttagaggaactggtgggtgggaacagctgttatctttgacatgatgtgtaaaaatcagggaacaagtggacatcacagtcagctgcctgcaagtttaaaaacctcagactaaacagacagttcaagggaggaacagacaaattactaatcacattgatgctgtcacatgcacaatgatgctgactgcaggccagcctgtcaccatctcagggctaagccaacagagtaggaggggtggcttcaaccccaagtcccactgcagtaagaaaatgaatattccacacatgaagcactcactacacacagataaaccccctgctcacccccaccttcttagacttaacccaatttagaaaataatagcaaaacccactggggagattggaagaatggcagagaggattctcctcaaagccatgggggctatggatgtgaatcttagc

SEQ ID NO: 159378 - DNA, 1000 bp, Homo Sapiens
tttaagtgttcaagattaagtgatttatttgtttgcttttctctcggtctaacatctcacactgtcagacacacagataaatataacacttgttcctccatttttcaagtgataagcagtgtgccgaggccacaggtgctccaatggttctggtgaggtggtttcaagatgtcacttggaatctcctcttgaaagtcaaagttgtcctctgaaaagatttaggcacatattgtgaacctgtcaaaatactttgacctgtccatgtgtgagcagcaaattccatttgtgtcaatgaactttttcgaggcgtatccgactgccggaacgtgtgggttgtgctgggccttgacaaccgttccagggtggctgttctttctcgaagacgcgatcgttctgtaccgtcaggcatggcactcaacacacggttttgtagatgccttcctctgtaagaaacaaggcggcatccaggaactgctgtattctgccccctggtctccgtgactagcggggggaacctgctccgtgacgtttgaaccagtggggaagccatgtggtccacgccagtcggcagttttgttccccgaagaacttcgtcactatagatgttgggagtttttagtctctgtgaatctgaagcaagagaaggcagcctccagggcactggtgttttctttgcagaaggtgataatccatgagtgtctgaggcccgtcccagtctgtgcggtgcggaggagagagcacctgcccctccacccgatgctttgtcctccttctcattctgcgttctgtcagcaaaataggcaggtctccgctgaagcggttttgcttgaattgtcatgacaccattcatgtcactataaaaactgctggagaagtgatgaatctggggcgggttcagacgagaagccagggagatgccgtgagcctcggcgtgtccggacggggggccactggctccatcggcgtgagcgtgtggaacgaggacgtgcggaaatctgtt

SEQ ID NO: 159379 - DNA, 1000 bp, Homo Sapiens
tttttttttttttttttaaagcaaataaaacatttattgttcagatttttttccattttcttcctttttacaaaaacatgcatacatacacagggtatggtgggtcctaggaaagacacacacacacgcctcactcacacacacgctcacacacacgcctcactcacacacatgctcacacacattttccttcttgaccccaggcctggacccccaaaagccttgaagactttgccagagcagcctcccctcctccatgtctgtatcttctctcccaccccttccccctcagtcaggctattcctatgtggggtgggaatcagagctatggtgggggaggccccagaaacagagaaggctccccgagtgggcagtggccgaggggtcccaggggtatgctgcgcttctgggggagatgaagggtttggcaccattggatcaggaagcacaggactcccagagcacccatctgctccaccagggcatcgccaggaggttgatgtaggggggcctctggcgagggtacggaccagatggagggctgccagtctcggctgtcagggagcttcgtctcagtgcccggtggtagagggaagcttccagagtcgtctgaggaagcaggtgagagggactacccctgcactcaggaatatgggacctcttggctccccactcccccctagcccctagagcctaggaagggccagcctgtctgaggccaagttcacatttctgtgtggagcctggggctgtgtgcaaagtctggggtttgcagagccaggaatagtggttaagggtgagcccgacggagccggagccagtcctcctctgtgcagtcctgaggaatgggggccacagccagggcccatactggaggggagaatctgttctcgagagccctgtgggggtcgccgcccagcccgtctcctctcagggtcctctccagttcccattctagacccagggattttctcacgctccctgggataactgtcaaagc

SEQ ID NO: 159380 - DNA, 1000 bp, Homo Sapiens
taaccttgttcagatttctttattgaaaaattaaagtcataagctctgtatataaatacaatgacactgctggtcacctgcaaggcctctgggataggctgggggtgcagagggaagctggggccttggggtccccaggggcatggggagggaaataaataataaacaccatgggggataaggagccaggaggaatgggggtgtgaatggggaggtgctcgatgcttatttgtggcactaaaggtcttgcaagatgccccctgactgggggccgtgtccatgaattctcgagtgacctcactttggacaaaggctcaggcatctggggatgggctgggtcctagctggaggggggacagcagtgcccccaacccaacctggagaaaccagcactctgcccttccttttcctttcttcctgtcttgcaacccacttgtcctgggcgcctactgtgtacccagtacagcaccagttcctgacctgaccttctgtctgccttgtcctgctctcttcctctcccagttctggtccagtgggctgggatggaggggggatgtcttcctgccaccctggccatgcagccccaaccccgcaaggagcttgatgaagccaacggtggaaagggactgggaccaggggctgggcagtggtgggaggccctcaggccttggcctctagagcatcacattgaactcagtgaccagaaagtcaatgtagtcacggtccttagtcttgaaggcctcggcgataatgcgggcggcctcccggtgctccttgccccgaagcgtcagcccattcacttccagaatcacgtggcccaccttgagctgcccacagttgtgagctgagccgcctctctgaatagtgacaatcctaggcaggggctggcgggtgttggcgccaccctcgatggcgatgcccagggtggccgcacttttcttcacacggaccagagtggacgtgggctccagaagtccaggcggtttgttggccccatctg

SEQ ID NO: 159381 - DNA, 1000 bp, Homo Sapiens
tatataaaaaggtcactttattttgccttttgtttggtatgctatcaatgccctttaaaatcctactattcaagtacaaatgctgatgtttacaaagtatttacaattttagtcttgttcctttctatcttaaaacacaacagctaactggttacaacagttaacaaaataataataataaaggtcacaaaaagagaaacccctgtcttatcaggcaccaaatctgaacaagggcttggatccaaccttctgcttcccgccaggtgctttaaaaacagtctggctaactgtttttatcatcagaataaacgtctttctttaaagaatagcagggcaactgtttcccagggtcgccaattagagtctgacagtgttcgggctgctgcctttatagtctgtgttctcaaagtttccaactcttacttgccgtattggaatgaacccagattcacaaggggaaggcctagacaacagcttcctgaacgcgtacttaattcttaggttagaaactttaacctttaaaagggaaggccaagaaaataacacactaaaaggagagtttttacgtacacgactaaatgaatttaactcaggtcaacggtagcatctagaagttactaaattgagtgctacgagtaaaaatatgtccgtgttttgtattagggaacagccaaaggaaacacacttgagagacaggagaccctcactgacgtgagatcggggcggaaactccacattgcaaatattcagaatcccattaagctctccaaaaaagcatttgagagatggtgttaaattctcttgtagtgttttagattaatagagcgcttttacttagacagttatgtctaggatattctaaaataagtgcactcaacattttatcttcaactataaggagactaccaagatttgggaaagacaaaaaaaatgaacagggcacacaaattaaaacaaatgacaaaggcagaattcctagatacttcagttctatcacatc

SEQ ID NO: 159382 - DNA, 1000 bp, Homo Sapiens
ttttttttttgggagaatattattttattatcaaatgtacagtatattgaccttaaaaatacagtaaagcagtcatggaaataacaggtcgtgtattattcatgggcacaaactgactcatggctggggaagaagcagccaccttagaccagatggacaagccagatactgcagagaagtttctgggcttttcggggaagactctagattcaattctgtaaagttatgatgcagttttctccttcctctcctctcacctcctctgagcacagctttcaacaaaaactttgcatacaaggaaatctaatatcgcagccttccccactggagggttcctggagaaggtaatataacagtggtgactgaatttgaaggaggttggagagaaattttttaaaattatatttccatgtctgctgtaatgtatccaagtcttgtaaagaccaataatttattaattttaataagacagaaagtatttctccttctagtctcatcgtctgatttgaaaggaaaaaatatatatataaaacattatataaaaagtgagttccaggaagaaatgtttttcttttttcatataaaatggtagctgtatgtatgtaactctgaattaaaatatatatatatatatcagtcactctggttctaaatccttattgggcaagctggagttttgaagtgacagaggaaataactgaaagatgacttgtcaatctggaacaaagtctatcatgtaaaaactgcagcaggttaactaggtgatgcgtcttcaatggggtagtgaggtgttgttcatgtctatggcttatttttgatgaatgttcctcagatatcctatggacgcttatgaaggcagtcgagtggcatttgcaaaagaagaaaaattgcagtcagagcacagacaccctgaatgaagcccctggcatgatgtaaacacaaaagaaagtgtctcagcaaggctgagccctccttctcgtgtctgcattgcttccttttc

SEQ ID NO: 159383 - DNA, 1000 bp, Homo Sapiens
gttttttttttttttttttttgacatttattgtttattcccacacccatcccatgaaacaagcaggactttccattttacagatgtgaaaaccaagattcaaagagactcaataacctgctccaggacaaatgacagaactgagacttctgactccaaatcttatgctcccccgccacacctctttgcctttctctttcacaccaatggactctatgggtgaccttggcataggttcttctaagaactggctcttaacaaaaacttctggccattatctgactgaatgtcacaaacaagtgctgtaagaacttgcttagagcctttttcctaaacctgtacaccagctcttgccttgtgaatttattcaccacaaaacacatgttcccaggggcccaggcaaagtctccaagtacccagtcccctttcttcagccttgcccacaccctcagccttcctgttaatccaggcgacccagggttacccagaggtccaggtcccagttgttcacttgagcatctgatgtaccccaaacacctgtgtgaaacgctctctgtccaggatgcgtccatagcgcagggtgacgtagaaggtctgtttcccactgtaccgctggatacgcacaaacatctcctgaggccggtccttggtttctgtcaggggaatcacatctgccatgggacagtatgtgtcctgccgccagccccagaagttcagatgggccacccgcagcatggtgccagactcattcagatacaggataccaaccagtctccgtaagaaatagctcatccagcacagcatggtcagggcaaagcccgatatcccactcatgaggcacacggtgttgagagtgaggaggccctgggagtacaagtaatagcctggtggcaaagctaccactgtcagggcagtctgtgccaacttcagtcgtgacaggaacccgaaggttctgatggcatcaaaacggtaaaacatccagaatttctcagtctctgcgt

SEQ ID NO: 159384 - DNA, 1000 bp, Homo Sapiens
gcaatgaagtcaggtttaattttgagattcctgtgccctcactcacgcaaggaggaagtcacctggctccagtgaacacgtgtggaacagaaatcagggccactgaaaagccaccacccacttgagagggcttgttctcaacaaacctgactcagacgggcccactttgggcctttagtcagatttagagaaaacccccggctcatccaatcaatgtgcaatcaatttctacaccatggcagaggtaggaaaagccagtcacatgtccaaatgatgagtgaaaatcaaggcatcgtggagccacctcctccagagggggagccacaatctcaggaccccgaaggagcagacattttcaagtggctcctttacattaagcaaaatgtggtcctctcattcgggtctgaagcatcatttgtgtgtgagcccggcccactggggacctctggctgccaggtggagagcctcctggtgcagatagcaaggtggagggcagaactgcaaaaatccagggctccagtatggatgtgattcccacagagttcagtcccctttatttacccaagtcccatggtacaaatccctggcctgccacctgcaaatccaccgagctcctgattcctgctcccctgatcatggtgttgctctctgcatgattagctgctggttctccagacactgcttcagcttgtcttctgtcagtgtcaaccgctgctccagaatggagactgtctgagtgaggacatccagctggcccacaatgtgctccagcgtgctagtcagtgtctggggcacactcacgggctcctggggctggctctgcacagactccacactcctgcctctgcctggggggacagggaagtccacttctggcagattccccatggagctggccagtgtggctgggggcctcggcactttcgtgacttctccatgatcaacaatatcaaagttactcttccaaaccatcacttgttcatcagagcctccagaagca

SEQ ID NO: 159385 - DNA, 1000 bp, Homo Sapiens
ttttttttttttttttttttttttttttttttttttttttttttttttttttttttttttttttttttttttttttttaaaaaaaaactacatctctttattgcagaatttatacctgtttgaaaaatacaaaatgtagcgttgataagattgaagcatgttgaaaggtaagtacagggaaaggtcctttcagaatgactgcaacagtgcagcaaggattcccattccccgcctaaaggacaatacctttttaatagaaataaatgagttagttagttagatttttattacagattgaattaaacagttagttacaaagacattctctgatacattcattcatagaggtcttaacgtataaatacatagtaaatatcctataaaatggtaggcaatctcattgtgcattatctttttgtgctcagacttgacttcacattcagtctctacatacagcttgattagaatcataaaaacaatatgaagacgattgcataaagggatagtttgacaaagcatattcagatattgtaacatttatggtgggtaaaaatgtatcttttgaaacaatatattagactccatttttagctgaaatgaaatttactgattcaatctttttaagaatttgtggatgtttaaaggaaatgtatattagcatgaatgtgtaactattaaactcctccgcaaagctattcagctgttgctaaaaaattgaagtttaaatataaaaaattgaagtttaaatataaatgtgaaaattcggaccttttttccccagatatacatgctgaagataatttgatccaataagttaaactaagtagagatttatggaattaactcatcaataggaagagtacacatcaataaaagtaaattttttttaaaaagtatatacctttttgatgttaattttgttataaaagtatctcaaaacatcattacaacagtgtgataaataatatacaaatgatctcttaaaataccatgaataggg

SEQ ID NO: 159386 - DNA, 1000 bp, Homo Sapiens
ccagacaaaatgtatttatttatttttttgagacggagtctcgctctgtcgcccaggctggagcacagtctcggctcactgcaagctccgcctcccaggttcacaccattctcctgcctcagcctcccaagtagctgggactacaggcgcctgccaccatgcttggctaatttttttgtattttttagtggagacggggtttcactgtgttagccaggatggtcttgatctcctcgtgagccgcccacctcagcctcccaaagtgctgggattacaggcgtgagcaaccacgcccagctgtcagacaaaatttttaagaaaacaaaattttttccagaatattacattacaaaaatcaatgaataaatgaactacactgtaactttaatacttattccatatgaaaaaccaaactgtttctggcaatttgattgatctcttgagagtctgcagtgcattcattccatggttaaaaccgtgtgtaggcattgcgttgctgctgctgctgtaatggctgctgggcttgctgctgttgtaagcgaatttgctgggaataagggtcttccagggattttacaaatatggtagttctgggaccagtcttccatactataccattggcatctttcacagaagattccactgtaatgttgtgtgttccaaggatagcaaagttcaacagaaattgagtactgaagtaatcattatgaggttcaaccctttgctccatctcattggtcatgttgtcaatgggtatcttgtagtcttgtccagatttactctgcagtgtggaagaaacattcagacagacagactgaattttgcggaagagtcctggtttagatccgtgctgaaccactccctctacctttagcgccagctgctggttattctggacagcaatgggctctgcaggattccggggcgatggtgacagagcaagcttgatgctggtagactgtagtttctggaaaaaatatctctggaaagaaaggggaac

SEQ ID NO: 159387 - DNA, 1000 bp, Homo Sapiens
ttttttttttttttttttttttctttctgtaacttttttttttatttttttcaatttttccttcttttttttttttaagcactagtctgtgctttgcgaacagaatcaagacattaacaaagatcagcttctctgaagaaaagcatttctatagaacaaagacagctacatgtttcgctgccattacacagctccaaagcaggaaaagaaaatatttacaaaatacaaggttttttttttccattttttgtttttgttttttttttcaatgctaaaagggttattcagaattttcaaccttataaatagaagaagcactttatgcatagggatatggtgcattattgtatttttttttaaagaaacaatgacaaaccctttaacttgcaaacagaaaaaaaaatcactaatgttgaaaattgtgaaaaaaccccaaccattaagcagttgtctactatttttatacgattacaaaatggccaaaaaaaaagagtcttctcccccctccccctttttggtgatgtgatcatacaggagacaggcacaaggttaacagagaagggtgaagggggaacaatgggaaccacagctaggaccagacaatgttccacaggcaaggggagcgtgaaagaccaagagtggaactaacaccgacagggatctggatgtgaaggaaacatggcaaagtgaatcagagggaaaaaaaaaaaaaatcacacagggagatggctgctcacttcccacaacccccagtttgcaggggagtgggaatagaggttaagtagtcctaaccctaccttcaaagatcaggataggtggtaaaaatattccaagtggaaggacgggttgtgggtgtgtacatggcatgggagagcagacagggaagggtaccaaggggcatgaggaggggaacctgagcagccacagccaggttactgcagtgaaagagtcaaaacagagaagaccaaatgcagatgaaacaaaaaatcagtctcttaag

SEQ ID NO: 159388 - DNA, 1000 bp, Homo Sapiens
tggaggaaaatgtctgtattaaaagccaaaaaaccacataagtacaagaagaaacgcccaccaggccacgtcactggatagatcaacttggaaaaggttcataaagttcattttcagcggtaacaatatatcggtgttaaatccttcccatgccctccccccaattttaaataaattaaaaaaccacaaatttcaaatacaactatgttcagatacaaagagcttctcttactacagcaatagcaatttaatctttttgttttgtattttttttactaaaactttcatttaaaacagttattaaatatataaaacaaatacacaggatttggtcattttctgccatgaatctagggcacgtgggtgcggggaaggagtcgggcagggggatgcaatagaggggaaagggccccatttccctcctctccgtcttcggagctgcgatcccaccctcagtccaagggcttaaacatctgcttttcggaactggaagcgcagcacaaaccttgcttttcaaaggcgctggggtctctcggcggccccatctcgggaagaggaactaacgataactacagcacgaagcacaccggccgagtccccggcgggaaaggcacccgcgcgcgcggacacaggacggacacagggaggagcggagcgggtcacttggtcgccacccccgaagtgacggccgcggcggcggcggcagcggcggcggcggcggcggctgcggtggtccctgcgggcactgcggcgggggtggctgcggtggtgctggcggtggtccggcgctgttccatgccgttgggcaggaagccggcgatgatgggcaccggccagatgagggcggccacgctccacaccacgatgaccagggtcatgaagcaggccaccagcgtggactcaatgggcttacggttcagccgccagcccggctcgccctgcagctcctccaggctgaagtctaggcagcagaaatgcagcggctcgccctgcagccaca

SEQ ID NO: 159389 - DNA, 1000 bp, Homo Sapiens
ttttttttttttttaatgagcagtgtttttattcaagctatataaagacatttatacgtaagtacatacattcatttaaaatatatgtaaagttcatttagaacaggcaatttgtttgcttatgatctacattcacggaggggggaaaaaaagtacacttattaaaaacaggtaccacacatctatattcaccaaattgcgttggtttaaaaaagtattaacttgacatacgttgcatccatgtttattgtgctacttgcgcaaaggaattgtttactgaattatgtttagctctttattcatttaacaagttcatttaaataagttcaatattccataaatgacaagcagcttaaatacaagtttgataactatcattaaaaaagtaataaaatcaaagtcagtgaaattttcaacaaggcagcgtaacatccatcactaacctgactaaaaggccgcactcgcactgctttcacactgtcaacactttgcgtaggcattttcaccaatttctcattatctgtattatttggtagaaaaataaatgcagaaagcacactgcatatgcttcacattaaaatattaaaagcccacgaaagcagttcgtttctagataatcaattattaatagtccattcattacacactatcgattacctgttataaattattttacaacacttatttattgatgagtgttagagcctacatcaagtaccattgcttaattgcacacagttgtactgtagagaacagggcgtgtgttgtttttctccttttctacatctactcactctctcccaacctcaataatctgtgcctgaggtcctgtgagaatttgccagttttaaaacctgaatattaagggatttctgtggttcaatagcaagctccttcacagcaatattataaaaatttgttcagacatctcatcctatcaatattaggcacatacaagatgcactcaatatccataaacagatttattttacatttccct

SEQ ID NO: 159390 - DNA, 1000 bp, Homo Sapiens
tttttttttttttttttttttttttttttttttttttttttttttttttttttttttttttttttttttttttttaaagcaaattagttcatcactttattacatcttagtgctttcttaaaataaatacagtaatatcatatcaaacatacagtgagaaataaagcccacgtgtgaaagtatggtaacagaaagctcactcaggactgtgtaactcagcacttgagaaatcatacagcctttagttccctatttacaggacagagagcggctgtgtcgaacacgatatatacaaaatcgcaagagactgtacttctcttcaaaggactgaggaaaggggaataagacctataattccttctagccttctgtaccatgttccctccttatgtacacgactcactcatgttttttgtctatctaaaattatgtaacagttaaatttgtctctttttctcccaattattgatcttttgattttttctgcagtttgagatagattcaagtaacactcccaagaaaatatgtgcaaaactaatgttagtggctccagaatcttccggcagctggtcagttgcagcagtgtctggcagccatggctggcacgcacctgctcctgggaatgtccgcgctccacagaagcatcaacaccattgggaccaaggcagaaagaacccaaagccatccacttacttggagttctgaaataactgcaaataaccacttaattgtttttaaataggcaacaaaacaaaagtatccatctacaggggaaacggcacgctcctctgagagcatgcagcgcttccagatgcagaatccagacaggacaagccgtgacctaacaaaaccactgaagggactgtcagcttaagtgcatcaccttttgggacaaacatgctcagaatgaaaaatattctactttaccaaaatctgtctttattaaagtgaacaaaccattagagcactacccaaaacttaatgaatgatggctgcagtt

SEQ ID NO: 159391 - DNA, 858 bp, Homo Sapiens
ttttttttttttttttttttttttttttttttttttttttttttttttttttttttttttaactcagaatgactttactcaggaaatatgaccatgactcactggctaggagtgccccatgcccagttcttagagacccttgatagctcctagaagacaggaggctgccgtggtcaagaagggccaagccttgaagtctcacggcaccccctgtggtggaggtataaggctcaggggccaactactgggtcttgcagtccccatcgttgctgtgggctgtcttcaccttctttagttccttctgtagctcagactcggccaccacaacctcctttggcttctggtaagagatgatcagggtgcagttggcgtgggcaaagctcagcaaggcgtcatccagaggtagctggtgtctatctagatcaggaatggagaacttcttgtagtacttcttgttggttgttctgacaatgatgcagcgctccttctggtccacagagacactatagacatccttaggataggggaggtttcgaatccgccactggaaactcatcttggtgtccttgcgcatgaagataggattggcattgctttccttgatgagttcaggccccaggttccctgctcctaggggcgctgggtctcctacttcaagctgccactggcccatggctcccagggcacttttcacacgccactttctcacaagtagttcactcgtcttctcgtcatattcttcagccatttccttgccgtctgggaataaatagtgaaccttccttctcccgtcctgcagcagcgcagtcttctgggctgtccgcagactctccaaccagcccgtcaccgccatctttc

SEQ ID NO: 159392 - DNA, 1000 bp, Homo Sapiens
ggttttgaaaacacacaccttagtgtactgaaagaaaaacaatttcttttaatttggtttgttggtcccacaccccatctatcaatgtatgtgctatttacaaataagttctatacagtatttttgcagtacctttgataattcctagacctctattttcattctgtgtattaatgtgaataacagatggatattttaatatttaggcagatggtaaactttcctataggtcttgtgagacttcgtcttataggctgaacaccattcacaaaatgtaataatgcttcattccttcaggttgaggtaaagaacttgagcaactggattagcaaagctgcaaagaatgaaatgtggcctaagatgtaattatgttctctgcccttcctttgggccagggtagttttgcacttgacacaatggaaaataggccataaagcctgaaaataaaatgttctaaaccccaatctcacagcactttagtaggcttttcactaggcatctttaaagtattttcaacaaaatactaattaagctaccacttcaaaagagcttcaaggaaaagctctgctttcttataaaatctttttgagacagagtttcgctcttgtcgcacaggctggagtgcaatggcgtgatctcgactcaccgcaacctccgcctgctgggttcaagtgattctctagcctcagcctcctgagtagttgggattacaggcgcccgccaccacacctggctaatttttgtatttctagtagagacagggtttcaccatgttggccaggctggtctccggacctcaggtgatctgcacacttcggcttcctaaactgctggaattacagtcgtgagccactgtgcctggtctcataaaacttttaaattccatcacattacattcacaccttttgctaaccaggatgaagagccttaaacaggtttaaagagtgcagactgcagttttgttaatacttttttcctctccaagttcttttatgctaac

SEQ ID NO: 159393 - DNA, 1000 bp, Homo Sapiens
tttactgtatttaaaagcatttatttaaaatatgtcaacctccttccaaaagacggaagacacatgagcccattccttatatcatgaggtataaggtaacaacaacgaaaatcctaaatgcaaaaggaccatcagttgcctaaatataaaattgaactttggcaaagatatgagtgttatacagaataacagccaataaagaaatacattagtttacaccatttccccatatcatggccccgtccccctgcactcttccctttggaaggctgagttacaaccctgtcccagaagattcagaattttaaatacgtggtctgctgatcaacatttatttttcctcaaacctcagtactacagctatacaaactacacttctaaaatatttgaaacagatactgaatttattggttggctatgagtaggaaaatacatcggtaaagaaaaaagaccctgtatataaatataatgctagctaattacaatttgaccaagaaggttccactgaacagaacagtaaaagcccttgttactgccagtccgtatggtttattcagttcccatcaccctcatcaaagagctgtctgggcggatgtgacattctttgagcttatagtgcagataatgtgctgggttttgttacatgaatggtaaacaagagttagtccagtgcatcacacaatataatgtactgtgaataaagactagatacttttagacactacttcaacataccagttattaaaatgtatgtaaccaaaaagaagagcaaagtgaacatcttaaaatactgtttacgaatggtgaagaacacctgctgaaggagttcttggaattatctgcaacatctgtactggacattctgagagcttcactgaaaaaacggtgctgtcattgttttgcctagcttggctttagtccttatatatgaccccaaaaccttacaagtcagtatggaaactagttccataaatttaaatagtacaaagtgaaactctaa

SEQ ID NO: 159394 - DNA, 1000 bp, Homo Sapiens
aagaaattagacttttatcaatacacaaataattttacttaaaatcaacccagttacatatttttaaaaaattgcagaacctctccacaccaatgtccacagcctagaacaggttcatgtgaaacctgcagtcctaccccggagcatcagttaagtgatggtccaggtactcactgacacgtttctcttgacactgagatggtcgcaaacaaaacaccgttcttgcctggatgaagcaagagttcacataaaagagctttataaaatgtctatgaaggagaattgataatatcagaagagctccagcacttcaattgaatataatcctctattattcttttcttgatttaatttctgtagctcccgaaaacttacttcaatcttgttgagctcagaataaacagatatctgagattttacaagcttgtaaagatttatcagtagcctctttgcttctggcatcattacaacaacagtaaaattcgcatccagaagtagacatatccaatccataatctggttcaaggtaggtgggtgtattccaggaagagtcatagtagcattttcgctacacttcaggtacaggaaatacaaatacttaagaaacagcgtgatatgctgtgctgggatgtctttcaaatgaggcagaagaaatgtctcgctatatgctgaatgaagaattgcattaagtagagctgctcttttttgtaccacagggcatgaagtgctctcctttgtttcgtcctggggctttttatttaactcttgatcacagttattgcatttatcttcttcaggattgaagccattttgaagaatttcagtttgctcttccattttctcatcatgtacagaatttatactatagtcaaaaactgactccatattaacatctgtttcttgaagactgtcatcaccaatgctcaagaaaatttttaagcaagcacaggtgactgattcaggaatgtcagggaactgctgtagacagagttgtaacaac

SEQ ID NO: 159395 - DNA, 1000 bp, Homo Sapiens
ttttttttttttttttttttttttttttttttttttttttgattttcaacgcctttattaagaaatatcaaaagttgattacaggtccatatgcagttttacaaagttcaagtgaagaagactgtagggatgccatcaatgtgcgtgtctgaagactatggaagcttgtcaaaggggtaaccctacaactcctgtcactttaacaatggtccacagcaatgcttttcccccatttctactaggctaggccattgcacaataccttaagctacttaaaagagttttaatacgttataaatacgtacatatttgtccttctagtttgttaccatccttccctgaaagagcggagctgtttataggaagcacaacatttgagtcccattcactgctgtttgtattacattttcacaaagcctgctttgaaagctggcaaacactgcaagttacatgttaccatattacacatgggaggacccatacacattgttatttttaaatttaacattgaacaaaaaaaaggaggaatcacttaacttggaaacaaaacaccaaagttagtcagtggaatggtcaagagcaggacaagcctgccagggccactgaactccagtcacaagtggtcaaaagtatgaccgagaacaactggatgcaggaacatcagcacaaaatacagatgggaatattctcgggagtggtacatcaccatcttgtatgtgagggatattgtgtcagaggggaattacactttcaaaataaccagggctagtaggtcattagtaccagatggggaacagcaatggtgtggcatgccttgtttaaggcctgcgctggtttatctaaaagtagatttctgaaaagattgtccagtagcatcagaaagagccactttcagaggaaggactccttgttcacccacatcagactgcgtgtctcgttgggcttgcattcatactcaatgacagagaaggggcttccccactggcagtgatcccgcttg

SEQ ID NO: 159396 - DNA, 1000 bp, Homo Sapiens
tttttttttttttttttttttttttttttggaggtatatgtaggcttttattagggcaagcatttccatatccatacagatttcattaaaacaaatggatgtctcaagtatctttgttaaacaggatccgaaatgaagtaaatagtagttaaaattaattataaataaagacatttcagcacataaaccaacaagtcttttctagatttttaataccaggacctaacagcatcattttccaagtaagtgacaaataactaatgtgaaaaccatatttaatatagatgatgtcacaaatgacaatgtggttttccatagtaaagaaatacgttaattttcttaaatcctatttggtattacaaaataaattttactggtcaaaaaacaaccaaaaaaaaccaggaaaacagacatgatggaaaggttgataaaatatattaataacttaaaaatgctgtcacaagcatggaaatgctaccattatcatttgaatacaacaaaatgctataaagcaaagagttgtcagaatacagtagaagagctattctgaaacaaatgaagagtcaagatcttaaaacagtgacaagtatttttaatgtatgacagacactgaaataccatgcagaaagtaaacagaactattttttgaagtggtacttacaaagcacagatgtagccttcataatgcaagaaacatagcaaattaacttaacacctccttcaaataaaagtgagaacctcttgggagaatttaagcaccattagcagacagatcctatagcagttaatgaaatgttttgtatttcagtagaaaactatttcagtggtgaaaacgatgtaggaatcagaagcatattctgctgagatactaggtagttgacactttcccgaacagctgccacaactctgggatcctcatgggacttatgtctcccagctgcacgactatctgcactctcattccaccaaagaacatgaactctgttgagtgctccgtact

SEQ ID NO: 159397 - DNA, 1000 bp, Homo Sapiens
gcagtacatgaatgttttattcttcataaagtgcttaaaacatgaagaagaagctctttataaagagccttaactaggaagacaaacagcaaagcagaaccatgcctgctccctgcccaacccacctgcaactttcctccaagtgtggctcggagaagaaacatcaacaaggaccctgggcttcgattcaaaaactcctctgaagccatccatgccctgggcattagggaggcccacaaaggtcagggccagggctgggagtgaataaagcccagaggaatccccagtagggggggtgactccccctctctcagaaaagatacttacttctctaatacccaatgacccccaaaagcatgactgaaaccctggggaccagtggatacttttctcagatttgatgagtggagtttaaggtaggtaacgttacaggggctttcctccatgtgtggcgctcctctgctccatcctggcagcagacagacatcacccagagggcacgtgtctgcctgaggccttccaaaagcaagcccacaggccctctcctgaagaagtggtggtcccagaggagctcttgcctcctcactaagctgttaagtatccttcttcagcacctcatcaccccccatttttgctaattcagggtgccccaagctgccaaagttccctgcagatgccttggggaagcctaccatgttttctacaagcaaaccaggggctgggccaaaggacagatacttcatttcaaagtgcactgcagccaagccaggcaagcccctggggcagaagggacaggctgagatagcagcttaatggatggatgggaggacaacaaaggctttttcctaagtataggtgtctcccaaaggcatagtgggacctccctcttccaggcaagctgactggtctagtatggctaagtcctgaggccagacaatgagagtgagcagggcagccccaggcctgcctgcccgcctgcccagcagtgtttatcctggga

SEQ ID NO: 159398 - DNA, 1000 bp, Homo Sapiens
ttttttttttttttttgaatatatacaatttatttaataaattaatgtcattcaaaatacagtgccagaacatggtgcagttgaacatgctagtaatgtttgtcatgaagcacctgtgctcatgttagattggcggcgccccactactgctagtggttcctgggattaatgccagagcagcgctagttatctgctcttctgcacagctagtgcagagaattcctgaacagttcaccttactaatcctaacccccacacgcacacaacaggttaaaaaaaacacaccctgacagctaacagatctatacacaatcactctacagtaatgcttgttattaaattaagatgtaatgacctggttaacccactctaaatcttgaagatggagaactacatcagcagcagatagttatatgcatgagccaatgttaacataatacagaaagtggaggctttttctgattaaagctccacgcagacccgcacaatgagtggctggcaattcttactgcaagcccagcaacttaagtccacacctggtaaatgaccagctgactggaagacctgtattctagatagacaagtataagttagtgaaaagagaatacatgcacctaatagtatagttagactgatcctgcagtcatagctttccctgtgtaataccataaaattatggaagatcttcctcaactagagtataggatttagacatttctataccaacacggacattagtgttaagtgcagttgaattaattacactgaaaactgtattccaggacttcagaacagaagcacgggaatgaaacacacatactaaaataacctcagcacaatttgtgatacatcacactaggaacaggaaactacttttataaatgaactttttgaactgtacatacacagggctaacaatgttagataatccagattcttatactctcatgattacacataaagtttctcaattattgaataatctatttcatattatgga

SEQ ID NO: 159399 - DNA, 1000 bp, Homo Sapiens
tttttttttttagaaattctaatcccaagcatttattgctttttaaaaagggaactgtacatgatcagatcatggaaggatagctccactcctccccgaccttggtcacaggccgccatgaggagggactgctccagtcctccggtggccactgccatcttcctcatcactgtccttagctttggagtacacaactccaagtggcccgagtctagactctatcaaattccacactgatagcaacaatgactgcatctgatgtgtgctgctggcaatcttaagcccaaaatgcttcaaagattaaacagccatatacatttaaaatacatagaaaaataatataattagaatgtatacaaagtagattacaaaacaacttcactacaagaaatacatcttatatccaagcacaaaaatgtggaaatatacatgaaaggatatacgtttaagaaaccacatttttatttctaaatgctgagtgagaaggcatggactactaaattctggattactgataaaatttcaaaaagaacttgattttgctagcagaaatttttaccccattctcaagcttctataaacagttcttgaagggattagacagctgttcctctttccaaattctgtttaatttcagctgtgtatttcccatagaatctttcagctttcttgttgaatttggcattcctttcattaatgtagtcgatatctgcatcatcattataaggacgtctccggctatatttgtctcgtttttcaatctgtttttccagatctatgaccatcctgtcaatttcctctgtggaaggcacatgtgttccatgaagaagactattggatgttgggaaaaactcttctccatgtttttctctcagtctctcatatgtttccatgtcaggtttgatctgcttggtcaaccgatgatactggcgtaactgggcagcagcataatctgaaaatcccagatcagggtttttcctcttctttttcctctcccatc

SEQ ID NO: 159400 - DNA, 1000 bp, Homo Sapiens
ttttttttttcaacattattggtagctttattaaatttgtttaccttctaaaaaaaacgattacaaaaaagaatacttcatttaagtgtaatactggctttatggacgtaccgtgatcagaaagtgaaattaaagctcatggatatgcgtgagaagagaatgggcgcagaggcacgagtccagtatcccacggagagaaggaagtgtagagagatgcgtggacccatctcaggggtcacgcattcctgggccaaggagttgcttctaagagcttaaaataaatgcactggctggctccagggctggacacacaggcacagaactcttgtaccgcttctcaaagctgcccaaagctgcgaccttccccctcagacacccacaattaattgtttccaatcagctttggttttgttttctctgcaatttacatgcaaacaccatctatctattcatccatccatccatccatccatccatccatccatccatccatccatcctgcttgtctcctttgaccagccaagccctattttgttttacgtacattcccttcactaaaaatcaaagcaagccagtctacatcaagccaagaaacctacttttctaaggagagaaaccagtgctttgccttctttaatgaacctgcgagctctcagcgctttctcttgctgaaatgtggctttaaagccttggaggctgagctcactggcctcgaaagggcagcgcgcgtatttggtttggagcgcactcctgatcacaaagcacatttttagaggcttggaacccttccctttctgttgctcaccaaggaaaaggcacaagaaagacaatgatgtggagattcttaggggaccaaaacaggccatgaaggaaactgtgagtgtctctggcaagccccgtttcccgcaggctctgttccaggcagctccggaaagtctctaggttgttaaaaagcccagctggcccatgtttggttttcagcaaagccctgtctctttaa

SEQ ID NO: 159401 - DNA, 1000 bp, Homo Sapiens
gtactgaggcactaaatagtgtcatgagctgagaaagtttgagaatatctgtgctataggcaagaaaaatacaaaacatcatttagtttttcacctagaaattttctaaataaatagtcatacaaaaaagggaaaatatatacaaacgtacatacaaagtttggatttttattgaaatcttgttaggtatcaaacaaattctgctttcttcagataaaaatattctctcagatgtctccagataactgctaagtctaaattggtccttcaatgtcttatttttattgtcctcgtgaaatgttcatatacagttaagatgttcccaaaaggatttttatcgtgtaaaggagcgtacatgacgacctctaccactgcctccactaacaaactttcctcttgagcctccactgccgctatttgcactagcccaggaaggtccaagtcccccacgacctctagaagcacggtcccgaggacttgggcggtaacctgtagaactaaggggtcgtaatggtggaagagggcctctgttaaaattgctctggcctccacgactttcattgtaatttcctcgaggagtattctgagcactccaactggagcctcttgttccttcccgacgactgtagtttccttttgaagcaggtggtgtgaaaaacctattctgactgtggaaagcaccccgtcctcctctattgcctgaaaacccaccacgggaagaaatcttctgtgatactttgagtggccgttttggtggaggtattccatcttgaggaaccacttctttactttcagcagcaacaaagtcatccacatgcatagatggtggtctacttgtgttctgttttctctgacgaaaaatatcatgaggtcgtataccctgtccaaatcctcccctgccccttcctcttggtggtggcacaacatgagctcttttggcaggttcaatgtattcagattttccacttgacgttataaaggtctcatgcttgtgcttccc

SEQ ID NO: 159402 - DNA, 1000 bp, Homo Sapiens
gttaaatttttttatattaaaaagtggcatgaactttttatgtagaacaaaaatcttgggaaggcaaaattggataaaacattaaaacagaaatagagtgcttcaaatgaatcccatcaccttgtgatgtcccttattaacagtctctaaaccaataccagataccagaacagtccatcctaaagaacgagcagcagtccagggcctccacgctacttcatgcaataactgtttaaattaagccagcaggacctgtttcctttgtataagctacaacttctgaagcattacagttcctctagcacggtgctcaatcacagcacttggagcacctctctgcataaaggcaaacaaaacattgcctaaggaccctgcaatgccacccttggaggcttacaaaacagtagttaaaagtttcggagtgtgcaccacattgccagcaatgggatgtgtcacaatagcagatgtcaaaagagttaagctaatatttctctttaaagtacatctgaaatagaaaaatctttaatatacaccatttgtaaacaaaattgcacttgattttgcttttttaaatgatctgaatcatactgcaacagtttctcttttttttttttttcttttgatcattgatagaactatggctccttaactcagaagggcccttttttctcaaaacaacctctgcaagatgtaaccttgacttcccaggaaaatgaaaggtagttaacaatttcccccatcacctatgtaactccctaaataaataaaaattacaggcagttgctcctggagattacatattatggtgttgatgacaatcttttagaagacgttaaactttttagtttgtcagatttaaaaaatgaaacattacagaaagttcaggaacaacacacttaagttgcatgaacatccatgtcagagtctgggaggaaagggggcagcagtgttgtaaataagaagctcgtagatttttctcatcttatgaacttgttttcag

SEQ ID NO: 159403 - DNA, 1000 bp, Homo Sapiens
cacttttttcatatttttaattaccattattgcaccaatacagcatacactttatatacatatatcttaaacattttccatttttcaggaattcaaatacataatatattatcatctcaagaatacaaagaacacaacatggaggaagattgagaaaataggttcccagtatttagtcactagtgattccacagactttccttttagtgttttctattggaattttaacatgtcctgctatggctctgcaagaatagagctgcctggaaaaggaggcaatgaaaagaaaatggacccaaagtcagaaaaagtgaagaagagaatccaggaaagtaatatattttgaaactaaacataaggactcccttcggccagagtgtacatacccaataggtgcaaaaaggaagcaatgatatcttcccatttcatcctcaaaattgctcgtttagaaacaaaatagaaagtacccattcacctaagaagcagaacttttttcacagcattgtaataggaatggcagggcagagggaaaggaaagtagtgggagaacaacttgcttttaagataccctgggtgacaggtatcaaagccttgggcaaaacctgtcacagtaaagctgtgactctccaacttccttcacaaatgacaatatacataatagcagctttctattaaagaactacatgaactgaaaagaaatgtttatggaaaggggccagatacccaggcagcaaggcaatgaggatactaaacaagagttaagtgctttcaacctctctgctctacagatcaggttaaaaactctaaacccttcaactttaggtcaaagaacagggcaaatacaaattaatgccatgcttcaaatgcagcaaccagatggagctgcaagaaattaaacactcctatagactatcacttggaaagcacagcctcttgaacctccttcattacagatacacccactgatcaaagatgttacacaattcaaactcaacaaaca

SEQ ID NO: 159404 - DNA, 1000 bp, Homo Sapiens
gcttagaaaattcagctttaatggccccagcccttctgtctgagtctagtagtccagggcacagatgagggccacaccacgctttatccagtgtcgctggggctgatgggtggggatctccacagcaatgacatagttggtagagtgtcctgtggttgatagtgttccagcacgagtcagtgtcttgtagatggggcacaggtaaaagtcctggtcctgggccttgcggttgggtgttggcaagagccagataacggccatctctgtgtacagctccttgggctgagactcagccagctggaaggcctctggatcccagcgggcaccttccaggaataatccatggatatagcaccctacttggggtctttgtgttaactctgatggtgcctcaaacatcaccttgaaatcaaaggagatggtgtcaatggagatgacaaatttgcgggcaaaattctgcagagtgcctgttaagaaagcctgggggaagaagaatccactgatccagaagacagctgggatgccatcttggatccaggcctgcagaaagtccaggcgttgcagcaggtccatgacccatgatgacagaggcttgagcgatgggtaggccttggcactccagagctcaggcacagtattgttgtacaggctggcagccatcagctccagctgagaggacatcactaccagccccttgagtgccttgagtaggtcttgcagtgtctgtgtgatcacctgcagcagccgattgtacctaatgacctcttgtactagtactgtgttcattgattcctcatacagcactgggtacttggccatcacccattgcaagttgataggctcaggcaccttgagcagaatgttttgggtgacgtcctccactatctcctcccggccctggctgcctgcagaagatgatttgggttgcagctggatgatggtgcccaggagggcgaacgtctcgttctgggcaaaggtgatgttggcattgtcatgcagg

SEQ ID NO: 159405 - DNA, 1000 bp, Homo Sapiens
aactttccaagacctttctttatttcctgagatgaataaataagtggcaatggggtgtggggatgtggtgaacacagaacaggaactggcagcatgcagctggcaggagggagctgtgatggccccacccctgtgaggaccacctaatcctaagcaggggccaaagctctagcagccaccattaaggaaaaacttttgaaattcacacattgtgaagcctgccagtccccgccaggtgaagagctcatggtatccaccttcagggctactttttaccccaggggccttgtctgcccgggcctgggtacctgggctgctctgtaaggcaggtaggggtgcttaccccactctcaaaaataaaccaagctgtcctgagtgtccagcaggagggcagcccaagctctgggggcagcgtgggtgggaggaggtcctacaggtggtggccgcgattatctgcccttgatgaagccctccagcacacggtcactgcgctctgacaaccagtagccagtcatggccgccacagccccaatgaagatggcggtgaacaccaagtcgcccttagcagccagcgtggccagtgcacagatgatgatgccaaagaacatctgctgcagcaccaccaactcgtcttctgtcatctctgagaagaagcctgctgactctgggatctgctccttcacacagatgccttccatctgcttgtagccctcggcacagatgcagcgataaccgccctcggtgttttcacactgcttgttctctcccggacacacctctgtctcacactcatccacatcgagacacttggagcccacctgctgatagccagggctacacttcttacagcgacctggccctgcccccatgcagcctaggcaggccttggcacagtctcggcactcataggagccctcagtgttcacgcagaattggtcagctccacagttggctccctctgtgccacactcatcaatgtctacacacttgaggtgatgca

SEQ ID NO: 159406 - DNA, 1000 bp, Homo Sapiens
ttttttttttttttttttttttttttttttttttttttagagaaaataatttaatagagaaacaatgaatgatactctttacactcagcctcctgcagggaggacagacagctcttgcccaaggaagcatttaagggcagaagggctacaaatcaccaacacccgctgattatttaaaagaaactctcaaatacattcttttccaggttaaattcactttgtcctcataagtgcccatgctgtgggctgtgaaggtatcagccccattgaagagatggggagacccaggcccagaaaggggaaagagcttgcccagggctccacggcggcagggcaggcctagaagtgggtggcctagagggcactgggtcagactgtctccaagcctccctctccctgtcccaggctcaaactccagcacaaggcccgcgctgtggctagtgtggggcccagagggaacggaggtgggagagatgaggaccaaggaaccctcctgagtgctccctaggccagggcaggaacaaggcttgggcttcttaaaccccaaaagatccagctttcatgcttgagggattaacctaaagtaccaagatggcgggcaggtgtgagttcccagaaagactggtgggttctgtggggctgagtgcatactgtggggagggtggtccctgaggggtgttggagtgccccattccagtgcaaagaggagctgagttggaataaggggtcccgggaagggcaggccaggggcacagctgcctgctggcagggcgagggcaagcacagaagtaccctgcgggggccccttgccctcttctcggagccaaaaatgatagagggctgcatgccccaaaacggacaggcacaggacccagtaaccaccgagtaacaaaggtctcatgaaagaagtgctgttctcccagagtcctgccctcccctccagtatacagcacagccatcaaaccatctgtggggtgcagagtaacctgagggaggctgg

SEQ ID NO: 159407 - DNA, 1000 bp, Homo Sapiens
ttgtggatacatctgtggaaatgctttcagagactatctgctcatgctcaggaatcgttgggagctgggagtcctggtgggcatgttcatgcttccagttacttcagtaactacctgtgattaaggagctgacttgcaacaccaggttactggatttctccaggatacactggctcccagggtctaggctgctggcacctggcccaagatggtccctacagctctcctggtgctgtgagatggccgtttgagtctgagggctgaggggtaggaaaggcttggtgagcttctggcggaagtacctctgaatctgatcaagctcactcagattcttcctgagagaagtcagaatggaggtttgggaggacaaaggtgatgtggtcagtttgtcatcacatggcaagggtgcctctccctgaagatgcagggattcatgaaaccggcgaatgttctgcacatgctcttcatggcgtgatgcttggcttcttgtggtatcacttctcccaggagaggagaaatcaagctcctttgaggaggcatgagcaagttggtctagggtctgccttgccatgtggctggagaatgcagcatacgtatcagaggcagggaaggaaaagggactgtatattgggatcagtgattttgaggtctccactccacgccttgcttgcctttcttctttgaagtgtatcaaactctccaaaggggagacagcaacttttatctgcccctggcactctccactgaagtctgtgatgttgtaccagccacagacaaactggaagccagagagaagtggggagaggtccaccgaggcaaagccaatcaccctctcctcatctcctttatgccaaactttgaagaccagggtttgttgtgggtccagaagcagctcttttgatagccttgactgctgttgaaaattccagatgggggaatctgtgttttcaaccacttgggtgtatacaggagatgactcatcggctgttgcaaaggatac

SEQ ID NO: 159408 - DNA, 1000 bp, Homo Sapiens
ttttttttttttttttttttcaaatgcagcatattttaatttgtttcaaataaagcaatatatgtatatatattttttcagaaaaacaccagatgttaaattctacaaaagcgcatgtgtcctcagcagatcatgtttgtctgattattaagaattcttttttgtaacattaactctctaaagacaatctatggactgacatcactgctacaacacaggttgctaactgagcctctgatcttcagccacatcttgattttcctaataatgagtaaatactgcctggctaaaatgctgcaaagtcttgatgagagaaagcatcaacagatcaagcaaagccatgaaaattatgaagcaagctagagctgattattagaattagtaaaaatgattaagagaggatgacacaaccatacgggatttgtatattctgattgacactcttttggcagcgaattgggtcagcacctcgggcagggaaccaaaactgagtgaaaactgctctttttcctcctagctcaggccaccaacgtcacagccgggactgagagaactgctgcatctgtggaaacttctattctcgtggggcagagattgcactgtgaaaccctaccgacactaccccggaagggcctggcctccgaggtgtctgcagcgtgctgccttcgccggggcttttcagaatgggccggggcctcgggggtcttcatccccaaggaagcctcttgatttttggcaccgcctttgtttttgggccggaagccgttgtgcggctgtcttctgtgttcgtggcggctgttgccctttcccagtggctcggcttcattcccactgccctgcgacttggcaggcccatttagcctgttgttatgatactgtggattaaatctccgtctttggttagaagatccattctgcttgttggccggcatggtctggtgagaggggtcggcggtgctggggagactgctcaccattttggggtttgccgctttgcctt

SEQ ID NO: 159409 - DNA, 1000 bp, Homo Sapiens
ttttttttttttttttcgcggtggaggatcaggtttaatggtcactatgagggtatcgtacatcgttccaagcccggcccccgccccagccctccctcagctgggaacacagccaggtgccctcagacccctggctctgcacaaggggggcctgccccctcgccccagctatatacacgacagcccatcctgctggccgtggacaaaagctgggagctcctgtgcccagtcaggagcccctacagtccaccagctgcgcggccgggtccaggggcccactgtggtgccagcgagtttctcaaaacccagggcccagccccagctgggcccctgccaagccccaggcctgtgtgctgggatggagcctccacactgaggctggtaaaagctgaactcaacagcagcaatgagagtgctgggtgggcttggggggatggggagcaggccccacccagagcctcctctgaaggaggggacgctgcgcccttccttcctgctgcccagactgcccctaccgggtccggcgccggctgaggtctaagtaagcagggatggggggtggcaagaggagtgtaagtgaaagcacagacagtcggagactcggccagtgtagacagacccagagactcggccagtgtagacagagccaggctgggcagcccggcgacgctggccccacgcacacgggccaccctggtgctggtgatcgatacggcagggagggggtgggcagggagggtcctgaacacatgtgggctgctgggctgctgggccggggtgcctacactgtaactagcagcatagtgcttaactagttaacaagaaatgctgcttccctttgaattgtttcgggggtgtagaaattgcacttatttctatgaaccccatggagggatgcccacagctgagcctccaggcgaggcatggcaggtcagtgcctggccgctgagcatccacgggccacagggcgggatcctcccggcccccagggactgcagcc

SEQ ID NO: 159410 - DNA, 1000 bp, Homo Sapiens
tttttttttttttttttttttttttttttttttttttttttttttttttttgacatttataaatgaacctttattaaagacacttcaatgccatttgttagacacttcaatattttacatggttttcaatgtacactgtaccaaaatttctataaataaataactttgtacataaaagtaatactccctctttcacattgcctctcagaagcagcaaattcacatattttgtggaagtaagattagtcagttaactgtcaagaacaaaattctaaatgtgcttaccttttgaacagtgatgacacctgacagtaattgttaactattttctcagtaactcccttcagcttttggccaaaggaacatttgaaggaccttgtttctatttaagttttactaaatgacacattggcactcataagatggttagctaccagtctcaaaagtgcaaattatacccagaacccaggtcaagggctgtcctttccagtcccagctcagtttcatctgtgcgaaggaatggcatggacaggcctgctctgggtccttagtagaaataaggtagccctgaaaagtcagaacttcctcctttctgtcccccaaggccaatgtaatactcattatattggcaaaacgaaaacatcagtatagaaaaatccacaggtaccaacaccagcagcctttaccttaatttaaaagtctcaaatagcaatcgaatgatactgagaaggccacatttgcttttatcataaaataagaggaggaggaaaggcagtgtttaactgttctgaccttttgcttgtgatggattaacaaccctcattctacgccttacagacggacagattctacgccttacagacagacaggacttaaacctaaaaggaaaagccattcactgcaagtgtggatggcacttgcacccctggctctacagacagggaagcctgttgcaggggcatccacacatgagcagtgctcacctgaagctccttccggc

SEQ ID NO: 159411 - DNA, 1000 bp, Homo Sapiens
tttctttttcttgattggcaaacgtgtgttggatttgcagaacatattataaatagacatacagatgtaacctcggtgtcaacagcagctggttctaccttcatgagggagccaaattttccctgtccagagctgtcaaggaagggtttctgaggtgtgtccctatatggcatggtggcaggtccttcgtgggagggttgccacatatgtgagtgtgcaggggcgagcgtggcgcagtggcatcgtctcactgtcctcctccgttgcagggccgcatcatcgagtgcacacactgtggctgtcgtggctgctctggctgaggctggcgcgctccaccctggactctggacttcgcaggttcctgcctgtcacgccacccccttcctgggagcagcgagcagtgccccaggcccgagttggagcacggtctctatggggaaggcttcgctgtctatcagctgtgatttgtaaaaataaaatctttaaatctctcgagccccacgtctcttctttcagagcatcggcctatggaacccggcggggcggcccaggccccagggaccagatgccccagcccccttgtggtgtgtgaggtgacacacaaaggtagctggagctggaagtcccgtgaaggtgacacgcaaaggtggctggagctgcacttggacctgctgggagcacaggcaccttgggcctagtgtgtgtcctcaccaacacctgtgacacgctgcggctgttcctcagggcctggctcttcccccaggcaggaggtgacaccagctcacttgtcctggggctcccacagagcactgggggccgagcacattgttccagctgtgctcccatcacctgcccccaagggcacatccgtcatcagcctccttgccggtgtcctggtccccctggggcttggtccggaacttctgccaggggtgcggggtttcctctgcgggcatcactgtcagccactgcttgtaataggctcggaagccgtcaatct

SEQ ID NO: 159412 - DNA, 1000 bp, Homo Sapiens
ctttttaagaaaaaaactttattttacagttttataaagcggctttacattaagcacaaacaatccatttactttgtatagaaacaaaatacctttccatctgcaaaaaatcaagttttgctgtatataaaactaacatgtgcacattgtgcttaaactgcaaagtctgtacagctttacaaaggactacccttcagaagggcatcctgtaaacactttattgcatatttaacatatggtatataacccacatgtacaatggaagagaaacaagaaaagcaaccacaaggaggatgaaaatagcagctttcagtgagagtctgcactgagaaaggagaaggagccacgtctggagagttgtgcttgtgtcatttttgcacttgcttctgtgcgctggatggttcgtggatgaagcctttatgtacaataactcctaaaaggtcaaacttgaccttcatccagaaacttttggctggttttacaactgaagtagcaatagatttaacatcaaagtgaactcaagataagtggaaaaacaaaaacaaacctaatacctataatcttaaagcaaagaaaaacttaaagaaataaaacaataaaatttaaaaataccctccccattctctctaagctcagaataagtaaacattttacataatttaaaaccctagaaaattctgtagttgtttagaggcaaaaatgcaatggatagtccagggcagtgttcctccctgtatgcccccagctcacctgcatcagaatcacttgaatgctcattacaaatgcagactatcatacttcacaggcagatttactgactctgggatctgcatttcaataagctcccaagtgatgctgaggcattttaaagtttgagaaccactggtctgtactgacaatgctgctatagattcaactcatcctcttagaaaattctgggatcacaagaaatcaacttgctgttgcaatgtggaaggcagtgtaaaaccaacagcaagga

SEQ ID NO: 159413 - DNA, 1000 bp, Homo Sapiens
atttaagttcttttttattttcctccacactggcaaaagttccgagggagcctaaagttttgtaaacattttaactatccctcttacccacccccaacttttgaatttacaaagcaaaggagagtaggagccccaacttttaatggtttcctctcccctcatgctatttgatccaaaaactatatacaattttgtagcagtctctgtatagttattacacatgtttagaagggagggaggcaagaagggatagggagaatggtgatccaaaataataaaaatagaagccaaatataatactccaaacccaaactgctctcagagcaactccagccttcttcaggcaacaatgacaggcagcaaaggtgcttttccaggggctgcccagaccacagcacctctcgcacaggcacagctgcccaatgactccaacccagtgtgagtggcaattccaggtgatgttctgtaggggtttggtggaggcaggaaaagtatttgtttataaatagggcttgagtacatttctacttgaagtttaaggttttaggaggccatgaccagaagccaggccaggcttcctgctcccattttcgcccatcccctccagcccactgcatcctcctgtatagtagattccatggatgaaggtcttaaagatggacaggttctgtatgttctcttttcagaaaaggcaaacaacttgccatcccagaatctttacacaaaaccttttccgggctacagcaagacacacacgcaatgctctgaggaccagatgaaattccaggcttttatcagaagcaaaagtttatccctatccaaaaatgaaattatacaaattcatacatatggtaaagattctagctgcctcttaaacgagacaaattttcagcagaagggcccaaaacaaaatggtcctagtcctctgaagtaaaaatatttatgggaaaaatcagtttttgtaagaaagaaaaattaagaatagtctctctcccaggcc

SEQ ID NO: 159414 - DNA, 1000 bp, Homo Sapiens
tttttttttttttttttttttttttgcaaaatgaaacaagtttattttctccaataacttctgtaaattacaaagacaaaatactaaaaactacagcatataacttttcaatatttaaccagagtactcgtaataaatatgcatccggaaacaagataaaaggctacacctcgtcaggcatcctacaaaaatgtctcaagttttatatactctgcagcatttctgtgcgggggcagaaggggctgttgtgtattttctgaagtgctgtgacaaaaggtcctttcacatttctttggagcatttttgaaattgcttaactataattaaacaacttaagaaaagtaacaccaagctttaaagccatttttgctttgctgtcattggtccttatccaatacagatcaacatatcatccagcacagccaagcacccactgaggccaagcagccttgtgggacatgggccctgtcagagcaggccctactttcagttaaatactttggagagtccaggattctgtctctctccctcaacaagattaatgccataagggaagttgcaagcgtgttagaaacatttttaacctgaaagtaaagtgaacagaaatattttttttccgagacctctgctatgcaccataatattaccatatcagggtttttagcttcaaagttgaaaaacagattggtactaacagtccttctagagatcatttatgggcgctggtagagtcagggcattcaaaacattcaacgggtaaaaggaggatttgctagattcagaaatgcgctacaattctgaagacaccatggctgaaagttctaggggtgttggtggcagctcatattaggtctggcatacataactaccttttgctatagctgaaaactttaaggaaaaagttatatttttaaaaagtctcaagcatggctacctaaaaagtattttgttaatataatctactgtaatttcacttatttaggagttcagatatgaaaac

SEQ ID NO: 159415 - DNA, 1000 bp, Homo Sapiens
gaactttgacgagcattttttattgaacagttttattctgttttagaataaaaactttgctttaatattgtaaggggtactgcaggtatgccatgctgccagttattgctggggcacaaaacgccccagtcagtgattcggagggctgggaaaacgcataaactcataatttcagagcaagtagaactagtatttacagttttctttcttgaaattggcccgggacatctccaacagtctacacatgtattgccatggtacttgctctgatgctctgaatgcctcggaactgtgttcaatatcatgatttgtgggtcctctaaaaggttttgttgttaacatgcaagcaaacagcactgaacaatattgtctaaactatggctgccaagtactggatcttcataatgaaaccaaattacaaaacactgccttgtagagctatacaaaagatataaaatgaaaataaaaaatgtcaaccagccttaaatattccaattctcctacagtgcagtttctatatctttatcactactgaatgttttaaggagaaagttaagaaaacaatcaaaatattagataaaaatatttaaatctttggacccttttattccatggccttcataaaaacacaaaagtggccagatttttcccactagagcttaaaatatcaaaaagattcactagtaatttataattagcaatgaactctatactgagtcatctgtgggtcatcataggcccaaggaccagtgttgccgtgtgttacaggctaccaaaataatttctagcactctgaatcctcttgaaatatgatggaatgagtcaaggtatcatgactaaattccaggcataataggaaaaacaggttcattgatgcctagttttaaagtcctacaaaaggggggaagattacttatttgaaaatacagctaagtacattctcatctgtgattatttacatttgtatactgaaaatatcgattatctggacagatcctgt

SEQ ID NO: 159416 - DNA, 1000 bp, Homo Sapiens
tttttttttttttttttttttttttttttttttttttttttttttttttttttttttgattcttctcttggttttattgtttggtagaaaaacaggctctttaacactgaataaacatctcacgaactgtcgctcctagattacaaaaagtcaaaaccaatttcctttgacgccgggcccttgaatctgacattcaagtcaccgtaatagaaaccagagctgctgaaccttacattctggaaggtgcttgaacaaaggcatgttaaggaccgtttaaaacttctagcatgtaagaagatccatctttccttccaacgcctttggataataacagcagaatcccggagatctgctgctgagtttgagaaggccaagtttaaggattccaaactccagccttcaatatttctgcagaaacttagagaagtaacctccccgtcctctccgctggcttccccaagtacagatgcaggatgcaggtctttcttcctgctacccaggcaccgaggactcaaaccatctcaccgtctcatcactgggcttcttcaatgggctcttggaggaagaagcttttcgtttttgccaatcttcagtccttagaaaagtcctttttgttaagaaaaggcagggagggttaactaagttctaagaattcaataagaaaaggaaagaggtaccttttatgaaaaggacttccaagctctctcagccagcaatttaactcaaataactttcctgagcatctccacacggaacattcagcacttctctcctagcagccagaggatgggatctgtgtacactgagtgtcacttaaaacaccctcattagatgcagtaaaaagttacgctttactcccgtaagtcaaatccacatggctctgggctgtgccctgcagaattagctgtaggagtaacagtaaaggtcctgcccgacagccatgagcagccccggcgcgccccgggagccccccagccgcgacgagaaggccacactggga

SEQ ID NO: 159417 - DNA, 1000 bp, Homo Sapiens
tttttttttttttttttttttttttttttggttctttttccaactttattcagaatgttctgccttcaaggtactgattgcacacaggaaatgtaccaggtatagttactgagctggggccaccaatggagatggagcactgcagacccctaagagttcaagccatgctggagtgggaagacctatccaccttctgaacatacgaggcagaaggctcagagtcctggaggcagactctctcctggttttccttgtgctgatggcaaaatactaaacaagtcttctctccgtcacttctaagcccagggatgcaatctcactccctggcactctgctttcttctagaagtagtaagcctggctggtagggaaccaccctgaggggtatgggaaggggaagtcggttcactttccctatctcccaaaatactagaggtggggttggcaccctccccaggctctccgagcctacagagctagcccagtctccaggcaaggcccagatgccctgggacttagctcggggagggaggtataggcatggggtgctcgtctgtcctggcggctgcagagccctgccccttttctgggcggcagtaggaatacagaagctaagctcaccaaaatcctattggttaatgtttctagtgaatttcccagaaacatttttaagtagactaccaaactaccctttcttaattaaaaattcattaaaccactaaaacccctcccatgcactttttcttgcaaatcagatatttgtataaacaaacaaaaataggaagaaaaaaaaaagaaaggatattttcaaatggaacttactttttaagtgatggagacatgcacttgggggtgggtgggtgtgagttttcatttgtgttttgaaatcccaaattaatgagcatgataaactgttattgctggcactggctttaccccaagtggccaagtggcactgtctgactctctgagtccttgctgggtccccccaaccttcccct

SEQ ID NO: 159418 - DNA, 1000 bp, Homo Sapiens
ttaagcatcactgcccactgcagatggaccaaaagtttctctagtacgcattaactggacatctttgtcagccatacaggtatcacagccccatactgcagatgcttctgcagttaagaggccataagctgtttcagtcattccagtacagatccgatgaaaccatttctgacaagaggcctcacataagatggcatcctgatcatcgttcacctcgtttgtacaaattccacaaggatacactgggtcagaagacgaatggccatgacggtttgggtgaagagaggatttattgcttttttctgtggtgcaggcatctgctgcacctcttggttgtcgtggcttattctgcgtcccatttgcagggttattgtttgtggcttcagtgctacttgaacggctgttctcctgatttactgcattgtttcgattaacattttttaattcaatattactctgattcactgtgtcatccatattcaagtgaggtggatgagcagaggaattttgattagtgtttttggttgctccttgagtaaagtcttgttttgggggtggtgcttttgcttgaccaaaagtgtttgggggaggaataaaagaatgattagattctaacggagaagtaaaatttgaattatttccaggaacaaaattagatgccaaatcggggttagaaacttggctagcattctgtggaggaatttgactgaaattttcagcaggattttgtctaaaatgttgattaggcatgttgacattctgacttagtgcattattataagatggattaccgaaacttgaattatcatgtggcccaaagttaaaagcatgaggtcgattaaaacccatgcccagaggattctgaggaaatgggtgtggctggttcctgagtgagtaaggaccacagtatggggaagacattcttgggggaacgtgaggtggcattctgaatgtactatagcctccaaagccaggataaccagggccaagatatggattt

SEQ ID NO: 159419 - DNA, 1000 bp, Homo Sapiens
tttttttttttttttttgagtttcaaaacgagaacatttattatttgttttttcctcattaaagtttcacaaataaagcacagcaagacttgtctgcagacacacaggaggcacacggacagcccgtcaaccagagatggagacgaaggccagcgtggctctcacagggcagcgcttctcagaacccctggcccccctcgtgccaaggctggcctgtgtcaggcctcgcccacgccgccttatgacaaatagaggccggtgccaaggaggtggctacagagcaggggcaaggaagttatcctcatgttctgataatgaccctgcaaatcccaccccaccctcaggcacctccgtctaaggtgtccggttactccaggtaaggaggttcccaggagggccgtgttttccctagggctgatgaaacttgctccgacaagccaggccactgggaggcacctcaggatggaaaagatgctggaggctttgctggctttcaggatgccgggagccccacgggggcaaaaggggaggaaggaaagcgattctaaagacagattgctgctggtctgtcccgacccagggtcacagtgtcagcaaagagaacagcatgattctgacagggttggattttgtttcaccctcggaatgagcagacttcaaacacttgcattttcacggaaatcaacaagagagacagctagcaggacacgaggctcctgccagttctgtgtggaaaggcaccagatggtttgttatgaaacacattttggtcagaaaatagctggggttttttggttcctgggaggacaacaaagctagaagaaaaggaggtgtgagttgcgtgaggaggaggcagagaagaaagcagctttggcatcagacctgggttctactcttcactctacccctccacgcttgaggcctcagtttcctcatctgtaaagtggtcatagaatatttccaaataaatctaggtgtcaggtttcacacatcatcccag

SEQ ID NO: 159420 - DNA, 1000 bp, Homo Sapiens
tttttttttttttttttgttttgatatgtattttttatttccctgcagttttcacttatcaagaacaagtaacagggaaagttgtctgaactagtgcataaacaaacattctgaaacaccactacacgtatctaatttacaagaaccgtataaaaaaagtcactaaaacactacactatgaaggtgtccaacgcttacagtcagactttttccaacccgttacttgccttgtagccacaggaaaactctccaaaattgaaaagacaatcttgccacaaccctccccccgcccaacacctgggatggctcgatatctagacttccaataattattgcaatgatataatgcaatacatacctggtaaagtatcttttatgtgatgtgttacagttttaaagccagttaaaatatgcagccttcagataaaatgtaatcctcgaaaaattttcatatttgcacagtttaaatgtgctagatgcataatttttcctattccattttttctgtgtaattattttttataaattggtatcataaatagaaatatacattcaaaatatatggaaaagtgagttactacattaaatttgcatgtatcgatccatccctttcccctgcacagtaatagaaaatactattttgccttgaacttcatatttgacagtgaaatgccactaaagtatttaccaaaaagtccatctagtcaaattgtgaaacaaaatgaaccaagtgaaaactttacagttcctttagaaaaaaattacaagaatttcatttcctagctatgaatctttaactttttagacacaaagttggatttatttttacaagatacaaaatgtaaacatggcaaaataaatagttaaaacaagtgatgcaggatcccatttcatgctcatgatcccattaaagaattattttttaaaatccattcagttgcaaattcaagtgcaaaagcatgatgatgaatatctactattcaagtaacagaaataatat

SEQ ID NO: 159421 - DNA, 1000 bp, Homo Sapiens
attttttttttaatacaatcaccacaacataagaaaatttaggtttcaactgatgttaaagcacatttctgtatctggtggtttttaaaaaaattacatattatatatttgacattttaaaagacaacagaaacaaatccacagattactccacctttacccccactttcagctgaaaggttttaagaaaaatcttgcaggttatgaggaccagatggagcttaaaaacagatccggaactttttttttgaaattttatttactttttttttttgtatctcaagaatacttaaaggaaaaaaaaaagggttctatgagccagaggaattcccaattcactttgaaattaccatacctatcttgccatatcaaacatttcaattctgttaactaaatgaactacataatatccttaaaaatcagccagagaagagaaaaacaaatctcgtcttcattattgactttgaaccaaaacttattctttcaaaggagtagtttaacctactaaatatgtctattataagatcttctttcttagaaagtagtattccttctttttcattcctgaaatggtatttcttacacttaaacaagttatggacaattgttagctaagtatcagttatgataaattgctaaaattaaattatctgtttaaggtacatataacacattcctatagcctttaaaactgtattttctttcacaaaaatttaaataaatgtgaaagtaggcaatcactagaagtctcatggtacataaactttgcatcaactttgacgccaaataaggatgaaatttagcgtacaaatcctccgttcacaaaacagtggcaaaaatttatatttttaaattggtataattttatgcattctcaaacatttactgggaatattcaagtttacctaattaatcacccagaaagccagcagtactgccaaaagctcttggtatattcagtagtcactgtgaaaacttttcatttctttaccatttggca

SEQ ID NO: 159422 - DNA, 1000 bp, Homo Sapiens
tttttttttttttttttttcacttgtttctttttatttggtgttggatccaggacaagggcagtggggaatcgaagcaggggcttccctagcttcatatcccccaggcccctgcgcctctggaatgtaccaacaaggggcaggggtttcagggggctcagcctcttcatggggcaggcctcagccctgggtttgtcacagtctggccttgaatttgcctttggccttgaccttccgacaggtgctaggaattgttccgacttcaaagggcagaggcaacaaggcacttccagctgggggcctcggaggcacaggagagcaggagcctcggtgtgaaaggaggggagaagagggagatgatcagaagtctgtggaggaaggggcttctgagggagaccagctcttcccttggggtgccagccagcctgggagctgccctctgcctgtgccctccagccctgaccccgtgctcagcactgtccactgggtgtgagtcacaggtcgaggcccacctttcttggcttcaggatgctgggtgccaccttgaaatcaaggttcggtgggagggaaatgaagaccttagccgtgggtagagtcctcaaggccttgcctgtggtcgacagggccttagtgcccaccagcttgctgtgctgtcgtctgaggacctggccctggtgtcggagtacatggggagaaggcagctgggccctggtgtggaggctggggaagtggtgacgggctgcttatagatgagctcaaaggctcctgtgtcacagttgcggtccagcatccggtcaatgaccacgcgcagggtgtcagcttgcacgccagcacagagccgggcagtgactgctgtggagggtgccatcgtggggctggcgttgatctcaatcagccagggctggaagtcctccccgaacacgaagtcagcgccatagagctcaaagctggccttccgacactgcacggtgtcctgggaggtctgaagtgcgtggatcaca

SEQ ID NO: 159423 - DNA, 1000 bp, Homo Sapiens
tttttttttttttttttttaccagggtaaacccgtatttatttactagcactgttaaaacattacacaaaacacattcaagtggcaagtaattataatgcaagcccttgcatggcaatccaaatttattgaactactgatgctaagttatacaaaattgcaccactttaattaaggcttttagtttacatttggccacctcaaagtagttgtaacattaggttggtcaatttaaatactgtggctccctgttggatagacacacaatctttacatccaaacattaatgcatacaaagcaacaaggcattgttaaataaaacagcaatagttactgcaaattaggccttgtgaccaattacatatgattaaaattacttcccacattcacatccacagtactcgtccaccatttaacatctcaaccaaaacgttacacatgtgaaacaatcactaacaggcaaaaatactaaacctgtatatttggtattgcaaatacacttatgcatgagcaagcaagggattcacagtgagaatctacagctgcagaagcctgaaaatgatttacaaaaattgttaaatcattaaaaaattgtttgaaaatatacacttcttgttgtagacccccactgtacacacgactataaacattgttccctatgtaaacaaaaaaaggaaacatataataagagatttgaaaagtctggacatttccttcccaacagatattaaaggcaacgtctttaatctaagacattatactgaaaggactatcatgttttaaagacaagatcaccgtctccacaggttttttaaaaattaaaaaaactatatagctgtgttaatcaaagcgcttattttgtacaataataatgaccttgaatttcttaaaaaaaattacaataagctacaagtatcaaagaagcgaagttatctggagtagtctatataggagctctttggactttcttttattatgctaaaatagtggtgcttttagga

SEQ ID NO: 159424 - DNA, 1000 bp, Homo Sapiens
ttttttttttttttttttttttttttttttttttttttttttttttttttttttttttttttttttttttcgttttataatgtttgttttatactgaggcatgttttcggttccagttgttcacatgcagtctgctgtgagactccaagatcaagggtgctgggaggccttaggcaagtcaccttacttatctaagactgtttccccacctggaagatgccctacaagcctcctgtggctgtgtttagaaagcatgcccggcctttcttgacagccagccaccccagatgatggcagggcaaggaagactgttaggagtcagagtgctcccctcaggtggaaggaaactgggccaactctactttgtaagccatagggtgccaggtagcccggccaccctgagcctgtgcctccactgcccccgcgtggccagtcaggtgcagctgctcccagagatggagggtgaggaacagacgtgggagcaccagagggacagagctgatggcctgacgctctcttcaggagggcacccccaaggggcctctgcttcctcagtgccccctgagctttatcagcagaggggtgttttccagccacaaggagctgtatctaacactaatgcctttaaactcaagactggctccaggagagaggaggacggacactaggttgaggggccaggccacactcactctggaccacctgttgttcccgggtcaagttcccagggtcacaccagcctgcctctgcaggacaagaggaccaagctgcccttgagtggacactgtgaggctggggctcgtggtagctcttcacatggaccaaacgggaaaatcaggaaagctggtagtgcctggagcttcactcccagccagggcagcacctctggcctctaaggagaaaggcctgtccactcccatccatgttccaggtccccctgcacctccagctcccaccttcatcccgacatctcccatggatccctgccctccattccagc

SEQ ID NO: 159425 - DNA, 1000 bp, Homo Sapiens
tttttttttttttttttttttttttttttttttttttttttttttttttttttttttttttttttttttttttttttttttttacagtttatgtaatattattttattgccattttcattatattcagtagaaatagtagtactagaaagaagaaaatgagattttaggaacataaaactggctttagatatttgaaaatgagaggaattttatgtttacagatttcaaaaggctttgatattatatttcaatgcaaacagtaacttatcgtatgatttggttcattaataattggagtgatgttcagatttaaacatttcatagaatctcaaatatgacttcaggtaccacattttacagggaaattactgtgattcacccactaaatgatagtgagtaaataataactgggatctgtaactataacctaggagtcttgcgttctagtctaataactgttctcaaaaatatcattaactttttgggtataataaacagcaaactgcagaataaattgcacatactaaagagtaagcaacaaaacaaattgcacatgctgtgcagtatgcaaagccacagaattatcaatctgagaaacaactgaatacaaaataaaacacacagttgtgttttgattaaggctccttttaggcagtttgcttcagccaaggctgtgtaacttctttgagtttccatgtactttataaggctctgtttgaattcctttactctttcatctgatcccacaggtccacatttagacctctgtattaggctgtacaacccattggtatagtgatcaccatttttctccatcaacagatcctcaatacagtccattagttccttcacttggtcatcctgattgctcccttcagcacggttattaaaggcacagattcgcccaccacatgctgccaccagcttgcttagggctttgttatctgagtcgtgcatgtaatccatcagggagccaccattgaggtcttccttgtgggt

SEQ ID NO: 159426 - DNA, 1000 bp, Homo Sapiens
tttttttttttttttttttttttttttttttttttttttttttttttttttttttttttttttttttttttcaattatttataaaactttaatgagggagaggccctaactcttcctcagctctaccaactactgaaaggaaaagctggtgctggggagccctccacaccactgactgatgaatttcagcacgtcctggcacactgggctgtgggaggtcttgatggccataaggaatttattccagttgtccttgttagcagccttccctggccgcttaaattcaattttgttcctcagaatggggtatcctgtaataaggcagggcagggctcgaacaccagtgctcgctgccactagggaggcctcgtaggcgccacgctcatcccgaggcagaacctgctccagccgctggtccatggagactgtaagcacccagtctcgaacctcttctctctcagcctccggtacatgctgcttagctgggagtggcacctcaaagggaatgtctgtatcctgaaaatcagagtggtcaaggccatctagagtcccttcctcgattgcatcggtcaggtccaaaaagcgattgaggaagatgaatgccatgttatcccagccaactgccttggcagcaatgcctgcttcatagaaggctttgtctacaggtagtagctgggtgtgacgcaagagtgaaacagaaagcctggcagccacggtttccagctgtttgacactctgggctgcagagcgcgtggcatagtaatgagcgatcagcagcatcgtcttgaactcctcatgggctggagagtttgcctcactggacttcaccaggttttcacacaggttgaagaggacatctcgaagatcagcccagctatgataggcctcggcacagttggttccaggagagctcaccatgtcagtgaagatccttttgtagatattgaagttctgtgggttagcaggggctccgtgctgtacatacagggccaatgcctgg

SEQ ID NO: 159427 - DNA, 1000 bp, Homo Sapiens
ttttttttttttttttttttttttttttttttttttttttttttttttttttttttttttttttttttttaagacaagccaaattttctttatttatttcccacctggaaaatccagaatcaaactttatttagatgttaggcttgctctgatacagaccttcaaaaaaacaaatcactggagcttctcatgtcagcagaatctggtttaaagaattccttgaacctatcagcagcaggatgtaaacattcacaagaatgctgtcacttctggctgctgtgggcagacatattctttttcaaagacatagttgaagagctagccttaaaatttgtgagaggttgcaagcctgcaaacaactttttttctagttcttcttggatcttaagaagaattctctcctgttctaaggcttctatatactttgagtagcaccaggttggctgtcggccatatggttggaggcctaggaaggaatcactgagtaaagcagttttgatagcaggcactgaagtatttgcatattgtttgattccatcctttccagatttttcgtcttctaggactgccaatttttttttctgcttattatattcttgtcttctctctaaaacactcataatattttcatctgttaaattcttcctaaactcacagaactgaggccagaatttaaacagaaccccaaaaattgtcatctgtgcctctctaaatacatatggtcctaactccttccggtgttcaataatcttctgggcttgctctactggaatgtcaatttgtaaagctggtggaatactggaattaataaagcagttgataatagttgtaatcttcttctggatgacagactcatcacaatgagaatggcacaagtccttatatttttgtacttcttgccaaaagagtaaaccattttccaataaatctccttttagagccacaaaacgttgaaattgtcttgaagtaactggattcaataatgctttgcgaaaagcaa

SEQ ID NO: 159428 - DNA, 1000 bp, Homo Sapiens
tttttttttttttttatcaacaaaggatcctttattgaccagagcaggaccgtggcatttttatatatatatatataaataaaagtttgaagatctggcaggcagtgatcctattgtccgcccaccacccccagcactgatttcctgctccctgcacggggaagggggaggatgactgctccacccaggccacagggccacactcccctgcaaacagaggaagaaaggggcttttctgtagccatcccctgcacatcagaaatcaacaagtattctctcaaagaaaaaaaaatacagaaattgaaacatttaaatatgaaaaaccaaagggaagtgagtgggaagaggcaagagaggaaaggaactggagtttcttgggaagggactcccatgtctcccttcccatttatgggcttggggtctggggtacgaggctcacacagtgagtttgcagtgacacagctccttgtagatctgccgacgaagtttgggcatgtcctgctgggtgaagctgaatggctgagacagggccagatgcttgcagtactgcaacacaaaagcaccacagtcactgtcattattctgcctggccacattcattttgaagtaacctttccagccctggtggaaatccagtcggtctttctttaccgcctctgcctgtagatacttggcaatatgcttagggcagcggcggtttagggtacgctgcgagtcaaaataggtgatggtgcgtcgcctcacatcaacagagatgagggaccaatgcacctccaggtggatggggattagcagtagctccttattgaagatgtccacgtttttggtccaccttttcaccccatcataacccttggtacggagtttatcatagaagaaactattgaagaaatgcaccttttcagggactgtgtccatgaccaggtctccatacatgttcatcacctggtcattgagccagttctgtccatacaaggtccccaagtcatccatggtcagc

SEQ ID NO: 159429 - DNA, 1000 bp, Homo Sapiens
ttttttttttttttttttttttgcaactgaaactgtttattgaaacctcagttctacaaaagcgtgaaaaaccctgatacaaagcagtggccagagaggcctgggaagagaatacctgggagaagaaccagaagagagggaaacctaggagcaggacactaagagaagactggaagacaaaagatcagggttgaaggtcccagcagtccttggctccattagactaaagctaaggaatgggagtgaaaagggttccctgcctcacccagcagctcccacctgaacccatcagtccccggctcttctgcctcagggacatcacacaggcccatgccaacatttcctttctcctctcaccccacttcccttatctcccacctatactcttccatcctagggaaatcaaaagtaaaagtctaaaaaatcccagggaggcagagaggggcttctatgtccatctgggacatgtccctggtcaccaagcggaagctctccctggtggcatcactgtcctggccaagcagccagccactgcgatctaggagtgaattaccttcagtccttctgccccaccaccccataagctcccacccaggaggacaggggacctgccaaggacccagcgaggcagacaggatctgaatcaagctttgctcctccaggttctcagaaactcccaaaccctcttaatgcattcctcacagccctacctagcctgggaaaacgaaagacttgaggcgagccagctccatgacactgaaaagggaacattgctgaggctgaggaagtgaaaggggcaccgggctccaaggccaggggggagccaggccataggtatggtaccaggggctggacagcgcagtggggactgtacggttggggtggaggcaggcatggcaggttggggagtctctctggagcttctggcaaaggtggcagttatgaagaagagtgggaggggcaggggggtctgggggaggcaatggtggaggagtcagtg

SEQ ID NO: 159430 - DNA, 945 bp, Homo Sapiens
tttttttttttttttttttttttttttttctctgaaaatgagactttattatcaaaactattctgtagtgcccccagctctggccaccaggctgcccctcaggccgatgggcagcggctgacttcgggaaggcagcccttcattatcagagactgtgcagcctgtggagccttcactgggggaagctctggggtgggctgggccccaacacaccctgtgtatcagaaggcccagtgtcatagcccagtttcctcatgtccttggtcaccacgttgaagaggagggtgacaaagccctgagaacggacacgggtcacttcccggccttcaccctgagccaccaccttggggtctgtgtactcgggccgccgccccatgaaccagcttgtaaacttctgcagtttagacgtagattctgggacaaacatggggatggtccttttgtgccggccaggtgagaagggcacgtgcacggccccatagcctcgaaccacatcgttcccgaacacatctggtccatacacgctgagcacgatctgtggccagccgtaggggttggtgcttttaaaggtgacatcaatggggaagttccacaccagtgcttgccgcacatcttggctcttggatgtgatctgtgagatcccctcctccagacccgctgtgggggcccagtcctggccgtacacaaagcagtacttgcagtagaggtcatcatactctggaaactgggcgctctccacctgcccgttgaccatgagtagaaagacgctaggactcgcggtcgccatggcaggtctgggggtgccggggggacccacctaggccgcgcgcggttgctaagagacgccggcgttgccctagaaacagacggcgtagcgcgcaggacacgtttcttggcagcgacaccttcgcgaaggccacgcgagtgcgcggaattcagcggccg

SEQ ID NO: 159431 - DNA, 1000 bp, Homo Sapiens
tttttttttttttttttctttctccacacgtttacttttaaaaaataattgtacaaaacagaatgaattcttaaggcatatcagaaatgctgagtcccaggccggggccctgccccagccagggctgggactctgcagttgggagcttgtccagctgccccctctaatgcttttctcctccaggacacagggagcctccggaagcacagtagtccccgtgtgtcaccttaggctgacctctgtccccaggggtgacgtaatgctgtcactgtcttgaattcttcatcgtttaacagggagcccagtgttttcactttgcacattgggtatctggtcttgcctgtcctaccctgaacctgggttccctgggccatgtaacacccaggcagctctgatgcccctgggtacttggaggagctcccaggaagtccaagcctgcgccaggaatctctggctttcaaagtcttcaaaggctggagcggctgcccctgccacccacagactccacatagctctgacaacctgctttcctgaacgcctcgttcctgggtcctttcacccaccagacctcactgtgtggcctcaactctgaggcacctgccctctgaacccccagttctacaataaacggggtggattccaaacgtcactcagctctgaccttctctgacctttattcctcattcgtctgcctgctgagctcctattcgtactccaaagcctcagctaaaatgccctttccgcaaggacgccttctctgcttcctgtctggactctcacagttgcaggtctcttcttctggttctgtgatgctggaactgtctatgtctggctctgtttctcccagactgaaggctcctaggggattccagcaccaccaattggctgggaagacaggttattaaacagtctctcggatactgcactgggcattcaatgcctcacaaggacagcggtccaggtaagtcagattccagccgggctcttcctctgtcccatg

SEQ ID NO: 159432 - DNA, 1000 bp, Homo Sapiens
tttttttttttttttttgtttaaaatcaaatctttattcaaaagatagtcaaggctgacaacttatgcagtctgtgacaaagagcaagtcaaggcaaggaaaaagctctcacaaagaacgtagctctgttctcttaaaatgtgtaactgttttcctggtagagcaaaatttcttgaaaggggcccagttgcgactttaagcagcgtttaaacagcctgcctccgtgtccagcatttaaatcagcacaagagaatcggctgcctgtgggccctgcctgagcctcagcctagcttggagtctgaggctccaaggaggcctgtgtgtataagccatcccatggtcaccctcctggacacgcccccctcatggcagcccccaccttaagcagcaggccggctgcaacccatcatccgagggtggttgccctttgctgcaggagggcgggaagccccccctgcctgccctgccctgcagtggcttcaggcatctgggatggagtggtccatggtgtggtggagcaggactggaggcaactttttgaccatgtgctcgtagatcacactggggatgatggtcagggtgacaacgttcccagccgtggccagaatctccatgatctttttgtccttcagcccgataacattctgcccgtccacctcacacacgtagtggttggtgaggagcccgttgcgggccgcagaactccctttgaccagagagacaatcttccccttcttgatcacgaagccgacgtggcccatgctgtccttgtgcatggtgacagtccgctggaacggcctgtcccgaaccaccacgacaatcttatcgcctgatgccttcttcaccacctgatgggctttgtgcgagctccacccagcacagtcacgcccgtcaatctgcaggagctggtccccaaagcgcagccccacaagggatgcaggggtgttggcctggaccaactgcacaaagagcccctggtcgaccttccgcagcctcagcc

SEQ ID NO: 159433 - DNA, 1000 bp, Homo Sapiens
ttttttttttttttttgtgtgaacacgataccagcacctccaacaccacatagaagctgaaagaggggttgagcctctcaacccttgtcctgggagcttcaagtatggtgaggcacaacttttattaaaagagtttacaaacagaactattaaacacacacacacatacacacacacatatacacacacaccccaaaaaaagatacactctccacgcccacccacagataggaatgttggctaagggataatccctcaataacagggactgatggcattgatccccacagcctagagctgagacaggctctgtcttcatcactgtcctggggccagcacgtctaaggcaaaaacctgctgggaagattaaaggagctccagaaaggaagagatctttcaggttgaggtttttccctaaggtccgtgaggcaggtccctagagttaaaggcacattattggagaaaaggcccctggatgtagagaagaaaggactcttctctggcaccaacagcaataaaatttactggttgaaaacatcctgcatctgggagaaggaagaagctttatatataaatctcttctagtttcttgttctcagttgagttggcagcttatctcttttctagtctctttagctctcagctgagttggcggcttgtgtagtagaataagaaagagctggcaaccaaagttggaggctggaccgcaggaatctggaatcacatgctatgggctggcctcaggaggtgaatgagtttcctgcagtgtttggcagaggcaggcctaggactgctgtgtggcagtgactgattccccagagagagcaaggatagtttctcactggcacccagggacaccagtacctgatggatgccaggctcctgttgcaggctccggagggcaatgagggcagcctccttcacatttggctgggggtctccacatgccatttctaggagccgctggggtacttcgcactgtaacagctcctctcccaaa

SEQ ID NO: 159434 - DNA, 1000 bp, Homo Sapiens
ttttaaggcaggttagtttaattttatagaagaaatatttttcaaacagtacaaatgacacaattagagagaaaagagtgacaaaaaacaaagagatgaatactgattataacttattcccacaacagaaggctacttatttctacaattatcaatcaaagcctgacaattcagtgattagatgaagtgaaagccaaattcccttttacatgtggtactatttcaaaagaaccctggtggcaggatcctgatggttttgagaccagaactgcttctaaaacctggcagcgtttttttgttttgtttttatcgcgaggcctggtagatggacagattgaaacatagatggaaacacctaggacttcacttttctggcatgtggggtattttctggggttggcgtggcagtctgaactagtcagaagctccaagaccacgtcatgaatgacaagcaacatagggcgcttggtgtccttctgcctgctcaggccacctccactgcctgcatctgcacctgcagagaactgcgcggctctctggccttcctttgtcttttctttccttgtcatggctgcattgagctgcaaaagcggacacaggcagggaggcagggggaggttcaaaggtaaaggtggcaaacacgagggctccttggactgatacggaagcaggcactgcatctgtttcttgcaggctatcagtgagattctatttttaaaaaacccagccaggcatggtggctcgcaagtccaagatcagcctgggcaacagagcaagaccttgactctaagaaaaaaatcaaaataggctaggcacaatggctcatgcctatcatctcagaactttgggaggctgaggcaggagggtcacttgagcccaggaggttgaggctgcagtgagctatgaccacgtcactgcactccagcctgggcaacaaagcaagaccctgtctcaaaaacaaaacaaaacaaaaaaacccctttgggtgtcagggtggatg

SEQ ID NO: 159435 - DNA, 1000 bp, Homo Sapiens
gaggaggatactttcatttttattttatatcgtgaggtattgtttggattgttacaatgaacttgcatttcttttgtaatgaagaaaataatacagaggaaataacaacaactaaacctttggcctggattatcatcggctggaaattcatgttggatgcaagtttttattgataacaagttattttttggtttatatgcaaaaaatgttcattgaatgcctcctatttggctggcactgcctaggcactttcacaggtatttcatcctaatcctcacaacagccctatgaggtaatcattggtcccagtttacagaagccttgggtgggagattattgcttgatatacttctatttgccacacatttttgttggcaagacgttcgtatcggctggtgattcactggtcaagagctctcattggccaggagttcctatttgttgctgtaagattcaaataatcaaaatactagaatttttcccccacaagaatgatgggaccaatggcataagagtaaaggaaggagagtcagtgggtctctccctttgaagcaccatttgagtttgcattggtcagccccacacaggtgggcgggatgaggtggtggaggaggagacgcggtggttataagtcttctcgcttcagtaggatgagcttcctcacgagcgctgtgatctggggtctgacctcctccactgacacagttgggtcccaagcccctaccacctttccatctggggctactaggtacttccagaagttccaggtgggctccttcccagaagtctgggccaggtacttgaaggcaggatgggcaccagtaccggtgactgcaatcttgctaaacatggggaatgagacactgtaggtgcggcgggcaaagctctcaatctccttgttgctgtcaggctcctgttggccaaactggttgcaggggaaggcgagcacgttaaagtggtgggggcccaggtctcgctgcagctgctgcagggctcggta

SEQ ID NO: 159436 - DNA, 1000 bp, Homo Sapiens
  misc_feature (45)..(45): n is a, c, g, or t
ctaatacgactcactatagggcaagcagtggtaacaacgcagagnacttttttttttttttttttttttttttttacctaaaaaaaagagtccattttcttatacagacattcatttatgtaagacccacatcaggctttttctaaagtgccaaaacccgtgcaatccccataacttcaggtgagaattataatgggcagaagaatgtatcaactaaaatactcaaggccatctcaaatcctgaagagtccctggtttctgtgacaagggggaattttgctagcaaataagtaaaatccaggtaaatatgctctaaatcttcatcttcaggttcttaattctttaacatattgtatcagattttgtattcaaatctaattatattttgtaaaaaatgtattaaaaattcctagataaatttcattcattaattttctattttattctctatacccttctttgttttgtctgtcttcttttctttccacaaattcccaaggacaatccctaaaaaaactattagtcccagtgttcggttggagataaatttattccaacaatcctcaggtctgtggatgtctagagtgtaaatctggtgagtcagatgggctcctacagcacccagggcagcgtagtagggagcagtctgtccactgttcacacccactaggctcagtgcccccagcattgcaacactgaagccgctgagccacggcttggtattttctccgaaccgcagagccgttgacttaagaccaatcaaaacatcgtctcttttgtcctgatgggcataaatagtgtcatatattagtgtccacataactccagaaaaataaagaggtaggcaaacagatggatcacaggaacccttgatagcagaccatccaagtaacgctccccaattaaatgtcaagcccaaggctagttgaggccagtatgaaattcttttcattagtgggtaggtgatgacaagaagtaaggatcctgctcccagagctat

SEQ ID NO: 159437 - DNA, 1000 bp, Homo Sapiens
tttttttttttttttttttttttttttttttttgtaaccaaatgtgtgatttattttgggaagaaaataattaaaactgaggcctttttccaataaagaggagaaataacaatagcagatcataccctggttacaagctaattaccacatcctatacaatgtggatgtgttcaacgtgtattcaatgatatgaataaatgaacatttgcaattttaaaatcccaaatcacttgccaatgttgcaaattcataaatgctgaaataaatacttagaaataagtatattttaaaaactttagtctgacagtgtttatagatcaacccaaatattacatacaaatagtacagcaaatgaatggatatttctgctaatttccacttaatttcttcataatatggctgtctggtgttgcattagtgaagatactccctacaactacatgggtaccccagagactatgacgaatcactttacagcatccaaggtcatcaacagagaatcctaaatgtcggtagcgttcatcagtttcaaaaagagtgttgtttgtatatggtccaaaaaatgccaaaccagatgatgggtcaataaagtcagcccaataaccctcagctcgaagagcatagcaaatttccttagcaccattgatgaacttttctaagagcacttctctttcaatttctacttcttcactccaaacagtcatatcattcttagttttttgtgttacagtcagaatcattagtttgccattagctacttctggaaacagtgattcaaaatcttttcgcagcaattctggacatgtttgtattgcacactctactctggcactttcaaagtaagtttctgcactgttaatttcttgttcaacaggtgcatcattaccctgaaattcattcacatattgtgccatcacaaactcatgtctttcacttgataaaggttctgctagaacatcaggcaaagttttatgaaccaggcttttcttctgtgaagcag

SEQ ID NO: 159438 - DNA, 1000 bp, Homo Sapiens
tttttttttttttttggcctgttagtccatcttattcagtccatggaaggggtgggtagcacagctgggtcccgggtctgttgtgtcccagcatctgaggggccacgcagtgccttctagaccactcaaggaagggcagaaccttggacctgaatacagctctgcagccctagctgcacagaagacaggtaggtgctttctcaaagacagacacagtttatttataaaccaaagaggccaggagcctactagccacccccatccccttccctcttcctgagcacagacatggctcccccacctcctcacaaggtttttggtacaaactgtggtttggcctagagcatccctaaggaccctggtggggcagggtaccctctgctcccaccacctgggatgtgctggggaacgtggagtggggcagcctgatattgatatcccgcggccccggccagggctctggagctgctcttccctgggctctgcagcttggggtcctgggccacctcagacgcaggcccgaggttgggctggggaggagggggtcacccgtccacatcccagctgaagaggtggtgcttcaccagcatgtcccggacgccctccttcaggggctgctgcgcctctctcttcgcagggagctcccagtcctgggagaggctgaaggcaaagcagcagaggactcggagctcacacttgatctggacccagcccgggctgcgcaggaaggaccagggctggtaccacttctccacggtgggcaggctggagcagagcacctccagccacaggtgcagcacctgctcattgagccccacgcagatcagtgagcggagcttcacatccatttgtgcatgcactgcatcgtgggtcacgttcacagactgcacagcccggtagagcagctcctccggggtcaggactttgccatcttcatccaacctgaaggtcttacagagcaccagacgggaatacacggaggcaaagtctctctcgacct

SEQ ID NO: 159439 - DNA, 1000 bp, Homo Sapiens
ttttttttttttttttttttttttttaagtatatacattcctttattagggtagcccttgcacttataaagaaaccttcctcaaaaaggaaatgtacaaaatgatgaagataccatagtttatttcaacatactaagccaaaaaaataagaaaacaactaatttatttgaaaaaaaaacaaattctgtacatgcaggcttggcttgattgaccataatgtatttcagcaaaaaaaatttagatacaccacacataataaagctttctatgtacacagtaaatagtaaataactttgctaaatggccagacatttgaaaaaatgaaaacacagttgtaaaacaaagtatgtaagaatattgtgaccttatttaactgtacaaaaagcaatcattctctccagccttccatcttcacttacatttttttaaacaagattaagccccaaattgaagggattaaatcctttcttcctaatgcctcgggaatatgagattctctttcaaatctttaactttttacaaaggagcagagcacttaaagggaaatggtgggaaacaaagagatttcaattctgtgccattcatccagattctgctggggaagatttcccaagtccactaccaattcactcaacttggtttaaaaacataatacctgattgtaggattaatttggcttttatttagcccatctgcagctttatcattaaaaatcagctcctgacattagcccttagttcagtatctacaaatgaaatttgggaattctatgacagtgatgttagcatatttaaatgtaaaatgcaaaatgattaatttttaaatatgcaaactgctacattttctcaataatcaattcatgcacaaataaaaaatggcaatagaaaaagcagaaaaatatggatgtttctaaatgagacaatgagacaattataaaaatttcatgtattaatatcaagacaaggctggggccagcttagttgtaagaaaaactattatt

SEQ ID NO: 159440 - DNA, 879 bp, Homo Sapiens
ttttttttttttttttggtataaaaagttttttatttcaaaatgcaaaatggtggtcattgtaataattaataataataacataaaaagcatttatccttcctccctagtgcaaaatggtagacgcatttagataattcacacagtgttggaaatgtcatgacaatgcagtgctgcacagcagcaaaactcaatcccaaactcctttggtggatgcttgtggtaggtcagttctagatgtcagcggtttctctgaagttaagtccaaataaaaaacagcacgtgctcctgcactctcccagcggagtcaggctcctgtgcgcgcgccccctctgtctctcccttccttctcggtctgtctctgtctactgcgtctccctcccactccgctggtctcccacagttcctaggaggcgtgctgccggttggacagggcccggccgccgaggaccgtgtcctgctgcttgcctttctcctgcagggcttgcttctggagagcctgtcgctccagggcggcctgcagctccgccacggctgcctcctggtcccgcagacgtctggcggccgtgaaggggctgcacacagtctccatcaggccgagcaccacgccgaagagggccagcacgctgcccagcacgtacagcttcaccatcttccccttgcgcttctgggccatcatctccttggccagggggatcagctcctggaccgtttccatctcggctctgggctctcggaggcgggagtgaccttagtggcacggcgcgagcaggaggcagcgcgagctgcagttggcagcggtcagcgcgtccgttggtccgaccgacctcagcgttctcctcctctcggcagctgcagctctcccagttggagactccgc

SEQ ID NO: 159441 - DNA, 1000 bp, Homo Sapiens
tttttttttttttttttttacattacacatgccatctcctttaatctgcatcacaaccctgtgagatcagtgctattcttagacccatttcacaggtgagcgaactgaggcctttaaaaggttacatcaacctctcaagatcagacaccaaaccatagttcagctaggtgtcgcaggggggaatacttattaagtgctaagcactgtatatgtattggttcacttaatcctcaacaaccctatgaggtagctcctgtttagagaccccctttttttagaggaggaaactaaggcttagagtgcaagagggaggtcctttgcgcaaaggcatggaggagatttgaatttaggtttagggctgggccaggaagggcacggcagccgttaaaaaaagaggcccccctgggaggaggggagctgaaagccctctccaacacccaccccaatcctggattcagacacagacatttctgtgacatccctaacttcccacctgctacctcaggccacagcacccaggcactagggctcccctaggcaggtttttgaggcatgtattatttttgcaacacggacatacatgtacctcctcctggtactgcctggggctgctgcaataagttaccctttccccattctcatctgtatgtgaagttccctggcaaggccaaagcccagggcatcagaatgagcttcctgaacaccacatccaggcatagaagagttgtgtcatacatagctcaaggttacccagaacagcaggagatgtggtccagcatttgggccttgagatccccccattcatcctcttgattgtccacaacagcctctgccatgcttcagtctaacctacggaggggaggctgagattcccaaggcttggcatagccatgggcaaggtccaggctggtgcccaggaaagctgaaactgaggtcactggctccaggacttctgctgcctgtcgggtctcctggctgcctgggttagctgcaggcactg

SEQ ID NO: 159442 - DNA, 1000 bp, Homo Sapiens
ttttttttttttttttttttttttttttttttttttttttttttttttttttttttttttttttttttttttttttttttttttttttttttttttttttttttttttttttttcgctgggcccgcgtggtctccgggcgggtttaattgagtcccggggcgcaggaagcgcgcccgccgcccgcggggccggggttcaggggcgggaaagcggggccaaggcgggctttgaggcctgcccctcgggcgggagtgagggagttggtccgaagccgccgtgtgaagtcgggggaagcgggaaggagcccgcgccgagggccaggcgcgggggcggccgggtaggcgcggggctggtgcgggctccgggccgtccgtttcggggtccacctcgcttggtcctggcggcccactcggcctgcgcctcgctgcgctcacaggtgcgtgtcctcctcgaacacgtccgagtcctcggggtcccgcttgccccccatgagcgccccccagctccccgggccgttgagggccccgccgccgttcaggctggggtgcttctcctgcatctccgactggctgtcgctggccacgtccagcgtggggttgtcgtggcagccgttctccacgaagcgcagctcctcgccgtgcgacacgtgcttgagcttgggcagccggcgctgccagcagttgtagagcaggccaagcgcaatgatgatgatgcagatggccccaatgaccaccagcaccacgaagagcgtgccgtagtcgctgcgcacctggctggcccgcgcctggcagctgctggttgtggaatagttctggatgccaatctcctccaggctcctgcggatgtcacccagcatggaaaggacatcttgagtgggcaccaccccctgctcgcccaccagtgtcatgagaaggtgctgctccttctcgctgggcttgctcagagagatgtgccaggccccatggtggccactgccatggcggggcagcacctcttcca

SEQ ID NO: 159443 - DNA, 1000 bp, Homo Sapiens
ttttttttttttttttggttatttaaatagtttatttttgttaatgataggaatatctcctcagtaagttcaaaccattttataacagggaagaataagctagtgttagatctggaaaagttaatatagcattatcttgaaatttcaggggtaaaaagtggttgactggaacttcaccttttttaaccaaacaatgttaaaataaacatatctgaatagaaaactgtatctggttcttttttatgtcaaatgtaaaatactttaatagagaaaattccatttttctgcatctatttagatgatattacaataaaaggcagtgtggattggagaacatagctagtgagaatattaggtaatgtaaatttaagaagaaattagcttttccatatgaaataaaatcaatgatcacataaattcaacatgattatgaggactaaagtaaaaatacacagtacaatatagctttcggtttcttgttcggcacatatattaatatattttcaaacatcaaacaatataacaccaatatctactaaaatctactagcacagtaagggttactaaagcttagctaattattaacatcttaaaagcctagttcccatatgaattctgtaaccaagaatattctctgtgctatgcaagctggttgaagcaccgtctttttcaggattctccagaattcatacgtatttcaaagttaactcatgtcgaaccccacaattccttattgaatgtggttgatcttctaaacagaccttcatttatgagaacataagcatatactcatcacaattttgaaaagaatggaagtccttcatacatatcagtttttaattttatccaatcattaattttctgcagagttgttttttcttgacttaatatttttgcaacttttttcattttttgttcatttctttctatgtatttcaacccttccaactgcagctgatccagcttttcatttcgactttcatctagaggtatgttttca

SEQ ID NO: 159444 - DNA, 1000 bp, Homo Sapiens
aaataatgtacggtataatttatttatttaataaacatttattaccactatacacttctagaatgaggtggatggtaaatcaaataaacataaagcaatattaagtacctaccgtgtgcaaaagcaaaaaaagacatggtccctgccctcatggagctcacagtctagctgaagcagacaaacaagtcacaaatacaatggcaaagcaccagggaagcattatggaggaaaggattggttctgcctggagtatgcagggcaggcttcccagagatggagacaatgaagctgggtcttggatgagtaggagttcaccagatgaaggggaagggggtaagcacattccaagcagagcaaacagcgtatgagcaagcagagtcttgaaagcgcatgccatggtgcaggacgatgagtgttccagcgcagcttattttgattgagaggatcgtttcgcagtctctgtttgttcttctgtaatttactaggcatcatctttccagttctgaagtcaaaactgctgagatcaacagtatttcccaggtaccttgccaactgaggcttgcttctgaacttcttaccacttggactgaagtagtagacatcgctcttgccagcacttagcccagattttcggatcacttcctccttcttccatccgggggggagggccgggcaatccatcctcttcccgctctccgtggcccggggtcccctgggccccggccccgcgctccccgacgggaaagggaccggctcccgccggggggcgccgccgccaccgctgccgccgccgccgcagccgccgccgtcgccgccaaggccgctgccgccactcgggggacggccgcggccccggccccggccccgtccccgtccccggccacggccccggccccggccacggccacagacgccgccgccccggcccgcctgcttccaccgcccccggccacggccgccgccccgagcgccttccctgcgcacgccgctcaccggggac

SEQ ID NO: 159445 - DNA, 1000 bp, Homo Sapiens; identical to SEQ ID NO: 157622

SEQ ID NO: 159446 - DNA, 1000 bp, Homo Sapiens
ttgtgtaacttctctccagtatgaatcatcttatgtttagtaaaggttgagaaatggttagaagttttgccacattcttcacacttgtaaggtttctctccagtatgaattttcttgtgttcaatgagttttgaggatcaggtagaagctttgccacattcatcacatttgtactgtttctcttcagtatgaattatcttatgtgtagtaagtgttgaagattggttaaaagctttgccacattcttcacatttgtagggtttctctccagtatgaattctcttatgtccaataagggttgaagatcagttaaaggctttgccacattcttcacatttgtagagtttctctccagtatgaattttcttacatgtactaagttttgaggataggtggaaaactttgccagattctctacatttgtggggattctctccagtatggattatcttatgtgtattaagggctgaggactggttaaaggctttgccacattctccacatttgtagggtttctctccagtatgaattaccttatgtctagtaaggtttgagagttggttaaaagctttgccacattcctcacatttgtagggtttctctccagtatgaatttttttatggtcagtaagatttgaaaattgtttaaaagctttgccacattcttcacatttgtagggcttctctccactatgaattctcttatgtgtagtaagggttgaggactggttaaaggctttaccacattcttcacatttgtacagcttctctccagtatgaatgtacttatgttcagtaagttttgaggatcggttaaaagctttgccgcattcttcacattcataacgtttctctccggtatgaattaacttatgttcagtaagctttgaggcttggttaaaagctctaacacatttctcacatttgtagggaatttccccagtatgaattatattatgtgtagtaagggtcgatgactggttaaaggctttgccacatt

SEQ ID NO: 159447 - DNA, 1000 bp, Homo Sapiens
tttttttttttttttttttacagaactcagggtctatttattaggaaggagatgtcagtgctttatcaaagatgaaggggtcacagagggacaatgggacaaaggccctcagctgggacatttcttggccacaatgagaacagcagaaggcacgagtcctgaagatggaagaaaacaggcttgaaccacaaggatacttggtttttgctcccaaaattcctggccttgcaccatgttcacaaagccccttctctttgcatccctccttttcctaggcatgcctccctactcccccagtttctagtcctggtttctagtcttgcagccatacccagctcctgcagaggccgctccatgtcagcttctgagaaggcccgtctggggaagccactgagcaattgcacagggtcctggcccccacctagttcctccccacggtggagctccacatagagcctcacagctgccagctgttcccgggcccggaacgtctgggtcagtgaggtcccatctggcagcctgacctgtatgcgacactggtcatactcccgcttggtgggaggctcctggctgggagaagagggaacaggacctggctctggtgccactgggggtggctgagagcccacactgccaccatacttcttggctctctctgctttgtccctctcgatcttttctctaactctttgtctggctgctaactcctcggccttttccctccgcctctcctcagcagcccggcgcatctcatcttcctgtagccgctgtcgtgctgctgacaactcttgcccttgtctcctgcgctgccgttcccgttccaatgcctcccgttcctctctttcttcacgctcccgctgcttctgggccaccagctccaacatcctcttagtttgttcctgtctttcctcttcactcaaagcgggtttgccttctccggcagcagaaccagatccttcaaggccgccttgctctgaggaagtgggctcccgtcccagga

SEQ ID NO: 159448 - DNA, 1000 bp, Homo Sapiens
aattttgactcatgaaaagtcataagacttcagctgaaaaaaaagaaaaaagttccagccttagaccaaaaaaaaaaaacctggaagagtatgatagattaaacaaggatggtcaggcttggaacctgaatgtattttagagcaaaagctcaaaggtgggtggggaagagaacaacctatttggtaacaaggtgtactataataccgtgatataaaaaaaggtatggtgaaaatgtaccttttactaaagcttatacaatatacaagttccttggtccataaaaactatgttagatttgtgtcttctagtttgttcaacttgtattccagccacattatttacttcttgcccatttaaacaaaaccaaacaaaaaccaaccaaccaaccaacaaaacagctgaaaaacttgatttccaatatttatacattttgatttttttttctttttttttttttttttttttttttttactgtggcttctgcatttcaaatcagcacttgcagggagacaacggggtttttgaatagtatcacctggtatgaaaagttttcccaagaaaccacaaacgattgttcattttttctccttttttgttaactttttgccacactcaagtcagtttaagtcctagcaaaaagacggtagttaggataccactgtggctgtagatgatgtgacactggttgaatttgtgctggcgtttgtgtaacttccctcgctgtttgtgtttgattcgttagggggcacctggcttgaattggctcgaaggattgctcctgctgcactgcaatgtggccgcggccctggttctggtgtgtaggtaaaggtaaggctggtggaataaatgattccatcatttcggaccaaagttactggaacctggactggttgccggacccatctccaaccttctcggaatgcagaaatgtctgggacgacacagagcatactctctccacacctgtacatagtttcagcttctacatccccaaacca

SEQ ID NO: 159449 - DNA, 1000 bp, Homo Sapiens
catgtcttaaacacacaggtgtttatttaattgttcatttgattgaatttttaagttcactttactacgtggatgagatgggtgcatattacagtaggctttcgctatgagcgctgccaccatgaggaatatcccagccctcagttctgcttccctttctgagtcccacaaaagccagatgtggacagccttgggttcccatcccagctggctgctccttctggggctgtcttggtggggagagggagatggggcagtgggtccctgctgacccctgagccctgcaggggtcaggatcctcccgtggtccctgggtgtgactctggaagacactggcagtgcccggccaaggcctcccgcaggatggaagttgagggccctggctctgggtcctaagagaactcagccgcccccttcacactttacagcaaggggccaggcagcagctttgggatggggcttccgtggagaagtgggggatgctgcagtggtacaaagacagcctcccccaccgccatcctccagctgaccgtcctccaaggccagcactgggcgtccaagggaaagaaggaactcagcccagagggtgtgggcaggagaggcctggagtcaggcctccacccacagccccctctgggtgccaagtgggaagggtgttggggctggcttgggaaccttacccgctgcccttccaacacctggatctgtgggcagcggtcccacaaaatcccccttggggctccctgaggaggacttgtggctgccgcttccaccagggcagagggcacaggaggggccagcactccaaagggctctagggtgggtctttcaaggacatctgcaaagccctggtggggaggggcctgggccagaggctctttggaactcttgcacttctgagtgggggactgtccatgctgcccacaacctctagaccatgcagcctgctcatgggtccctggcagagaatgcccactccccagcagactcagggcaggcc

SEQ ID NO: 159450 - DNA, 1000 bp, Homo Sapiens
ttttttttttttttttcttgacatttcttctgtaatttctttatttaaaaaagtaaatgtaacaagatacttaaaaaaggctagatacaaaagtagttaagctgctcacgaacatttaaaattttccaaaatgtatcttcaataatcatgatcttataaaacattttacagttatcagaaagtgcccaggctgagtttacataactgaaataccttagtacaaatgtctagttagaactgaagtgcagtaacctcttgagactgactgctcattgaaatagggatacaaagaaaaagttgattgtgataaaagtattgtgcattggccccatcatatgtacaaaaaaagtgccctcactcaaatgagcaaattacatgcaaaatattagtgatatcatttaatatcctagagctcaatgcagtcaaaccgcaataaaagtggtttttataggtaaaagtgatttcatctcttaagatctgaatgtcgagaacttttttacaagttccatatacatgatacacagttgcagccaaccacaaattaaacaccataaaaaaagttaaaatgaaaacacagaacatacttaattttttattttgaaattccctattccctctatacaagaacctttgctgaaacagtttccacaaaggcagcagtgaattttcagaacatttacattttttccccctcagcaaaaagataaatcacagtgtaaattatgttgttctgctgtcatctttggctggggttagacccagaagttggtgactagcaaaccaatatagccaaatgttgctagtgctccttaggcctttaagctataaactcagcaaggaatgtctgcattttatctctttaaggtaccaccaggggggtatgacagcattaacttccataaacttttatagacaaatggaaaaaaatctacaaaatttgctagtaatattacacagcaatacacactttttatactctacacaaaaccaaaattcttgg

SEQ ID NO: 159451 - DNA, 1000 bp, Homo Sapiens
tggttaatcaaatactgcagtactgatttaatcagtataaaatcgaaagagctttagactctgtaataaaaatccaaatttggggaagggcaaactttaaaacagcagccaagtagagaagggttggggaagggagaggtgagtgaacaggcacattggaactgtggggacatgtaactgaccactgtcaaaccagtgtaagtttcttggtttctcatggaaaacattttatacacctatttttcttccttccatacttaagtccatcagtgtccaaatacgtctgttccattttttgtctgatttttgttgggatattacaacacagtattgcatttactccagttcctgctccatgtgaaaaaattagatgatttcaaatactttcttcagctccacaataagctgccagtcactcttctgcatttcatctctgaaccagtctttgagtgcatcaatggactgccggctgatcttactaacaagaatatctgtagcttcaaaatgtcttccaaacattttgggtgactcaccagggataggttctatttttacacaaacttcttgtcctttttttgcaacatccacttgtttatggtttatttcaatacttgttactattccgatgtcaacaaaatttttgcttgggacacacatgggtgtcccctgtttcacctgacctgcttccaccgtcacccccatcactatcggatctcgagaattaaaaatgtactgagggaggatttttatcttgcagggaaatactgctatgtgcttaaattcttcttgtttctgtttcttgtagtcttgtctatattttgtaaaggcatcaaataaatgataaataatttctgcactaaaaattctaactcctaaactatcagccatttcttgtgcatctcgttcaattctcacatcgaaggccaaaattactgcatactgagggtcatgttccaacatcactgaagccttcataacatcttttttatgcactgggcca

SEQ ID NO: 159452 - DNA, 1000 bp, Homo Sapiens
ttcatttgaaaactttttcaattttctaatttaatagaaataaccaaaacaatgtggctttcaaacaagggtttaaaactaatctaatacaacttctacaacacattccagagcattataacaagaattatttacaggcagctaatgtattaaataaccatgaaaagaaaaaacttgcttttattacacaccagcaaaaacacaggaacgaaacaattagaaactgcaaccttgttttaaaaaattaaatatgattatttagagaatacgataccacagaaacagcactttttaagaatcatattgaagggcagttaactatgtgcaaaaataatagtactagtagtaataataataatgaggggaggagaccaattgaaatactggaagcaaggaactagtaaggctgtgaatttaaccctttcgtgtgtaggtatgtctacataaaaaattaacaggctttcaaattgcacaaatctttttttataggcttatgtatatgtttcactgtgttttaaaatgtagtagatgcctacatttttcagaacaaggagcagacatgcattccatccttaagattgaaatttaggccacacttgaaagggaatattgcagtggcacttacaaaatcattttggtgccttcccacacataaatttggtgaatttaaaagaggagcatttttaattttaaagatcactttctagaaaagggctaaacttaactttgtacactttgtagtttgatatgacaaatatatccaaattaacttatttttgaagatagttttgtttcttcgatacaataaaaaatatataaaggaccacataggcaaacacaaggaactaagatgaaagaaatgctatacatgcattttgaccaagtaaaagaaaccattatattcaagagtacgtgttgaatctgaaatgtctatgtaaactgtggcatataaatttttttccttaaaaaagtaccttcaatttttttactcaaacactta

SEQ ID NO: 159453 - DNA, 1000 bp, Homo Sapiens
caccatgttttttttttttttttttttgaattttttgattgattctatattcttttttcaaattttattttactttaagttttagggtacatgtgcacaacgtgcaggtttgttacatatgtatacatgtgccatggtggtgtgctgcacccattaactcgtcatttagcattaggtatatctcctaatgctatccctcccccctacccccaccacacaacagtccccggtgtgtgatgttccccttcttgtgtccatgtgttctcattgttccattcccacctatgagtgagaacatatggtgtttggttttttgtccttgcggtagtttgctgagaatgatggtttccagcttcatccatgtccctacaaaggacatgaactcatccttttttatggctgcatagtattccatggtgtatatgtgccacattttcttaacccagtctatcattgttggacatttaggttggttccaagtcttagctattgtgaatagtgctgcaataaacatacgtgtgcatgtgtctttatagcagcatgatttataatcctttgggtatatacccagtaatgggatggctgggtcaaatggtatttctagttccagatccctgaggaatcgccacactgacttccacaatggttgaactagtttacagtcccaccaacagtgtaaaagtgttcctatttctccacatcctctccagcacatgttgtttgctgactttttaatgatcaccattctaactggtgtgagacggtatctcattgtggttttgatttgcatttctctgatggccagtgatgatgagcattttttcatgtgttttttggctgcataaatgtcttcttttgagaagtgtctgttcatatcctttgcccacttttggatggggttgtttgtttttttcttgtaaatttatttgagttctttgtagattctggatattagccctttgtcagatgagtaggttgcaaaaattttctcccattctgt

SEQ ID NO: 159454 - DNA, 1000 bp, Homo Sapiens
ttttttttttttttttttttttttttttttttttttttttttttttcaggtgaaacaagtaaatcattggctttattctgggtcctggaagctccactgtgagtctgaaaaaaagacacaacaggggcggcagccctgggggctggtgcagaaaatagtccctggctcctctggccctgggagcctaaagggcagtgaggagaaggcttagcaagaggcctggagcaggggaagtcaggtccctcaggaacccctcctcccccagaggaaggaggaagagggctggagagtctgctggagagtctgctcagttcctcagcaactgcactgcaggagggtgcaggccatgggttactccttgcccttctcaggggcagtgggctcccagagccacttggtagtccccaggggctcagtcccagggtccagccgtgactcccctaagggcccctcgccctccaagtccagctcctcaaaagaggagccgctggcacctgactcgctgtagctgtgctcgctgcgggtgtcaccgtcatcccagccacggctgctcgccccaggtgacagtgtggcagctgaagtctcccggctgccagggctcacttccaagcttacagaactcgtgtcactcattgtgtcagctcctgtgccatccacctgggtgtcaatggcctccacaagcccccgccatttccactctgtctccttcatctcaggcacatagaagtctccctgccgtgccagtgggcacatgaaatggatctggtcttcctggtagatctccagccgaggataggcacacagcttccgctccttgatgtaggtgtccaaggcaggatggacacggcgggtagccagccagatggacagaatggtggtgtaggggaaggtggctgtcaccacatggctgggtgccgggaaggagaacaccttgaagccaaatttctggtagaggtcgatgagctcaggggagggcgattcctcaccttcactcaggatg

SEQ ID NO: 159455 - DNA, 1000 bp, Homo Sapiens
actcattcaaattacagaattttattgatacagtagattaataaaaactgaaaggatgataaaatgggataaagaattcagtacattattttataacacactctttaaaattaaaatactttaaatctttcttcttaaaattttcattgccatgaaaggccagaaaattctgggacaaatcaatactgaggtgtaaagtaatccaagaacttcaggactatttcacaatttgcatggttgtcctcctatcagaggcatccttctggtgtaatggcagacaatttagcacctctgaagattaagggtgcccaggagtaaacactaggtaagatacacaaagggaagagaccatttaactctccaacaaatagtgacatcaagaaaatgacaccaattgttgaaaacaaattttttttcacagtaaaattgcagaaaatacaaatacaaacactgacagattactgcttaagatctatcctaacaaattcttttcaaatcaatagatccaataaacagtcgggtactgtcagtttaaagccgcagataaaagctatacaagcacttcagaaatcagaaacattaaaaaaaagaaaaaagatatttacaagtttcttctttatgtctacatagccatcgcacattacactttcacaagactccatagtcaatgttaccatgtgtatggctaaagcatgtgaccacaaatgtatggggtcaccaaagtaaggtccaactgtccactcttcagcagtcccattttgtgcatcaaaggctttattcagcctcaagcttgaccaaaaaaaaaaaaaaaaaaaaaagatttttccaaagctttcacagagaaagttattaattacatttgttcatcgccgttcccttttagcacttcgccgccgtacctagtgtaatggggctaaatatatggaatttaaatacagcaatatgtatgtttacaaatttaggaacttttgcaaaataatttgaaattggtttgaaatgt

SEQ ID NO: 159456 - DNA, 1000 bp, Homo Sapiens
ttttttttttttttttttttttttttttttgctaagaaactgataatcaaaatatacttttaattgtaaaagatgatccattcactaatgttctaaaaatgtaaatttttatatatcaacttcataaagaataccttacagtatcttgtaatatataaattaagaacaagaaaaaatgagttttacttttctttaacagtgttgcttggcaatatattaatcacatattaagtctatgaagtaaaagtttaacctacatctactggttgctttaatttttcacttaaagaccagaccaaaatcaaaaccttggaacttctacttttcaacctgaaataatcaaacaataactataatcctaaaatagcactgacacagtaaatattattcttatgagtgttaatggacgacactgatatatctcatattgtaatcaatttgagagttgccactgaaatcaattaaaaatgtttattctgaaagatgctactataaagtttatagactcaaatgcttataatgcttaatcaaaactaaatttacaaaaaaacctagaaacaggttgaattgaaacctgtagatcattttataatattcatgagcaacaacttttttaaagacaaaggctactgttttaatataaattaagagctttaacatgatctccctttagtgcttttaattgtcacatggctgtaaaccaaagacccctccaaattttaaatgatcactgatactacttgagcagaaattctcaggtgtcagtacttttaatgttgtgtacatcaaattacagtacaaagatgactataaacaagatgcagccctcggtttccatgaacagcacactattacagtaaaccaagtttatattccaccatcaagtgtggctctcccatgacttcgctttgtgatggatcattaagaatatcctcaaatccaatagtctcatcattacccctcaaaacatccagtgaaagatttgagcttgaaagaaatg

SEQ ID NO: 159457 - DNA, 1000 bp, Homo Sapiens
ttttttttttttttttaaaatacaaagaaaattttatttgtatatcaaagactctaagaaatgatgacataaggttaacagagttgatgtcaagacaaataggtttgaagttatagatgataaatcactttgtcttactgaaccttcccttgattacgttagagagcatccctggtatgctcccagttgaatcttaagcatgatgtgtgtccgggtgatataatcgtaattcctttctgttaatcctcgttctctctcttttttttctttttcttctttttctctggactagcaattgctgtgctggtacatggttcttcctcagaaagtggttcttccttaatgtgtttctttttaccccttttcttcttcttcttcacagatgtttcttcttcttctgccactttttcttcttcctcttcttcaactttaactttaatcttggcttttttggctttcttttcagtaatttcatcctctttatctacctgttctattttgcgttttttagaacaggttggaagtgtggagtcaccagaaggatcgtaagtcttcacttcacttttgtgttcatatttttctgtttttgctaatgcttttcctgttccacttatttttcttatccctctgtcttccaaagttctcaacctggcctctaatttggctctgttctcaactcccattgcagaacttgaatcctcaccaaaagcatcataacggatagccaaaacggttttggctgccagcattcgagaaatctttcctttgtgtttgggacttgtctggcccacgagtgaagcatgataaatgagaccatacttaggggtatcccgtctagatttgagggctctgaaaagtgccttttcagctccaagaatctgaacggtagaagctgcatgcttggccaaatttaaaagagaacctgcatgagcaataagccgtgctccaactaattccccaaccatgactgtaacattgggtgcaatggccatcattcgat

SEQ ID NO: 159458 - DNA, 1000 bp, Homo Sapiens
tttttttttttttagattttaaaacatttatttgccattcactactttgcaacaattctcccaatttggtttgaaaagagacaacagttgacttttgttcaaagtccaagtaaagagagaggccatgtttggagtgagaatcctttaataactatatttatttccagagaacaataaatacagaaattgcaagcagtatatgtaacagtaatattttctttaaatacagaatcacctacttttatacaacttaacaggcaaacatgttattttgttgttgttgtttggaaattagcattgggaaaagctatataacagaggaaattccaagtaaaatcaaacagtgttcactcttaactctaaacacagtgctcccactactggttctgcattgaggcggaggggaaggccagaggcaggcttagcttcgggcggcagcggtctggggctgctcggactggagctgcttgccaaggtattcccagttgtgcaccatgagcttctgcacggccagcagagcattatagcggacctgctggtcttcatgatgcatgtggttcatgaccagctgcttcccaccgagctgctcgatgacccgtttgcctcgtggataatgccgcacatattctccaacatcgtgagcagcaacagctaagacttggggatcatctgacacttccaaaagttttgtcaagattttcaagagttcataattcttctcatttaacctcacagcattctctctccaaaatttctcagatttgtgcacaggactccattccaaccttccagatttaagttctgaactgtattcatcaaatgaactaaggtcctggacactctctccaagtttttccaaaagaaatttgatatcttcgctgatatcttcatcatcgtacttctgctgttccaagttctccaactgtttcagaactttgcactgaatcatagccagggcatattcttggcgagtttctctttcagttgatttttctaaaaa

SEQ ID NO: 159459 - DNA, 1000 bp, Homo Sapiens
ttttttttttttttttttggcatttaaaaatatattcatttattcatatatatattcactttacaatactgcattttaacatacataaaaatctaaagcgtttttaagaatttttcaaagtcctgtactgatgctttggcaatctcttcacaaaatatttcatcaggaatagatactagtttgtccaaagagatgtagttaggttttgctggatcatactgtgctcttcctaaataggtaagaaacaagtgtctttctttgaccttaaacagccttgtattaaatacctgtgggaacttgacaatgatgtggtggggaatgctcatcacattgtgcacaaaatcaaacgtctcggtaagtttcattttatttgcagttaacatctttgggattctggtgatcatatgttgaatttcgttatgtttaaaaccaagttcaagacgataaaccttcatattttctttcacgggttccagacttccagttagcagccttgggagacgaactaccagatctctagtcttcttcacactaagttcaagttctttctgaaaaaatcccaatctgttatccagtctttccactgaaaagttcagcaaaaatggtgcttttctgaccatctgtgcaacatctgctttactgaaattttttgaatgcagataagccaccctggtcttcagattttcaaggtcttcagagaaaattgcatgattttttgtcaggaatgctcccagttggttatcctctatacccacatctttaagaaacagaagcatttgcttaatgtctttttcaaaatccagtctcagaaggaggtttgctgcttctggatgtttttctatcttggacaaatccacgcctagaagaaccaacttctgcagagtctcagaatgatccacatagtctcgaagtgtgaatgaagctggtggcaatggagggtctgcaataatctgaatagcctcttcctctgaaattggctgcattggagacaatggaggca

SEQ ID NO: 159460 - DNA, 1000 bp, Homo Sapiens
ttttttttttttttttttttcctgctgggtgcacgtttatcccagccaccgcctccagggcggccgcacaggccctgggcatcaatccagcagggctcccgactcactccctggagaccagctccccaaccacccggccctgatggcatcccgctgcggccaggtgtcctctcagccgaggtccttgtcactgcctagctgcgtccgcctgccacaccagctcacccgagatgtaggtggcctggacgtgaagggagtcgtcgagcaccacgaagtctgcgtcagcaccaaagtccagggtccccttactcttctccagccccagcaactgggcggggtgcagggatgcagcctccagggccgactccatgctgcagcctgtggcctgcaggaagtgccggacacagacgtccattggggctatgctgccactcagcgtcttggtgccttgagagcagagagggcaggctctgggggggtcgtgggccacctggcatgcgggctgggacctgggacccagtgggtcagggcgctcacctgccacgtaggccgtcagaccgtccacttccacttcctgctgtcccagcgtgtgccggccgttgcccaggcccaaggcagggatggcatcggtgaccagcaccagcccctggggatgggcacggtgggcgatccgcagggcggcggggttggtgtgcgtgccatctgcaatcatcccatagaagatgcagcggcctgcgggcagccggtcgctggtcaggagccccacgatgcctgggtcgcggtggtggaaaggcagcatggcgttgaagaggtgggtgatgaaggtggctccgctccacacagcatcctctgccgcccgcaggtcagccactgagtgccctagggacacgcagatgccacgggccgtcagcgcccggatcacttcgtggctacggcccaactctggggccagcgtcacgatgcggacattgtccaggggcccgtaggtggccagcaagtc

SEQ ID NO: 159461 - DNA, 1000 bp, Homo Sapiens
ttaaaaattttaatgatattcatcgttgtatatgacaatgtcagaaatttcattaggacaacaattaataaaagcgcctatccacggcaaaaatgaaagatgagttttcacagcaggaaattagtgctgaatcagtgactcctgaagtcgttacagcagcgcttgcgagatgttgcattttcctctgctagggcacactgcttgggcggtttaatattgtttttttctcccttagaatttgatgttatcaaagctaccattaacattttacttaaagtttttaggagaaactcttcacaaagttaatagtgcagatcttctagtaattaagatcatttcagatgtgcctgaaatgagtaccacatgtggatgagtttgctttttccattccattaagttcggtagaaattttaaagagaggaatgccagttacctactgcccaattttttaattaaataattttagcaattacgtagaaaaataatttttaaacattgtcgtaaagaacttttctggaactggtgactgatttaagacattggaagatcatgataagctgcatatcttccagtcacatgatggtaaatctgcctctcaatgtccgagagcagagtactggcacctattcgaaagagttctggcttcagccactcatctccaagctcctcctttacaagagagagccaagcaagggaatcctttgcactgcggatgcctcctgctggtttaaaccctatcttgtttccagttttccagaagaaatctctaatggcccgcagcattactatagctaccgggaaggtggcatttactgtttcttttccagtagaggtcttaataaaatctgatcctgccatcattgctatcatactggctttatagacattagtaagagttccaagttctcctgtcgctaatatagttttaagatgagcctccccacaggccttgcgaaactgacgaatctcatcatacagggcttcccactggcctgtcagc

SEQ ID NO: 159462 - DNA, 1000 bp, Homo Sapiens
ggacttaatgtttcatatttattttctgacaccaacattaaaacaagagaatgctcattccacaatgaggaaattttctaatgaattttattatcaccagcatctttaaaaattaagaggaattctctcgagagtatatataaaaaagaaattaaaggcaaatattttgctgttaaggatttaaaaataaacagaaacatagagtataaaattttcatttcactgtgccctcatttaaaattataagaatataagcaaataacatccaatgtcagaagagattcagggtgaccatttgcagtatttagtggcaaattagtagcatcatgaaaaatttcaattcatttaaaaaaatagctttcatttaaataataattacgtttagctttatctctgtatataattagactttcttttggcttagacaattccattttctccaactgggagctgtgaaggatcaagtcctactttcttcattgatacggcaatatcaaataaatagtcataacactcacacatggttttggccttctcccatgtttccccccacacatatactccatgacgtctgaccagtactgcacaggagtctgggtattcattcattgcatgagccattctatctttgagggtcttctcctcaggtgtattctcaataatgggtaccactaacatatcatcatatctataataccctccggaagtacatttctttattccttttatcatctcttgatgtgtaattttaaactcccgtcctggaaagagaagtgtggccatcacagcagctttagagtgggtatgaatcactgcacctgctcctctcattgtgtaagcattcatgaaaagaggagtacactggcttttttttagcttcttcgatggcgaaggtccacttatgtccttttcatttatatcacaaacaaacatgtcttcaggctgaattcgttccttttgcactcctgaaggagcaatgtagatttcatcgccatgcttc

SEQ ID NO: 159463 - DNA, 1000 bp, Homo Sapiens
ttttttattgtaaattgacaatttataattgtataaatgtatgggttacaaagtgatatcataaattgtggatacaatatggaatagttaaatcaagctagttaacatatgcaatacttcaaatacatttctgtgatgagaacatcaattttgaaatgtataataccccattattaagtataggcaccacactgtacaacagaactcaaaaaaagcataaaacatattcttcctgtctgagattttataccctttgaccatcattaatttttttttttttttgagacagtctcactctgtcacccaggctggaatgcagtggcgcaatctcagctcactgcaacctccacctcctgggttcaagaggttctcctgcctcagcctccccagtggctgggattacaggcacgtgacaccatacccagctaattttttttgtatttttagtagaggtggggttttgccatgttgtccaggctcatctccaactcctgacctcaggtgatccacccaccttggcctcccaaagtgctgggattacaggaatgagccaccatgcctggcctagtttttatgagacaaaatatcaatttcaaaacagcatcagtggcaaaacagcatcagtggctggacgtggtggcacgcacctatagtcccagctactccgcaggctgaggcaggagaatcgcttgaacctgggaggcggaggttgcaatgagccgagattgcgccactgcactccagcctggtgacagagcgagactccgtctcaaaacaaacaaataaacaaacaaacaacaaaaaagcagcatcagaaagtgagcaggccaggcacagtggctcatgtctgtaattccagcactttgggaggccgaggcatacttttctgtattaaaaatacaaaagtatttgtctctactaaaaatatccaccccccccgcccaaaaaagaaaaattagttgagcatggtggtgtgtacctgtaatcccagctactcggg

SEQ ID NO: 159464 - DNA, 1000 bp, Homo Sapiens
ttttttttttttttttttaatattcaaaatcctcagccataaaaataaaggccttttatttggtttttctatgccagtacagaaacatctggacaacactcttgagcctgcagaggctcacggccacacccacttctgccgcagggactgtctgttgaggagccgaaccgttgaggcacagtagccaggccctcccgagggctccagaagctctaggtttacggggtcaccttcttgtaggtgacgtgaagatgctgagtcattggctgtgtcgtggttgccatggagaccgtctgctcaagtttgccttcagaattcagcctgaacttccgggtgatctgctctacgtggggctccttggcgaaggagatcctggcgatggagtgggatgcgatgcacagctcctgcccgttcacctcgccctcctccacttccaccacgcctgtgttctgggcgctgacaaaggccaccttgttggtgtcgggcttgaggcgaatgaagccacactctctgtgcatcggcttgcgcgtgtccgggtggaaggagttgaacgagaagttcagcatgggctggcccacgtgggagatgtgaacctcctccaggtactggaagggctgcagtgtggggtaggtcccggctccaggtgggtccgacagccaggtgcccagcatccaggacagtggctccaccactgggttcatcttggggggctcgcggctgggcgacagcaggctacttggataggggacgctcactctcctcagctcatccagcttctcctgtagcttccgcacctggctgtcggagcggctgaccctctgccgcaggctcttcagctcgccgttcttcttctccacctgctcccgcaggcagcacacctggctcttgttctgccgggaggagaagcagtaggagtgcagtgagtcgatgagcttgcaggcccctgacgccgacaggatgacctcgttgatggacatggggctggcgtcgctgtgctcgc

SEQ ID NO: 159465 - DNA, 1000 bp, Homo Sapiens
ttttttttttttttttttttttttttttttttttttttttttttttttttttttttccaggtctgcagagcatttattccgtcccagtggggaggggcagggatccaggtggccggagggcacagggcctacgtgtaccacatgaagccgtggctggcatggagagcctcctctgtggtgcgcagcccgtacagctccccgatcaaggggggcacccagcgggttgtgtggaacacagactcccccaccttccagtcgggcacgtccttcatgatgatggcctcctcctccaggttctcccgaagcatctgcaaggtcctccggtcggtttctgcctgtaacagtggcaacagcgcgatgcgagcctcgaagtcctcgatttgtaggcgcctgcgctcacggttccacttcattatgctccagtgcccgtagatcagggttccaatccctatggccagcatgctgtagcccgacagtcctcgacgcggcaagttccgtttgtagtcgatgggcccatagccccccggcggaggcatgtcctgcttcacctttgacgccgccatactcgcagtatcccacacttccggtcccgggcggaagtgacttactgccaccgccatgatgagtgtggcggaagcacttgagatggtccgcggcacggctaggaagtcccggacagtagtgtaactatccgaccgcgcggtaaagctctggcggcggaccctgggtaggaatgcgctgccgggctgcagctgaggggtctttactcctcttttgcccagacagtgcgtgactcgccttggttcttgcattataggccctcgcgttcaccttgcctctggggtgttgcgcagtccagtcagaaactccgagctctcaaaggagccaggtgccccagttaaggccccttttcccgttttcgccccgtctaggtgactctacgcgaagcccagggctccacgtcagtcactgggctgggtacactgatgcttggggggca

SEQ ID NO: 159466 - DNA, 600 bp, Homo Sapiens
tttttttttttttttttgtgaaaaaccatagtatgccctttacttcatttgcttttagctatttcataaacaccacagagaaactggacacagtttgtgatgaaacttagaaaaatttctttttccataacataaacatgtcagtttttccctttagatccttcttccactcccgcttcactgtgctgaagagatattgagttcttccagatttttgcttagctgggtggtttccgaactcaacggactctccaggtaggtagttccagcacagggctttcctgtcactggatctatgacttttccaactttgaaaacgatctcagccagttcatgtttcacatgctttgctcgtggaacaggtaaagctctgagaagcacaatatccccaactgtgcactgctgaagggcatcgtgagcaaagtaggttttccgcttattaaaatactttaataaatagggatccagaacaagcctggtcactctcactttagcagtcttttgcatttttgtcccaatcaccttccccacaatccatctggcatggacggatgagcgaactacggacattacgtggctttggtcacctccgccaagact

SEQ ID NO: 159467 - DNA, 1000 bp, Homo Sapiens
ttttttttttttttttttttttcaccagaaactgctttttatacattttgtataaggacaactctggaaacaagcctatttcctccagccagtttcactgaatgctgcaccacatgctacaccagttcagcgtgagaattttctaataaatcttttctgatactaaaactgcttcctttatatgtccaaaggtccgccccaacctaagggaagagaaaacagccctgagtttcctggaggaaattcccaagtcaatgtgctccctctttacaaggaaataggggcagagagagcaagttccagcctcaaagaaagaaggattaacggatagtgaatatgctgctacatctttcttacgaggcctgcccacccttacaaaggaactacatccttaacccacaggtagttttcagcgtggcagtagctcacactgtttcttgcggcagagggccctgggctcctcctggagactctaccaccagcggtagtgggccagggcacggttggcctctgccatcttgtgcaagtcatgcttcctcttgatcacggggccctggttatggaaagcctccagcagcttgtgtgacagcttctccggcatcagtgtccgctggtgctttttatcccggcactcagtgatcatccacttcatggctaggaagcggcgacgccggtcgggtaggggtacagggacctggtagaaacggcctcccttgaggatgggtaccagcccaatcataggctcacagtttttcagtgcttgatggaagatggtgtaggggttgcgttcgatggttgcctgttcctctgcagaagcggcatggtacttctcaaactgcttccttttcacagcttccagagtctgaatcatgagggatctggccagtactttgtttcctcctatcatcatcatgttggtgaatttactgatgactgggtcttcaaacacagaacttgttttccctgctggagcagctttgatgagctgagtcttcttgag

SEQ ID NO: 159468 - DNA, 1000 bp, Homo Sapiens
ctatttcaccaaagaatctttaatcacagaggtgaacactagaagtaacataatgagaaaagaaaatgaacaatgttctaagaaataaacccatagctgtcaaacacaagtctacataattcagcccaggaaaacataattattatctgtccaccacagacttaggctccatttccaagtaacgatctaaatttttttttaatttacaaaattaaaaacaattcttcatatacattctgtcttggttcttttgcatattattccttaggcacaaatccaaagcctgctaatagtggggaattaaataggacaagtaaaaacaagcccaatttaaggagacctttgagagtaaaatgttatagttggaagccagcttgccgtggttggaatcgttgctgtcagttcggggaaaaaactctccttaggtatacgccgaatgctgtcagctgctgtcctcaaagctgctactatttcggcaagaatgaaaatgcattgagctcatgggatcggatacatagccatatttgtcaatgggtgtgtattgaagacttcttttcatctcctccaaagacagaccttgagaggaatattgtccagcactttgggacaaagcagcataggaccttgcatttagagcatattccaattcgaaacgacttcttaatgctgccacatgactccggccaggtcctccccggttcaccaggcaatcagaagaagaagaaggtgagagagacccactgctgttacttgatgcaggagacatcagctcaatgttgcagagacactcttctaacttcatgacaacttcagaaaattcgggtcttccttcaggacatgcgttccaccctcgtatcagcagagatgatatgggcttgggaatggaatagccaatgggaggtctgatgtggtggtaagccatgtctgctgccgcagccgctggcttgagatgagcgaatggaatttcgccagtgagaatttcccacagacacagagcata

SEQ ID NO: 159469 - DNA, 1000 bp, Homo Sapiens
tttttttttttttttttttggcaactctaaaaggattttaatggatttatgaaacccccagatttccttacagccacgagctgtgaatccacacatgccagcaacattgaatacacttttttttctgcctgggcacacttattctagtaaagagagtgtgatgacagaacaccttagacttcaacacgcatctgtgcttaaagaggataaaaaacaaagaacaaaatcaaacaagacaatgtatgagttgaaactactaaggttgattttctccaggtttctcaggatctgggcagcgttttgcttcctcttaatttggaacccttgctgtgtactctgactttttactgattagactgaggtgctggagacccactgttcatggcttgtggaggcactgcagctggctccatcttgctaatgtgtgtgatgaatcgaagacgaagttttaaagctggttttaagttacagataatcttctctacttgctctttcacgctgtcaccagtaaacatatacttcatgtgatagaggaagtcacagatgggatccatgtaatttaaatgggtgctacactggtcaacattcagcagcatgtcataaaacgccacaccaatctctatcatacaacgagttctctcttgctgaaatctttgtaaaaatggtccaacaagatggtatacataaagcaactggaattcggtcttcactataggaagaagtacttcagtaagaaactttggaatgagagaaagttgtccgatgctagaatggtgccacacagcatgtgcaagagctaacgtatagctacaactcatctcagagtaggactgatgacaggcagtgaaatcaaagaggcggaatggatagccaacccactctgtttcagacgtcaagctggggctgctgatgacactcacaattcgatcatgaagaacaatccaatatggctctggtagggcagtgatgatcaaaccaattgcattcatccatgctgtaa

SEQ ID NO: 159470 - DNA, 1000 bp, Homo Sapiens
ttttactgagtctggttggttattgtatgcaaattcattcatagaaaacggaaatgcaaccatagcatggagacgctctgagaaaagatccagacccacctcatctcccagcccttcaagcagagctataaaaacaagtttgggagaaaaacacattcccatccccaaagcagaggccccgcctgagctcccccatcctcagcatctggggtggaccaggtgggacgaaggggatccaaggaccagggtggccagggtgcccagagctggggcaattctttgtaaacttcaaggtttcataggtatgtgtgtgcatgactaacacagaacttgcctgaagactggacggaaacttagaagccagccctgggtcctagagcgaggctaggactgggcacgtagagggaaacagcacatcccttcctgaagcccctttctaagtatccaggtcgtcatccagtgtcagctaacacctggggtgtggacgccagatcagctcacagagaaggaggcagctgctacctttcacgttatcctcaacgctgcgccgggaggcccgcttaccaggaaggacccgaacatggcgatggaggagaggaagtgccagatgtcgtggtcgtcaaagaagtcgaggaggatgcagtcccggttgtgctccctcgactctgcaggggttttctgccaggtgctgagtccctggaagaagaagaagagcgcgaagccccagaccacggaggtgcaaacgatgcagagcagggggatgagcttgatcctctccccactccggagcttcatgatgatgtagaaggcgaagtaaaggagcaggttgcagatgccaatggccaacaagtaggaagcgaaatcattggggcgcatgataagcccataggcagccagcgaccagttgatgacgttgcccatgaccagcagcaccatgcggtccacgtagagcggcccgctgcactgccggatgcagtctgtgtagagcacgtggaggatg

SEQ ID NO: 159471 - DNA, 1000 bp, Homo Sapiens
tttttttttttttttcagatatccaatttttaattaattaaaactttacaatgtattacataatccatggaaggagagaaaggggatgaaactgaaggaaccaggactctggaggatgcagggtgctgtttctctggatgagatgtactctgccactgtgctctctgggcactttcagatgatggggtctgagatgtctcctcaggctgcatcagctgtcttcagtctccagaacagaaagagcctgacccaggggcatcttggtggccaccagaaccaggtttctgggagagagttcaggactgaagatgggcaggagctcagcatggaaaagctgttcctgaaggtacagcagccggtccagtagaataagcgtctccaccagtggggcaagcagtagagccaggctgaagaaggccaccacacggttctcctgggccaggtgggcctgaagggcagccagattcagtggcagctggggatctagccccactcgctgtagcccccgctgcacatattcttcaatcttgagctcgtggaccctggggataccctgcacgcctggccgacggagctcgggccgggcccgtcggatgactgtctccagtgctgcacggtagcagtgagttcgaaggccagggccagctttctgtagccgctcagcatattcctccagggcatggcaggccccctcccgaagccggtagggcagttcatagccaggcagcccagccacccactgactcagtgggtagccgccagggtcactcagcttcatgtagcagcagcccactgaggccagggccaccacctcaggacagcaggagaagtgtctcagcaaggcaacactcagatccccacaggcgtggaggcctgtgagcagcaagcgggccctgccctgacacgggttctccagtggaagcagaagctcctcacacagggctgtggggtctacccacctaaccacgtggtgtggggagtgacgagggctggtttggac

SEQ ID NO: 159472 - DNA, 1000 bp, Homo Sapiens
ttttttcaaacaaaagctgccacatgtttattaagacattactggctcttaagcacagctggatctataaatcattttccatatattatcacatattcaggaaagtttctgagatgatatatcaagacaggcttctcttgtgactcaactggacttcaaatagtctctttagaagtctgagtaatggtgcaacctatacatcagggccttgccttttcattccccaaggcaaagtatccacttctcggagaaaaatccatggtatgaacatgagaaatattcttatttttaatgactgggaagtttgaaaatactgtacaggaaggaagatgaaccaatctgactgcttctttcattttttctgaagcaattgccaagatttctgtagtaggattgaaggtcagagaagtaacacctgtaaccaagttcattatagcttttattggctttgggtttgtttcttggagacaagaatcttgattgtatatatttaccactccacaattagaaccacaagcaacatactgtccattcctagatgtggcaatgcttaatccatataaactgccttcatcaacaaatctgttaaggcacttccttgagttcacatcccaaacataaacttctccatcccccgaagaggcgtatactttcttactatctgaagagaatgtggatgctgcaacccttccattaattttcatgcttccaatcagttctttggtcttcattgctagcaaatgcaaatatccagcaatgccatttatgagcaagaaggacccatctggggagacttcaaagctcctcactatcttctctttcaaacctctcacttgatgcacaggaattaactttccagccagcatgtcatagacataaagaaccttgctgtgggtactcgtggctaaaacttcttccccattagcactaaaacaagccttaaagattggaaacctttccaaatagatgctctgaattttaggatttgttttcccatcaa

SEQ ID NO: 159473 - DNA, 1000 bp, Homo Sapiens
tttggagagcaaataagtttatgtcatataatttgaaaggatcattggtatattaatccagttaagtttggtaaagagaagataatggaatacatagtaccgtcattgaaaactgtagaccttgagaaaatcacttcccttctttatgtttctgcaccagttcctgtgacacaaactgtttcaacctttcaagatactgtccataaagttccacatcattgtgacctgctccttcaacccagagaggctccacaggtctttggcaacgttcaaacaatgcgaggccatgtgaaaagtcaatgacttcatcttcagtcccatgaattattaatactggagaggttatcttagagattttgtcaatgtttgggaatgcatcaaaacagtaggtcttcttggtatcaggaaaggcaactcgcattcccgaagtcagaggagaatgaagaataacagcagcactctcatatcgagcagcaagatccacagacggtactgtccctatactttggccatatataatcacattttcagggcgaatgccatatcttgtcctaagagcaagccaagcagcttcaatgtctgcatagaggttcttctctgtgggtttcccggaactggcaccatatccagaataatcatatgagaatatattacaattaatccgtgatcctagtcctatgtaaaagctgctcatttgaccaagatcaacagcatttccatgtgagaagagtaaagtgtatttcgcattgggtgaacaacgtacaaacatacaagcaattctgttgcctttactggttctagtcatgaaacactcaatagcatctttttctctagaagaatactgccagtctgctcgttcagacagatgtaaagtccaacggcttccgctttcatcacacatcagtgtgtaagttggatcaggtggcaaaaacgctaattttgaagcaatcttccctggacaaggtggacagcagaagaggcaacatagctcactaaatga

SEQ ID NO: 159474 - DNA, 1000 bp, Homo Sapiens
ttttttttttgaagttcatcatctttagacttaaggaattaacaagggtcagggagactacaccaggctgagggcttcttggttcctggagacatgcccagctacagcaaacacagggaaacacgaagggggcagctggaagatttggtcttgaacttggggggtgggtaagtgatgatccccacgactggagcagcaggaagaagttgtgtctgaggaagtgctgggccgcccagagggacagccctgccctggagcttgtcgccgggagggaagggaaacaagccccctccctcagtgctgaggaaaaggcacttggctgggtctcctcctgccctctccccatccgtgggagagacggggtccttgcctccttgcccctttcagccgcccagaagccggtcctggttcagcctctggaagaagcttttgccgaactcataggtgctgatcatgatggcacaggagggggcagccttgatgatccgaggaaggaagcctgcaaagagtcccttggtgcccgactcggcccggatcctccgcagcagcagccaggtggagtccacatgcagggggttcactctcacagcctccatcgctcccagagcgacctggcgttgggtctttaccacgtcaaagggtagagtcagcactgcagccaccgtccctgagatgccaccagccacaaagctcatgcccacagaagtctggtccttcggcctgaacccattgagccagctcttcaccagctcatagttgaaccagtacagggctgagaagggcacatctcgaagggcagtggggccccagcccagccacagtgagcgccagccaccctgagccactgcagttcgaacacaggcacccagctcccggtacgacacatgctgagcctgcagctttgtccgcataagctccagggggctgatcacagtcacggtgcccaggcgggccagcgcgccagccaccatgggtgcgtagaggtcagaggtcagggctc

SEQ ID NO: 159475 - DNA, 1000 bp, Homo Sapiens
tatcatataatactttaaattgggaatttaatatttttcaatcaccaaaaattcatttgcatgaatcatttgtggtataccagaataagaaaatacacatgatacagagttatggaaccaatagatagtcatgatatagttgatagaaacatcaagacaaagcaattatgtacagatagagacaagggttgaggaaagagtaaaggtgcatagaaatctgtgctgttaaataaagtagctatagaaaacagtataactgatcactagtaatagataactaacggccaaaaataatatcaactttaaattagataaattttattatttttaaagtaatcattttatttaatctattgaaaactgataaactattagattatgaatttttggtaaaacgttagaagacaaggttagagaaataacctatcatatggttgtatagtgtaatttacatattttagcataaatataacattattttaaagtatatctagggttatttttaatgttttatacttttatattctctataaaataacctatagttaagaaaacataccattctctcaaagcaaaataaaacaaagctttctttaatctgaaactaaagatgagctttccatttcttgtcaggatctgtgttgctaaatatttttccttctttttctagttttttcaaatgaagtaagagattatgtttagccatttcatgtaaattctcaggagtattcttgtaaataatttttacaagctccattactgtaaatgatttctcaaagttctcacgaaataatgtaagaatttgctgctctcgaatatttctgtgagaaatgtattgttgaattttagcttcagcattatgaattactgggccatgtcctggatatataatatcagctttgattttcaataactcttttaaagagttcatataatcatagaggtcttcaaataccgttgttccttcccctaggatgcaatctccagaaaagatagcatt

SEQ ID NO: 159476 - DNA, 1000 bp, Homo Sapiens
ttttttttttttttttttgtcgttatgctgcatttattatgagaatcaacagtcaacagttaatgattgactaactcttgttgttcactctggacattaacgaaaaagactggaatagggctacagcgctgcttttatgctacacgggttatgcttggactctgactcccagcagcaggtagattcaggaattcatggcagtgacattcaccatcatgggaaacaccttcccttttcttcaggattctctgtagtggaagagagcacccagtgttgggctgaaaacatctgaaagtagggagaagaacctaaaataatcagtatctcagagggctctaaggtgccaagaagtctcactggacatttaagtgccaacaaaggcatactttcggaatcgccaagtcaaaactttctaacttctgtctctctcagagacaagtgagactcaagagtctactgctttagtggcaactacagaaaactggtgttacccagaaaaacaggagcaattagaaatggttccaatatttcaaagctccgcaaacaggatgtgctttcctttgcccatttagggtttcttctctttcctttctctttgtttagtcttcgttctctttttcagtttccatcagatcttgcccccacacaccactggaatctcagaggttgcttctttctcctttccatctttactcctactttctggagtagccaatacagcatgtcacaatacggcactgttcaaaatgctcctctatcacaattctgagtctggtactggtggtctgctgaactgagtcagttcgttttgaaaaaggtcagcaagcaatgaaaaggtggaagccttaaggccagaagctatgaattccccaagtccatcatcttttctaacaaactggctaggcactggaatgtatagagtctaatttaattctactcagtccttttgtcttcttgcaggacttagcgacatcatcacagtctctaacaccttgaaaat

SEQ ID NO: 159477 - DNA, 1000 bp, Homo Sapiens
ttttttttttttttttttttttcaccagtgaagcaggagttttattgagttcctccatgtcacattaatacattagcttcaagacacagtttcaaagacccgggtccttctgacgtagtgtgttggaggcagctaggccagcttgaggcactgtgtgttgaagctgtccccctccttgccggcgacagcctccagcagggcctgtttcttctgcatgctccgtgaggactccagctcgtacatggtggtcaggttgaagagcacgctctcgtgcaggtagtgcctggggtcctgctggaccatggcctccagctgccgcagggagtccttgagcttgcccaggtagagcagacacacggcagcgttgttgttggccactgcgtttcttggatccatccttaagatctctgtgaagaacctgtgggcttctgcaaagttattctgcccgaggtgaaggaacgcgctgttcatcaaaaccatgattttaccctgtagtccatctaatttctgtgttactttctcaacgtcttgaaaatacttttcagctgtttttatgtctccaatctgcagggaaatccggccgatgccgctgagcagctggggctcttgctctgggtaatacttgataaccgaatgatacgcctccacggccagcacataatccttcatcaggagcagacagtttgccatggagtacatcacccggcccagacgtgacctccacagccggatagaggcttgtctgccctcctgagtcacgctgctcatgccgccgtcttctgctaagccttgctccaaattggccaggatcttgctgcagacagtcttcaccttgtgcagtctatccagcgactcctgtgggttccccaggtactgctgaagctccgcgtgcaagatgcgcatcgagaaggggaccatggagcccctgcgcccagggtacacgtgcgggtagtactcgtaataaagatctggctgatcaagatttccgaagggttcaaat

SEQ ID NO: 159478 - DNA, 896 bp, Homo Sapiens
ttttttttttttttttttttttttttttttttttttttttttttttttttttttttttttttcagcccaagtctctttattggaaccgggccccgctggccctggctcaggcatttccatttccattagtgggaccaacccactgggtgatttgagtgttgagccgctggttggtccagtcctgccggatgtcatcaaggtggcagtcaaagtccacaaggtgctggtgggcccgatcttccagtagagctcccaccatctgccgtgactcttcccagtccctccacatcactaagttcttatccttagggacccagcggagaccttggttctccaggacgatgaccgggggcacacgaggctgaggcaccagtttctgattatccaacataataagtactgcatcagggaagaattctgcaattcgcccagcaattttcaaggccaggggcccagggctctgatcgttcacagctgcattggcatggtagtaaccagccaccaccagaccggcctgtgctccccacacatccacctggttgagggcgacctccaacatgacggacagggccaggtggctgtggaagaggggcacacagtcggtgaggcacaggcattctccagaccgcggcgctggcgccaaaaacagcccgttgactgcggcgtgtgggtaccgggcagcatgcaggcacatcttcacgtaggccagggccgagatctccacctcccccatggcgagcgaggcttcggttcggcgacaacgctaactcgactcgcaggtagcccgccggctcccggcgccctgggtcccggagtccgcccccggcccagtccaggaggaggtcccgattgcatccgagccccgccttcccgcgcccctagctggcggccgcgac

SEQ ID NO: 159479 - DNA, 860 bp, Homo Sapiens
tttggcaggttaaaactgctttattattatttttttaacatagaagaagcttggtagtggacatgtggccatttgatgtttttatgactaagagagttcaggctcaatctcttacagaatgtaaatgtacccctatgcatgcatatgtaattcttatcaaaattaagcttaatcactaaaagaagattcgctatctgaactttcttctacagttttctcactttcgccatcaggcactggagcatctggcctctcaagaagatctgggtctagtccttctgatatcattttgtttcttattgccatcactggtacacccacttgaaccattttgagatatctggcatatcttggatccttggctacagttaagatattttctgctgatacttcactttcctgtagtccagagtcttgtgtactgttctgctgtggttgctctgaagtggcttcaggatgtgctccatttgtgacactggtgacatttaaaggagatacttcaactgtgacatcatctaggcctgggatagatgacaactttgcatctaaaatattgagagttgtttcaatttgttggatacgaagtgaaaggtctgccagtttctcctcacaaactgtagaaaagcggttgaggaactgtacagtgtgcaccacaaattggtttagaaaagccaccgttcttttctgttgaatagctggcaccttggtcaggtctatgcctgaccccatgagaggaagcccgtcctcatccatctcctcagcgggcggtggaccccgagttcacccacaaacccctcccagatggggcccgcccaacccggtaatcacgtctcaactttccccccaagtgcccgcctccg

SEQ ID NO: 159480 - DNA, 1000 bp, Homo Sapiens
tttgagactgagtctcgctctgtcaccaggctggaatgcagtggcgtgatcttggctcaatgcaacctccacctcccaggttcaagcgattctctggcctcagcctcttgactagctgggactacaggtgtgtgccaccacatccagctaatttttgtatttttagtagagacggggtttcaccatgttggccaggatggtctcaacctcttgacctcgtgatccacctgcctcggtctcccaaagtggtgggattacaggcgtgagccactgtgcccagccagaaaagcatttttaatagaattttgatagctcttaactgagatcctaaatcaaggatttagaaatgaggtatcataaagaatagtaagattttaaagctctcaaaattacatatgatacaaataaagattgtaacagtatttaatcattgtttcaaactttattacttaatgaaacagtttctatatactgcttccaattactttaatccttttttctcgttaaattttttttgttgttcttcagttgagctgagatacttttaattactttttattaactgcttccagaaaccgtaacaggtgcaggaatagattgatgatatccaagtagaggctgatggcagctaatacgtactcttcaggtgacagtttatgcatcagtgagtgtgtgtcatagatgatgaatccacagaaaagaagggctcctgcagcggctaagaccaactccattatctcactataaaaaaaaaacttcaagaatcctgacaggcacaatatccacaaaagagcaaacagccctgctccaaatttgctgaaatccttcttagattgtagagtatacacagtcaaaccaaaaaatactgtagtagtcagtatgaaagcttgcagaataatatatacatcatagaaagtaacaacaactgccacagtcagagcttccaacagcgtaaatccaaaaagtaggtacaggttaaggggatacttatgtctgttta

SEQ ID NO: 159481 - DNA, 1000 bp, Homo Sapiens
tttgcaagacaaaatatactttattgtgacagcaaatgcacatagtgctgtaggtaaggcatgctactaggaatctgcatataatcaaaagccagtatggaaatgaatggaaatgaatgctgttgttctcagattgagtccatggtggagaaaggatagtttgtgtccacttatttcaaatgcagtatcatacctacttaatcagttacctatgcttctaaccaacagcccagtggcaaataggaggaacttaactgtactcagaagtcacttttaatatcaacgacagaaatatttcactaattcaactgaggcaaatttcctttctagacaaaggacctagaaattgagcatgcaaaacatccatccattcattcattcaaataattagccaattttaccgtcatttaattccaccagaagcaaatactagaatatctagaagtagtttgggtaaagaaacatttacattttaatattgtgtaatgtcataaatttggggctaaaataacaccaggtcaaatttgatccctttgtatgtgagggtacaaagtacagttttcgtttcaacagctgaacttctgagagaagagctgaaaaaaatgctaaataagagatctaggcctttgatggaaactattaggctctacagacttgtcaaaaaatcaatgcaaaactgagggggaaaggctgaaatgctttgtaaagcagtatttttagacaagttgcttcatttcccccttttctaaaacagatgcagattaaatgtttttttgcatgaatgcacattgacattctgttcaactgttttctaaatgcaacactgcgggtttcaacagtatgctttcatttaaacaaagaatattatatgcatggtcaatttagtttaagagatgaaaaaaaactttactactatgaaaattgcttatcaaatactctcctcttttataaggtgtttttaaaagcaacacaggaccaaaagcatccaactattacttta

SEQ ID NO: 159482 - DNA, 1000 bp, Homo Sapiens
gctgcgaacaatttttgctttaatatatgaattacattaatacctcacgttacatatatgaagccaaattacactaacttagtttgcttacaacctcaaatcttactcccagtacacatcccaataaatttattctgtaaaaacaatacatttttttgtttttgatttttttacagtaaacttttcaactacaaaccgtgaatacgcgaaagatgttccaaggacaagcattaacaggattgataaaacccaaactgactaaatgtgttctcacaatataagctggcataaaaataaataaaattctctattatcacaatagcaacaataatgtacacataataatggtttaaggatgaatattaactattctaattgtagttccaaaagaaaacagtttattttaaaagtctacatttaaaagtcaatgctttgtctggtttcccatagggctgttgctgattccagctttaaaatgtaaagtatccaccttgagtgcttagctcaaaattgtattggcactgggaaaaaaataaatcattgcctttattttggagtaacacaaaaagactcactaacttcacatatagaaacttagtttgtgtacataacaatatgaattttgagaagtataagctgtcaactagctatttctaatacggaatagatattttacaatatggttaaactttacacatggcctcaaaactgaaggacaattttaatttcgtcttcaatataccaacgttatgtatttaggaattaattcctgggttctgtcacagagaggaaattccattcttaagcattatgttgagtggtcatctaaaaaatgttaatttatatttaactgagtgtttgatgatggtggggtcaaggcaggaaaacgatgatcataactgccttgataaaaggatcctagacatgtataagtctgcgcaaaaatcttgataatccttagtggttaagggcaacttcatgcaaccaaataacatgaaat

SEQ ID NO: 159483 - DNA, 1000 bp, Homo Sapiens
ttttttgctatgtgttcaaaaaaatgttttttttattgaattgaatgggagctaaagtaggataaagtggagccaaattataaataggaatataggtaggagttcattcattcagtaaatatttattgaatgcttattgtgtccaggccctgttctcagctcttagaatacatccatgaacaaaccagataaaaacttctgcccttgcgcagcttatactctagatcgtaagggatgggattagcaataaatttacataaattcaaccatacctactggaaaaagacacatgcatggaaattattaatgctataagaatctcttgatatgcagtttgtatttttgtacttaatataagcataatatattcatacctacatatcactccacagggatttaaactttaagactacaaagagaaatttattggtaatttaggagattttcaaggaccattctgagcatgctcaattttgtccttaggcacggtctttaaaacctaaccaccttacaagttgtgactccactgtaccaaaatgaagactctgagacttttgggcaaaagaaccattttaagtatttgagtatgagaaagatgacaggatgaatccacattctctcagattaatctggtaacaaggaacaagaaagagtacattcatctgaatatacatggtcaggtaacagtggaattcacatcaagaattttttaaaaaaagaaaccagttcatgacatgtcccattgttttaagacaactaaaacagtaagagctcaatgtcataagtatttataagcaactcttaattataaaatccaaaggaaaaattcttaacataactggctttagtatgattaaaggtttctcatttgcatatatgtttcagagtatttaaaaagaatgccaagaaaaatcatttttaaattttgcaataattttactctatatacattgataccaatcatttaaccctgaaaacacagtcttcactaacacaatgt

SEQ ID NO: 159484 - DNA, 1000 bp, Homo Sapiens
tttttttactttcaaaaaaaatttattcaatgaatacacaatataattccatttcgagtgattaaaacctatttgttgtttagaaccaaacaaaactacaagaaaacattttcaaaaccttttttttcaggctgaagaaatcgtttaatccattttaaagaaatctcacatgatgttctgtcgggattaaaaatatacacggaaaaaaataaaacaaaatatatacacagaaagaagctcgcacagagtcaggcgtgcagcaacgtcacacactcattcctttctgtttcctctggacactcaaaatgtgaaagcaagtaagaggggggtggttaaccaaaccttttggtccaaggaataaaatttctttaaaaaatttaaaacgtcaaaacctgccagaataagacaatagaagagcgtatcgtcaggcgctgggaatggcaccacgacaaggcattaatgtggattcacttgcacagctgctctcataaaagctacacgattcagaggtaaccctaactatccgcaatcccaaccaaagtcatgttcatgccgctgtcctagtctggacaatcatctgtcactcatccaacacagttatatacagaatgcgcagtcccagcaacagtgtagattacagcaggcgttctctacctggactcatgattggatttcatttctaaattacatcagagctttcaaagattgaaatacacaaatctgcactacccaagcctccttgcctgtacgggaaacaaatcagaagagcatttattgggaactgacacgtcaggcctcacaggtgctgggcaggaatcacagaggcttgctctgcatcatgtcttccgttaacctgaagctttgggtttattgtgtttggcaaaccactcgtcacttttatctgctgacattgcatcatccaacaatttgcttccctctggatccatcttagaaagttctcgaaatgcttcatccccgacaaagcaaatttcatgtccgt

SEQ ID NO: 159485 - DNA, 1000 bp, Homo Sapiens
tttttttttatttgtcaaatatttattgatgttaaatccacattacaccagcacaacaatccaaagtagtatgattgattgatagtacttttttttataaatacaatataaaggtggcaaaataatgctagttaatcccaaacccagcaaatcagcaaaaaaaggtcacattcagaaaaatttgccaagtaagacataagtcataattctacaatagagataggtccatgagagactgtgtatggtatcttaaattccatactagcaatgcatataagtgcggtcaaagaaacttgaaccacactgcatagaacatctgccacccggtgctcaagcctattaatcacttaaaccttggttggttggtgttcttacaaagaagtagaaagctgtacatgtgaaacagtaatatgaaatatatggggtggtacacagatataaaattattttaaaaaatattacgtatgaattgagtaactgagctaagagaggccacttataaataatgaaagatacatgtgttttgcataaggaatacagtgttttcttttcatagcaaagtaccattaaagcctcatgttttatactactaggtcaaattattttttctcctttttaaaatttatcggttccgacttaaaaccatcaagtctggtcagaatcaactcagtctagctgatgcaaaatcatatgcattcaaaaagcagtctttaccgagatgcctttacaaaccttggaatccagcaccttcttaaggcaaagtttcatggcagcagggaagtgaactaataattttcatttaccacatcttggtgtctttgaaaaaatactttatggcacaaacctgtttttgtctctccttatgtctccacttccttcaagtagactagatgctacaggcaatttctcatttatgccaccatgcagtctcaatccattttcaacttgctctacatacctaaaatcttccactactacacaaacctcagacacactgcaa

SEQ ID NO: 159486 - DNA, 1000 bp, Homo Sapiens
ttttttttttttcctttttttaaaaagaaagagaggaaaaaaaaagaaaaaagtgtttattataggcaacaacaccaatgggaactggtatttgtctacaccaagggagtgcaatttttcatcttccaatggcggcctcaaccttgaggcgaatccactggcgaaagatgcctttctaggaagcagagctccctgactgggctaagatagttcagattgatcttaggtcaatggtaagacctatgtagttcatgaagtcttggcttttcggcgctgggtcgcccaaagcagaatggagacggatagagtggtggctcccagaatcccgaagaacataagcagtgagaacgagccctggcgcatacacttgtatccatggaaaccatcagcacaaacacactgcaaaagacctggaccatcaggtacacaagatccattctcaggacacatttctgggtccccagtgttattgcaaaggttcttttgcccttgacagatttggttgtctatataagaggtgatagtattccaggcattaattcctccaggacagttgacatgttgtggcagtatcagagtctggagctgagtaaagccacggaaggtgttggccaagtcacctttgagggggtttgcttgcaggtctatgatgacagtggtatgtgcctgatgaaagtttggaccagggtcctccagagaacagttctggagatccagccccaagatggtgcccttctgattcaggcagcaacgggcatgcagcattagctctcgtgtcgttttacaataaaaggccacttttgacaaattttgcacgctccctggacattgggtgcatatctggctgggcagggtcgggaagcgtcagggacgaaatcagaaccgcaggcccgccgaggagaagggggagccgctggcgagcgcgacgcacggctggccagcgaccctgcttcagcccgacctcaaacttgcttctgtacctcgggtagcgccagagccc

SEQ ID NO: 159487 - DNA, 1000 bp, Homo Sapiens
ttttttttttttttttttttttctggctccaaagatcctttactgagatccacttgaaacacttcggtccttaacttgttaactgagttgacaggctgatggctgatctaggtaaaggtttcacggtagcaaaaacacttcctgcctataatacatcaaaacaggttcctgaatgtgtgtgaatatcatcaaggtctctgtcccatcttcttcagggttcgattaagctcctcaaatttgtggatctgacggatgaagaaatccccataacgcctggcgaccttggtgtccgcgatgtggatcatgtccttatcaatgtagaagtcaacctctgaggctgactgaaattcaccatccagggctgagataccgctggtccacacgaggttcttcatcttgtgtttgaagacaagaagctggatccggaactcctgctctgtgaggtccaggaagccagccagcttggccacaggcatggtggtgtagagcttcaggaagctgcggatggttgaaagctgggcctgctgctgtacttcatcagaaaacaccttcagctgctgcaggaagggctctttgtggtagttggggtgcacattatcatagttgggcactacaggcgacaggaacttggggcaggagtaactgaaaagttcttcatagacttgtgggtcacctttctgcatgcgcaacatcttgtccccatatttctcccgcagctggaggtgaatgctctcatcaatacgcatggggtacatcgtgagggcaatggccagcagcgcatgcatctgctcattctgcttgttaatcatctcatacttgtacgtggtcctctggaacatgctcttggtcctctggatgtagaggaggatgttggcgaagacccggatggcatcctggtaacgacgcatcatcaaatatgcaaacccaacataatagtatgtggtgacctggcactctggcacacgggaatacatactcttcttgttcagttcgatgttct

SEQ ID NO: 159488 - DNA, 1000 bp, Homo Sapiens
ttttttttttttgacttagaaatttaactttatttacaaatgttctcctataaacaaagatgccattctacacctttaaaatattgtaactgataatttccataaaaaccatttacatagtttcaacctttctgcataaaactgtattatgagataggcaaacaatctcacaagatggtctgagacataaaaacaaaagacaacctatccagcatcaatgtcctattgacaaactcaatgaagaattaagaatcacactccacaatgtgctgctccaccaagaaatagaaatgtaatgattttttgaaaggtaaatgcttcacaataaacagtcttcttgggtagtacagtgtaattgtgattgtttaggactgctcttgtgggctaatatttacgctgttgttttttttaaatcatcattgtaaaaagggcagacttatagatttttctgacaatgaaaatctgtagacactggtctggtctcatcattcaggcaaattaataaaataacaagtgcatggaaagaatgttaaacaaaaacataatcatcatgtgactgacagaattctccctgaaatcagagaatattaatactcaatagtatgtataaatttgaatttatagctgagacaatagacaaaataattaaccaaggagcttaaaataaaattattcaaattacctatttatcattttatgtgcagtaattactttttaaaaatccttttaattttatctagggataaccactcacatcatggctaagttgcaaggaacttcaaaactttgaaaaagaatttcatccctgagaagtgagagatagaaaaatatctaaaaaaagagaagcaacagtcttgcacccttttaacaatctcaccacagcatgaactactattaacactgagcaatcagatattccagtcctggagagttactgcctttcatgatctgatcttttgtaatgaaactacaagtgcaacattaaaaaaaaaaacagata

SEQ ID NO: 159489 - DNA, 1000 bp, Homo Sapiens
ttttttttttttttttaacaatgttgaaattttatttctgaaatgtttcttttaatcaatacatattaagtatataatttccttaaaaattaacaaataactctgattttcactgttaggacactgttacagagaaggaaacatattgctcttctaacttttcttctttttacatttatccacattccaagtagattatcatagtaaggttcttctgtgttacttttgtccaagttgtgacaactgttttatgaactgtgtagcattaaaaagctcactgcagccatataaaatgtgtttgccttgtttcccctttatgtagtcaacaagattctgatattcaatgtagttgcctcctcccaccacaaaaacaatggcctcttggaatggatttttatttctgggaactgagctgtcattgccccgcagcattttgggatcaaaatatctatagtcatcagtttcggggtttgacttcatctccataagattgtccaaaatacgagtaacaggtagattttgctgtttcaaaaccaggttcttcactccttccatcacaaactgtgatcctgtattcatgactcgtgataaaagacccattggtttagtggtagtgctgccatagctggccggagctgaggccatcttggtaaaagccttccactgtttgatatattgtaaaggattaaggttgcatcctgcatcagttaaagcttttttatattgctccaaatcagcctcagaaggtgcttgctgtgtgcttatataatagataagaaacaacctcattttatcttctggagttcctgcatcagggtctgatattatatctagaagagatttatccagagtagttttgctcattattttttcttcatattcaaaatatacatccaattttcttgcctttatatgttctaaaacagcagtggcaacatttgtatggagatcaataagtctttttttctcaaggagttctggcaaagaactaacagctgat

SEQ ID NO: 159490 - DNA, 1000 bp, Homo Sapiens
ttttttttttttttttttttttttttttttttaaatttgaatatgattttactgaagcatacatcatttcaaagcaaaagtagtttatgttgtcaattctaacatataatacatttaagtcattatatgaatttcattttttgtgtatttcactgtagtgctgtgacaacaaaatgacatctgtgtaccagagcatacatatatcaacagtaagatgtaatttttcattacatcactgctagaatatttagctttgtgtaggagacataagcaggtaagatggccacaccaaataattttctgtttttttccttagataattttttatcagtaatactttatcaacctcactgttaacagaactgtaaattatctgggtgatggggtgtgtggagaagatcatctgtgttatactgtaatagttgctagagtaatctcacacacaccaataaggaactgtcaccataattaagggctagttactgttgttagttgtacaatgatgaagttcttttgaaaatattggttagcccacttatatgtgaaaaatgccctttccacttatacacaagaaaaaaatattcagaaagttatttttggccttgctatgtcaaaaagtcaactgtacaaagatctacgtgttaaacctaaaattatgattttaaaagtctattaaaaacaagaatgtcatgcatttttattatcaattatgcagaggctttaaaactgttgcaagaccatatagtatatattagcttttatactgctaatgcacaactaacagcaaacttgattagattaacagaactctgtcttaattacacctttatatatcacactagagacaaatgccacaagatctgcagaaacattcagttctgagcactcgaatggcaggataactttttgtgttgtaatccttcacatatagaaaaacaaactctgcagtctcacgttacaaaaaaacgtactgctgtaaaatattaagaaggggtaaagg

SEQ ID NO: 159491 - DNA, 1000 bp, Homo Sapiens
ttcagggtggctttgtctttattagtcagcatttgcatctaggaaaagtttcacatgattaaatcaagagatgcaatacactcaggcttttcatgaaattgacatcattattacaaatggtgctcatttgaggcaactgtgacattatgcaatgagaaacatctgtccccttccctctcaggtccccatggtggcctaggttcatgattacagccacctttaggattaaatacacaaaagccttactctatatatgcccctttgactttaacatatttctcaaaaagaagtgcaataaacttttattctttcttgattagatggagttacaattgccaaaataaaaatccaaggtccaattctggttttaaaactagaaaaggaaaaaatgttattatcagtaatgactttgggaagaattctttaacacacagtgagggtgagttcttttggaaacaactgtattctatgtttatacatatttatatataaaaggtgtcctcattgggggaggggggtgctgatgccaccaagttcctttgaagccttttctcccccactgccaatgcccgaggggaaggagtcttcaatggcggctcaatctagctcttgcgtttagacttggatctcattccaatttaggcttttctttctcttcttccatacttttctgtgtatcccagatatagttgttcagaacttctcccagcaggtacaggaagttcattaagatggttgtagacccaaagaagatgattctggctcctgggccaatgtgttccaggaaagggtacacccacatgccagttacatgatgcacccagcacacccataatatatagccaacagagaaggtacatatggcggtaagtccgctgctcctgctgggatactgatggtgcgatgtcctcatctcgattaatataaagggcagaaccgtcgtgtgcattccgtgattcagccaccctgggataaaattatccagcagcttcgggtatat

SEQ ID NO: 159492 - DNA, 1000 bp, Homo Sapiens
ttttttttttttttttttttttttttttttttttttttttttttttttttttttttttttttttttttccaataaagcagtttattttctgagagcccgtgccctgtcccatcccgccccacgagcccatccaggagccacacaccctgcctgggctgtgagcactattctcctggtgacacggcgctcagcccgagggacctgggacaagagctgctctgtcctgcttggtggctctcagaggagagccttgggggctctgagcagcaggtacaccgtcctcccctcctgccagcctggttctgccctcactggaagagtcaaccccgccagcagcgcccacagccccagccccacgtccaggctgccatgtcccggcgggcagtgcccaggcccagtgtatttttagcggactggctgcactataaatagcggcaggccgggccttcctgcatctgcactctccgtaccggatgcggccgaagacctggcctcgctacaaagcctggctctgctgctccaggccgctgctcagccgcctgccttgctgtcggcgagggtggtcctggggaggcctccagggactagggagacgcgggtgggaggagcctgttcttgagtctctgcagaagcagcagggccctcagtgccagcgtcctgcagtcctcgtccgggtctttctcagccacgtccgccagccaggaccgggcttccagcagctcgtccatcaggtcctccagcaggcgcgcagcaggcaggctgagcaggacggaggagacggccgacaacagcccctggcgcacgtaggcatcgatgtggaagcgaagggcccacacgaattccagcagggccttgcccatggccacagccaccgtggtgttaacagccaggcacatcagggcccctaaggtgtgcgccagccttccgagaaccagctggtcttctcccaagaggtcgaaggtcaccagaggcctgtcaaagcgctgaaggagggggaaga

SEQ ID NO: 159493 - DNA, 1000 bp, Homo Sapiens
tttttttttttttttttttttttagttagtgaaaatatatatttgccaccagaattcactgggaccccagagccagcagatgtggttggaaagatcctctgctctgtcctctggcctcctgctgcatctgggccatcagttggactggaggagctggacgggcacatagttttcctcagaggcaccatcctcatcctccttgggaggggaagccaggacagggttctcgagagttcgagggacacctgcccctgacgggtcctcacacagcgtaggcagcgtctgctcccatgaagcccagttcacctcctccaccctgaagcaccagcgctcatcggggctgccatctggcttagtgccaacggtcagcatcacacctgcccgctgcttcttcctgcaccaccaatagccattctccatctccaggacagagatggctttctgcagcttccagatgctccagctgtcagtggcgacactgttgacggtctcgctcatgagggcgatgagcatgttgagcagcaggatgtaggtgagcagcacgtaggccagcagcagcagcagcaccatgccgcggaagtgcagctgctcctggaaggccagctcgcccatgccgatggtgaatttgaagagctccaaggaggcttccaggatacccctgtactgggccccgttgccctcgtcctcctgtccctccatgggctgcactgactctgtggcattggggcctgtaggagcttcggggcgccaagcctcctggctcaggctcaccagggctacagcgaagccgaaaaggaagactaagtagatcagaaggaagcgcagcaggtcccgcaggatgaccttctggatcatgacactgtagatgcctgtgtgctggaagccacgtgtatagtaaagcaggttcagccagcccagcaccagcgcagacacaagcaggggcaggtaccactcgatggccaggaaacacagcacctgggacaccactgtgagcagggcc

SEQ ID NO: 159494 - DNA, 1000 bp, Homo Sapiens
tttttttttttttttttgacataatcatttttatttgatttaattgataaataaatacaagagaactgttgtgaaaccactggcaatatagtaaattttaaagattttatttcaacttcactcacttatatttcttggaatggggatatatacattattcaccaataaatgctaatgctttaaatttacaattaccctatttgtagaaacctgaagatcattccaattaaatgaaaaaaaattgtacaaaaacgttcttttgctcttacaattcaaaatacattcaaattcacattcttacagcagccaaaacctttaacccaaaattcagaactgcagtcctacaagtgaacaaactagtgttttaatttaattatcatgattgttgttaacactgaaaaaaaaacatggtggctcctgaaacaagacaggttagcaactggtacagctttcccttctgggcactcaaagctttgcccttgattattatttttatttcatcttttcaaacacagacaattgctccaacttgaaagtttcaatggaattttggcatttaatattgctaatgcttgctaagatttaagatctcccaatgatgagaatcagaaaatgacgcacgactaaattaaaatcatcctaaaagacttactacatagtggtatctggtattcaatatcaatagtgtttttgaattacatgatatgtttttcacaaacatagcacctcatcaaatatctggtaaacactttgcaatcacaataagtgttgggagaccaagttccaaagacaattatgtgattcacttaaaggtaacattgtaagacaagtctcaggcataatgaagattaggaatgcagtctgctggttcccatgatctaaagggatgctcacctatatgggcaccatcctattaagacgtggtaatatgtttccaaaccaaaaaaagtcggtaagtgttaaaatggactcctgctttataaatgatctgttaaatgta

SEQ ID NO: 159495 - DNA, 598 bp, Homo Sapiens
tttttttttttttttttttgataaaaatccttttaataaagtatatcagtgacaacttcctgtttaaatatattgttaaaaaatcatgcaagagcattttgttatcattatgaggaaagatttgagactactgttccttctgcagaaacgctatgcacagatgcaaaatgatcaaaggctgatacaataatgaatctcaagtaagtagcggagccatcatgtgccacaatttcttcattttgaagctgcccctctgtgtgtaccaaatctttttcaatccattgctcaaaatcaactggctctttagacgtgttttttcaatcttcaaggtctgtacaaagtaactttggattacaagcctttcaatccttacatgtttgtggaaacaaataatgaattcctggggaaacattcctgtggtggtccaaaacgtttctggattcccatcaatgatattttcaggtgggtgtttttcatcacttgatgtagctaaaatcacttcggacccttcagagctcagacagagatcaatttttctcatcttaaagtgtttaacctgggactcccgttagctctgggcgccggaccttccgggctc

SEQ ID NO: 159496 - DNA, 1000 bp, Homo Sapiens
tgattctttttaagattgaaacagactattacaacaatatttgagatttcacagagaactgcatgcttttgttattaaaagacttttgttgaaaaatttgacctttacctcttatgaacgaaagaaatatagaggtttcaagcatttttgccagcacagagtcattcacaacaaccttctagatgcttattttccaccttttcctacagaaggtaatattcagttaccagaaggccatctccaccactgaatgattcaaagcttcagagctcaaaagtgatcagaactcacaaattagcataattagtccaaagcttgatttaaatgtttgaagaacagcaaacatcaaataatataataccaaatagaatattatagtctctatgaggtaataactcatcagctacaaccacctaaaactgaaattttctgtacttagtttctattagtacaacaccttcattcttaatgcttcttagggcatcacaggttttagaaattaatgtatttttagcattccacagtaatgatcactttcaaaaactgcaatatacatctgcatgttacactgacatacaacacataagtattttgtcacacatcaacttttagcctcaaataatagaatacaaaaagctacactggacataacaccacagaacttttgaatatccccttttcccaattgttaacaggtagtactttttttctaaagagaaagtgatgaaaaatccaaaatttctgcatccagtgtttgactccaactttctactttatcgtctcctggtaccaccatatcctgatgcagttctggttttcgtgtctgagtttgaacataccgaatagctgcccgagcctccatgaaggggtgagtaagccctattccacgtgccagggtaggagggaggataggacgggtagtaccacgagtctgagaagggtgttgccgctctattgctgccaaacaaatatcctagtattccaccagttcccaagcctg

SEQ ID NO: 159497 - DNA, 1000 bp, Homo Sapiens
gatgataaatattagtgttatttatgcacatatgaattctagcaaagccagtaacagaaattaacaaccaattccaattccaatatcaatgtataagcatgcaataaataagctactttctaattattttagttggcattttaagaaaaaaaaaagagaaagaaaaaaaagacgctaaaccaagttttcaattacaacattaaaggaacagttacataaccttttgtttaacttctctctggttctgtttctgagaataaatacatttctgaaaaatgttgacctgacatcaaatttaacagaagtattaataaattgggaccatatgttagactcaagtagaaaacaggttttgttttcctcagagattaatgaacgttccccctcccccgccctgccaaagcccactaaattaaggtatatcactaaagtagaacataataaatggtatatatacatgttaacacatttatagcttaaagatagctataattaatttgcttaactctgactaatatttttaagaaagaaaaagcggaatgatcagtctcattatcaaatattcagcacagccctgatgagataatggtggacataaacatcttttgtaagaatatcaaacaggaaaatttctcactggcagaattttagctgttacgtatctttagatatgtcattaaaaatctgtgctacctgggttacccgaattaccagcctgattcaaatatgttgctagctaaaaaactaataagcaagcacatattggctctgaattctaaatgtgcctattttatttttgttcacgaaggaaatatccaaaataactgcaaaggatggttagtgaatctttaagatttgtaacttgaaatatctgtttattacaggggaaacactagaaattcccgatacagtaatgggccttactttattagcagcaggaacaagcataccagacacaattgcaagtgtgttggttgcaagaaaaggtaagaactaggtc

SEQ ID NO: 159498 - DNA, 1000 bp, Homo Sapiens
ttttttttttgataattacatatttaatacgtgttgcttttaacagcaatttttaaagtaaacacatcatagaccttataacttattaaagattttatagtgcttacaaagttgattctaaaaaatataccttatttgttctaaatgaataacattatctggaagatataataataaattatagtagtatgttttccaccacgatagttaagattgtgtacacatattcaatatgaaatcctcttaggattttcacaccttcagcctgaaaacataaaagcagattaaagtttggcatacaagatctcagtctgatagtaattgctttaaaactcaaagtgtaaaaatatctacttgacattctaggaaagcatggccacatgcacagacacattctctcactcactccaacacacacgtgtgcacacatactcacaccccagagtactcagaagatcttgcccttgtggatcagacaactgccaccaatttcaaaaactaatggaaaaaattagctaagaatatgtttaaaccatacttaagaggtgctggttgccattaagatctttaacatgcagagaatgccatctcaatacactcttaaacagacttgaactattcactaatggatacacgaatacataagaaattatgtattcatccacccccaagactgcatgtaagatgaaaaacctaggcattccaccaacgagtcatatgactgaacccagctaaagctacagtggtttgcttcacagaacccaatagaagacagaacccaacagatttagaaacctcattgtgatctgtttggagtttcctatatgctccatgtgcaaaagcaatgagattctgtattgcagatgacagctaatatcactttgcacttttgtgacactgcaagaggtcactgtatttccaaaacatgtatttattctaattaaatcctctaatgttccttacttttaattatatatactgttccaaatttagaaccaaa

SEQ ID NO: 159499 - DNA, 1000 bp, Homo Sapiens
tttttttgaatttaatcaacgtgttcacacacagcatttattttgtaagattaatttttacaaaccatccacaacttgttcaaacctttggctttatcctatctaatttcaaacaaatgcccagccttaatttattacaattatgattcgtagactttcactcaattacataaattcactctcggttgaggaaaagagagaggtggcagaggattaatccaaaggatcctggtgtccactacccttcaaagccagaccctggtggggcaagtcctgccaagtcatcaggtgctgattaaatgcagggcactgggtgggaagcaaattcctaaaatgtggttctttcccagaagcatcttataatctagctcaggggcttgcagctccaactcactccggaatcacctgggagcttctgaaaccattctgatcctgaactccaccctaaataaatcaaaactcttggtccataaactgaaaaaaaaaagtttaatctccacaggacattctaatgggcagccagagaggagatccactgatctaggtttttcataaattacttaaaaatttgcaaattataaaatatttcattaaagtatgaaaatctgaatcagttttgggggatttttttgggggggaggtggtaaaagaccttaaggaaaaggttgtaattcaatttcacaaataatccacaacttagtacatcctttgatggaagcaacacccccgtcttagtctgttcaggctgctataacaaaataccacagtctgggtggcttataaacatcaaacatttattgctcacagtcctagaggctgggaagtccgtgatcaaagtgctggctgattttgcttgtgaagggtctgcttcctcagagaagtctcatacttccccttgaagtctcacactgtggagaggatgaggtatctctctagggcctttcataaggcactgatcccattcatgagggctccactctcatgacctcacacttcccaa

SEQ ID NO: 159500 - DNA, 1000 bp, Homo Sapiens
ttttttttttttttttttttttttttttttatgacacaaaaattttattgacagaaatcaacgtatttatggaaagagaatataaaaggtatctgattcgaataatggtgcccatttagcactcattacaattattttattcaagacctgattctgtctcccaaactataaagtgaatcattattaatttgcagtataaagaaaaacacacaaaaacctggactattattaaatcattaaactgagagagaaactgaagttgacagagaagctcagactggaattaactgataccatactactcactattttacatttccttcctatattatttccgaagcaaaatatactcatcatattcaaataaaaatgccatagtgtatttgattgtatatggctattttcttaattttattcatgtaattaccaaagctctgtattctactaaggtacacatcttatcttgtatccatggacgctccttgatacattatggtatcatccagcaagtaaaaacttagcaggacaggcaagaaagcaacactatgacagtaaaaacaatatggtattcacttttgtttcctttaaagggaaagtgttcttaataattactgttggctcacagaactaaagaaagtatattagaacctcagtattcttaacaatgatctctattggttgttatttgtctaagaagtgataagccatataatttacagaaagcaagtcactgaatccttcagaaaacacaacctggcaatgtatcttcaatgcaaaataatgaggtggcaggagcgtgatgaaaaaaacagtcttcgaaaacatcatgtaagggaatccagctgtgcttgtatagtctctagcttgttatagaaatcaaacaactccttgtgactgaattccacaagaactttctccaggctctttgaatcttcattgttcactccgagttgtaacacagcttgaggagattttagttttgcttgagcagagtgagcca

SEQ ID NO: 159501 - DNA, 870 bp, Homo Sapiens
ttttttttttttttttttttttttttttttcagagtgaaaaactttattaacaacaggtttcaacgagaaagcaaatgaatacccctagaaacatggacagcatctcccccagcagcaggcaggggaagggaggcaggaggggtaagcctagggtgttccctaggaaagggccaggttccctctatccagctgggggcaccgagacggcctcattcagggaagtccaggatggcagctgaaggcagcaggtttagcagccaaagcccaggcctagtggatagacagggtccaaaatgtgacccttctaggctggtatcaccatgggggcgtcatgggctgaggattctgcagataggacatcaccacggcagagatggacagcatgaagctactcatcatttgcttcgtgtcctccgagctccgagagttggcaaagctgatgaaggagcagtagacagcgacccaagcacaccacttcagcttaagcatgaggccgcacatgctgaagatcatgcccagcaggttcatgtagtccggcgtcgggtcgtccaaggccgggttacattcgctcggcgggggcttgtacctcagcactttgttcggcctccgtgggtccgacatattgttagtggacatagcgagtcgaaggccagatcacgcctcttccgctgcaggaatcgcagcttccggcgtgcaagctgagggcggattttagagtaacacccgaggccctcgcatttccgttcctcatgacagaggcttggactccccttacccagagaacggagatttaggagaagccagaagtcttcctttcaaagggaaaatggggaaaagaacctgaaagcgggcttcaatagttccaacct

SEQ ID NO: 159502 - DNA, 1000 bp, Homo Sapiens
ttttttttttttttttttttttttttttttttaaaggttgggagatatttattttctttaaacaaggtcataaataacaaaaaacaaagtaggtcccagactccggaccatgcagcaggacaggggtgggaggttgttgagtggaaaggtggagggggctacacatcacctaagacagtcacagaaaagatgggcttcaggacactgccccttcctgcccttggaaatggcgtgcctgggcaatagggacaggccacagtgctgtgtcgaggcagctggaagaaggcaaagactggggatgccaggctgtaatgtttctgtgtggagtgatgtgaaatccacaaatggcaaagagaagctgtaggtttgaagaggcaagggggcactgcacacctccaggaaccagttatgaaaatggttaaatttgatgattaaaaacaattccataggctttggcctgtggctttgtgcatgggctgtatttaacctgggttgctctgtggcaggtgagggcgcaggaggcccctggagcagcctggcctcagcccagggcaggtgcccagacatgtgggagtgggacagtgggctctcccagatgggaggccatgtgcttggaccggctggacctgattttcaggctcgtttcttgtgatgctatccaccaccaccgctcgctatggctaaggatgggatcttggcctctctgggtcttccaaacctggaagagtacgactgggataaaacggtacctgactagtgttttatttgaaagggaaaaataaagaccaccccatgcattgtccatcccatgaggcagggctgggccatgccaagacaatctcaaggaatggaggtccctgagcctgggaagacatttgaactcagatgtatcgcctgatgctaggaagaggggctcagtatggcaaatctggaggctttaccctaggcaacgcagggagagcaggcaggagctaccccagtacagggaagggaaaggagc

SEQ ID NO: 159503 - DNA, 1000 bp, Homo Sapiens
cacatgtgtaacatttattatattaatacttaacaaagccctccaagacccaggctccccctaccccctaccttgggccacgtcttcatcttagtctttggagagaaagctctgaagtcaagtggtgagttttccagaacaagtggaggggcacagggaaggctctgagcaccaccttccccagaacacctcaagctctgccctggccccaggaatagaggtttctgccattcctgaaggtagagaaggtctgggatctgctcatcagtttgtaaacaaatgattcttctccttgacacattctgttctctgctctggccaaagctctgggccctgagacccagtgagatcctggtagctgtccaggctgagagggaggcagcctgcagcctcgtctgtcaccaggtccccttggagttgggaacaccgacgtcctgagacttagtaagaagagtctgaggggctactcctctctccccgtggccccagttactgggtgttctcgtatttcaggtatctaatcagcctgcctgggagcggcaaggtgtctaggagttttatacggtatttcccaatggcctttcgaacccgcagtcggcaaaggtgagccagaggtcttggaggttctgccttctccttgatgacggcccagtcctcaaagctgtcgatgtgttccttcagccgcgagcagagctgcacgttgcccacgtagtccaggaggacatcgatgatgggccccgcccagcggctcacctctggggcagatacgaactcacagaactgcaccacgctgggctccttgtcggccgcgggcgcgtcgttgaacctgctggagggctgcggggccggcgggtgcgggccgttgccgtagaggcatgagaagcagggctcgccgtcgcagcccaggtccatgaggaacttgagcagcgacaggcacttcatggcgaacatgatggtggcggggaaggcggtggggtgcgtggcgatataggcgtcgatg

SEQ ID NO: 159504 - DNA, 1000 bp, Homo Sapiens
tttttttttttttttttttttgtaaacaatgctttatgggggtagggtgggtgctggacaggcctccaggtaataaataacaggtactagcaacagcagggccagatggggagttggggacaaatgaccctggtctcaggctttgggagctcttgggatatggttaggggttcagggggacagacgttagccaagacagaggaagcagcagcaggtacgggattcccccttcccccgtggctcagtcttgccccaaagccaggccccaccaggccagggaagggggacaggtggcaacgtagcttctccggggccagggcaggttaggacacggcctctcagagcctgggcctgggccccagcagggctggtcctggagaacaggtgagctggctccacagagctcagcagccacacggctgaggggccacggcctgggcactccgaggctgccgaagctggcggagggacgcatccccgtactgaatgccagagcccatcctctccgggtctagctcgcctgagtcaatcttgttgaggatagtgcgggcacacttgaggaacgcctcctccacgttctcgcctgtgagagcgctggtctccaggaacatcagctcattctcctgggcaaagcgggaggcctccaggaaagtgacctcccgctcagggtccaggtccttcttgttgccacagaggatgaccacgatgttggggctggccagggtgcgggcatccgtcagccaggcagccagtgagttgtatgtctcccggctggtgatgtcgtacaccagcagggctccagccgcccctcggtaataactccgcgtcactgaccgaaaccgctcctggccagccgtgtcccaaatctgtagcttcacagtcttcccacccacgttgaccacccgggatccaaactccacgccgattgtgtggttggagtcctgtttgaacttattctcaatgaactgatgaaggagacatgatttgccagttcctgcac

SEQ ID NO: 159505 - DNA, 1000 bp, Homo Sapiens
ctgcaaagatgtttaatgcacttagattacagagaggaagagggggcaagaaggaaacgacatctaagtgagtcacccaaaaattcttacaaaagtcccaggctggctgcagccccaggaaccgagtcgccactgacattaaaaactaatataaaattttacaaaaatctgcttgtcgcagcattcaggtacttgtacaaaaggaggggtctccctacagggctcctgacttgtaacagggacccaggcacctcacctggcatggatgtcctagaagccagaaagggaagaccagacacaaaaatacagtaaaggaaattctctactggtcagccccataggggcaccgaccttcaggttttctccctgcttgcaactcaatccgaaaccccagtcccaagaccctgtgtctatttttaaaaatgctctagcccttttagactctccccttggcttctccagtccctgccttggagcactgcccttggaagagaaagatacgggcaggaagaggcaccagctccccacacaggcctgagacctcgcacaagcctcccaaacccccctcagaattgcagctgagtctgcagtcctcctgcagcccacactgagccagcagagccacaggagcctgccttatatagcaggcaaagaggaaagggaaaggcccttctcagaagctctagcaccagggacctggaggggtgggtacaactaggcaagtctccaagtagcttgcagaagaggcagatttagggagggaggccccttacctcctccacccactacaaggtcaggggctccctcagagctgcagggagggaaagaaagggtacattcaccaagcatcctgtgccagaagctgtgctggacagggtccaaggtcagcttggcttgatcttctttaagggtcctctctcaccagccagcagcccaagaaacctctgggaggcaccaatgcccataggaaaggaggcctggtgagaaatgtgtgataccc

SEQ ID NO: 159506 - DNA, 1000 bp, Homo Sapiens
ttttttttttttttttttaaagtgcaaatggcttttattgagggcctactgtgtgctgggcaacatgtctgcaagggtcctgctttacctccctgtactttgcaccggccagggaggagggtgctggggagacccaaacatcaagctgggggagggtgctgaggtggaggtagaagggggcagaggggcccctcagctgagtccttagggagggaagggatcctggggtctgcccagcttgaaacagaagctgggggccacaaggccctgaatcaggccaggcagggtacaggggcctgggagtcctgctcctttgctgtgagacctttagggaatgggatccatctctgagtggtttctcccgatgaaagacaggtccagagggcagagtggccatgcccaaggtggtggccaggtctgacaggatctgcagtccctgccaacaacctcctcctctgctctctgggcagtagtggcctgctcctggacactgctttgcagtcatcacctggacctagagctcatctcggggctggggttggaggctgtgcccgctgctgccagtcaggtccaggcgggggctgcgcagggtcttttgggagccgctccagctgatgaggcggccgctgtcatcatcccatggagaggatgtctccgtgtcactgagccactcggcgtccccggcatagtgggtaggggcagcgagcaggggctgggcggagaaggccaccaggtcccgtggccagaagtgtgccttgtactgctcgttggggtgctggtcgaacatgatgggcaggaactcgtccacgggcagcatgcggcgcagaggctgtgaggccagcagcttgcgggcacccgccagacgcagggcataggccagcgtccagtaggagtacccagccaccaccaggcccggcagcccctccacggccgtctccttctcagggttcacctgcttccgtccgaggtagatcaggtcccaagacagtttctctgcctc

SEQ ID NO: 159507 - DNA, 1000 bp, Homo Sapiens
ttttttttttttttgatgagaatcttctctgggctttacttggcttgactcacttaattctggcactgtctatctgaggtaggcacaattatcacccccatttcctagagagaaaaacagaggctcagccaggatgtcattagtctgaggtcgcacctcggggaatggcgatgtctagattcagactgcagtgagatgcagtgcagttcttgctctgccctctccgtcttgccctctgcctggtgctggcacaggcccttccaggcgggaggctgcgtctcaggctggagaaaatgtgaacacgggcgcctgagagaagcctggggatgctgctggccagcggagaggaccttgatgcatttcacagggctctgggcccgtgagcagaacgcgtccaccatgagtgacatcattcagctcagccagggagcttggcatctgggcttggagctcgatgcttcatgagccgctgggaggcttccctgggtgactgaaccagggctcgtggtcccaagtgacgaggatggggcaggacagagaccaagtcccaagccgtgaacagtcccttggaaagacataggtgggaattctagctcagcagccctggagggagagcaggaacagggctcagcaccatgcccggcactcttcatgcattactgcgtttatttctctctaaaaccttatgaagtaagaactagctagcaaggggaaggctgggcccaaggagataaggaaactgggccagggtctcccagcttgagcttggagacggggtttcatgtccaagcagcctgatgccagagagctggccctcgtccccttactctcctggggtggggacagggggagcaggggttctagctccctgtgtagctgttcccaagtctctcttcctaacgtggctgctcccttggactcttccgtgtctgctacagagcaggtgcgcagtcagtgtctgctagaacgcgtcactggtgaaacccaggatgcctgggcc

SEQ ID NO: 159508 - DNA, 1000 bp, Homo Sapiens
tttttttttttttttttttttttttttttcgatacaaacttagagtttatttactcacatttataaactaactttaacattagaaattctccaattcttaaaaattaaaaattgaagactacatggaatcaatttttttcaaatatactgtctgtaaaattcaacattaatgtgttcatattactttcatacctaaccaattgggcatcaagagactttactaatcatctctgtcaattctaccattcctagtcattcttaatattcaagttagaattttgggccaatctatcaaaaccttgttagcatttttgcttttctcaagcaaacacatttttacctacccacacctctcagtgctagggagcaacttttagaagcactagcaaactaccaccagtggaatcggataaatgccaatgattcagataactccagcaaagatttaccctcctgtgattttcctaaacatcagggaaagaaaacacatatatcctgtattactgttacttgaatgcctgatttatatagcacactaatttctcttttccactagtttccataaatactaaagtatcaaaaagtactacttttttctaaaagttttcagaatgcccattatattttcacactatttaataaaaaaaagaaaccaagctaccaaacttatatttaggcaaaaaaaaaaggttttttttttcaataaaatgtagaaatattttaatttacatattacaatgaatcaataaggagtcaaaatccagtgacacactcataaaaactccatatatcatcctcagaataatcagtttctgtacaaagatttacagatgtccaagtatgtagtttttcctcagtgtgctacagaatttaaaggttctgctcgaatattccccaaatcaagcgcagaatctgtttcttcatcgatttctccaatgactgcaacgttgtcacctcttacaatgtataatcctagtaccacttgttctaccccctgtga

SEQ ID NO: 159509 - DNA, 1000 bp, Homo Sapiens
cagggacacagtgcactttaatgacatacagcatttaaaatccttcagacaaggtctgaaaacagttttttaatgcaagcctgaattttcaagcacataaaatctttcttttttaagcttaatttcaacatcactggaagaaatacctatcgttaaaccctgatatacattcttaaccacttgcagccagtgttcatgaggcaaaacgtgacccagagactttgttcaagttctcctcctagggcgtctacattcacggcggtcactccgtttctgtctccttttgtttggcacctgctggtgtgaggatcagggcttgcagaatgtccgacagggaaataatacccacaatactatctgcttcatttaccaccaccaaccgatggacctcagctcttactattctgtccacgatggtctccagtatttccagcttattgcacttcacaacaccttcaaaatactgtgaacggtgctgaagggcctgggtcaccgtgatatctaggttattgtatgttttctcagcagcaagattaattacatcaaatttggaataaatatctacaacttttcctgactcatccacaacaggcagagctgatattcgtctttccacaaatatgttcaaggctttgatgatgggagtgtctggatgtatgaaggcaatgttgtggtacgttcctattccaagctcatccaggttctgcttcatgaaagcaggctttggcatatcagacataaaaagctggaggaacttgaggattcttttgtgggtaagtatataaagtgcattcccactgatagggtcaataacgggcaatctgtggattttatttttgatcaaggagtatacagcatcgaagaggcttgcatctggagatatattcactaaaggcttaaatgtttcttgtaaataaagctccctccatgtttcaattttatgttcctctaattcataaatctgtaccataggtgatttatagtatctatgtagtatatt

SEQ ID NO: 159510 - DNA, 1000 bp, Homo Sapiens
tttttttttttttttttttttttttttttttttttttttttttttttttttttttttttttttttttttttttttttttttttttttttttttttttttttttttttttttttttttttttgaaggtcggagagcatctttattgtggggaggggcccggcccccaaagttctgacaccaaagacagacaccagacaggcagctgcagacagtgagttgtgtggatgaccacggcctgtgtggcggacaggggaccaggagccatcgcctcagactctgcccttctgtgcaagggctagtgccccgggctcaggcatgcaggaagcggttgaaggcgttgtaggctgactccaggtcgaacagcatctgacgcacctgtgagtcgtccagctcatctgacgccgacatgccgctcagggtctgcagccactggctgaccgtctggcggccctcaaagtcgggtgggaggtggctcatgcggtgcatggtctccatcagctctcgcaggtcgggctggatctcatccatggcgcggatctccaggcgcagcttgtccatgaccgtgatgaagagcgagaccacgtctgcgatgcagcggttgaggttgcccttgtcgtccttgatggtgatgggccggtcctccttgatccgctccatggccagcgggcagtccaggcggaacttgcggcagaattcgtcaatagagctgatttctgagccctggacctgcctgaaggcagctttgtattggaccaggagccgggagcaggctgcagtgtactcgctgggggagacacagtccttgatgtaggccttctccagggcttgcattgtcttcaccaccgcaaacagctctgccatgttgtcgtacttctccctctcccgggcgttcttgtacaacttcacttcctcatacagctccggcttgttcccaggggctcctatgcccggcgtggctgggatcccatgaaacatcctctaggctctggggggggcacag

SEQ ID NO: 159511 - DNA, 1000 bp, Homo Sapiens
tttttttttttttttttttttttttttttcaagcttggtctgctttatttcactacattaagttaagcaataaggcaaaacagtaaccggtcattcataaagatcaaggagtacctctctgtcccaaaagggaccaaacaagggtgtttcttcacaaatatgcatgacacttagctcattatgctgataagcacttcaaacaaaagaaaaggtcagtaggtgaatcaagtaacaaatccaaattaacttagcctaagtttccaaagctgtagtctcaagtgctaatgggatctaactttcctgtggtggtgcatactgactagcattaaaatttttgcacctcatctaatataaaaaaggcaacaaatacaattcctaattcaccagctgcaggtattgaatcatttctacgaacacacagaatactagcttacactaaaacctatcttgaggaaacattaaaccagtggctctattattctgcaagttagtttggcttctgaagaaaaaagtttatgatcaaagtgttttgtgtttctgtgtatgggaatgatgagacccatacttcaacattattactttggggaataaataccagctacctgccataaacgcatgacatgtgtgtagtctatgcaaacgtgtaaacatatgaagctattctctactctatgcccatttcctccactggcaaatatggagcagtgatttcacagtaggctctagcaggtagtggaataaaaatttgagactctgtggggtcacaaaaaaatgaaactctttctatagtctgcaaatctgtaattacccatccccctgctccaactcctaagaggctaaatgttattaccataatgttagagatgagtattttccttcttacactgcatcacatatattactctgtaggactgtttcataaaattggcttgacctttgtacaattagtacaatttagtgtcttttagagtacaatttagtgtcttttaaaagcttccta

SEQ ID NO: 159512 - DNA, 1000 bp, Homo Sapiens
ttttttttttttttttttttttttttttttttttttttttttttttttttttttttttggttttgtgtgtgggtgtgtgtcaagttttaatacacgctagaacaagccacaagagggtgctgctaggccagaactacactcaccccaagcccaccccaggaaccccaaagcagaggtcaggaactgagtccacagctcctggggaggcccaggcacccctgaacgcttctgtcacctctgacctcccatcttgccctcagcctagactcgtcccttccctaccagtcccttccctagacaaaggcccctcccctccctgggtcccaggacttcctccctcaagggacagaggagcagccagagagcgacggttcagggccctgagggtccggctctccaggagaagctgggctctgaaccagggtgggtaaacgttgcagaagggctgtcaggacactcaggcgcccacacactccacgtagttggcagggtacaggccaatgcggccactctgcaactggccttggcaccagccctgctcgtcctcctcactcatcttcagcagctcctcccctgctcggaagctcagctcatcagcttcctggccagcgtagtcatagagtgccctcacccgaaccccggtggcagccttccggggactctcttcatctgaccactcctcatcctgccccgtgcctggggaccccggggactggggtgggggtgcggtgccatctcttgtaggcacaatgctggtcagggtaacctcatcagggctccggccacccttctctttccggctgattgtcctctgtgtgtccaaggaccactcctcgaactgtggccagttcatggccatgcctggcccgtgggtgctgcgccaccagcgcagatcctcttcgtcactggctgcctcaatgccctggtgcaagtcacggtggagttcatggaacttctcactgctggaaaggtccaggtgctggtgtaaggtgagcagcat

SEQ ID NO: 159513 - DNA, 1000 bp, Homo Sapiens
ccactatatttgtaaaagttatgtgattgtatgactacagctcttctgtggtacctacaggttgatacaaatcattaaaaatcaaaacatcaacgtatctaagaaccaaatggtgcatgtgactccccggagaaggatatatatgccatgttgccacttgaaggagaatcttccaggcatcaaatcccgtggattctcttattttctttcacattccctctgcttttcctcacagtcggctaccacgctctgaggagcccgtgccatctccatttcccccatccctttttcactttgcctcacaccagtcaaatccaaatatccgagagtcagacactgggagactgtctgcttcttggcaactcccaggtggttatgatacgcttcccggaccgcaacactgacctacggaactgaaatgatgaattcatgtcagaagaaataggatttggggaagaattcattacctggaccattttcagcagctggaataaaaagtacttaacaacaacaacaaaaatcacacacaaagtccaaaaagtgttttgaaaaagtgctttgagaatttactgtacagtttttttaaacaatttatttatatgttggcttctacatgctcttacattcgtgtaaaacatttatacatattctttacaatttgtacatatattaaatggctatagcataaacattgttctatgggattttatagaagaaaaatcaagtggggagaattacttatgaaacattaacaaaaacccgtgatattgaagaacaagatgttctcatattcatttgatttcatctacttatttttggtgtcattttattgatgctggcccagactttccatttcccgtaattattaggtcagaaaaatgaaagcagcgggagggaacgcggtaaggcacctgtgggagacgggagcgctcctccgcaggggtgagacggtggctgccagtgttgagttcgagctgacggtgtgccaaggtcctgtttt

SEQ ID NO: 159514 - DNA, 1000 bp, Homo Sapiens
tttttttttttttttttttttttttttttttttttcaatatcacacaggggcctcagccccatttatttgcacagccaggggttcctgccacaaacagcagttttcgattatcagtagctgtttccctctagcctgggcaggggctgagagagacacacacagaaatatgatatttcagactcctttgagatctgaagaaatcatttcctcctttcttgccatctccataagaccacctctggaagtatgctatgctcaacttatactcacacatacagatttgctcataggttgaacagtgaagtttaagtaaaacccattgcacagactgttcctttcatcacagacacaaagaaggtgagagtaagatgctatcaaggaactagccaatcttggaccaagcgtacatgctcccttccttcttactccatggaagagactgctccatgggcctctcctggacctgttgccacggggagatttaggaggccatccaaggagtgactgagccttggccctcttccatggctacaggaatattgttcctgcaggtactatccagatttcagctctagatgtaactgaaaaaacctgaaactctgaggaaaggaatctaaggcttatagtgcttgagtactgatggggaacaactgcagcgaacagcaccagggaagctggaggatgctcagtaggtgaatcgcatcttttgtgagtagcccagtttgtccaagttgggatggcaggccagctgcaccattgggggtggcccacaaagcagtaccagcacatcatcccctggagcgggcaggtgttcccggatcatgtcggcagtcacaaagcccttgctgtaggcccaatcttttgggggatgatccagagtgaaccagagcttaaagcgattgggatagcgggcctgcagttcctctaagtcctcccgcaagatgatatccttttctgtctggttggcaaaaagcagaaagcactgggttggatcttcag

SEQ ID NO: 159515 - DNA, 1000 bp, Homo Sapiens
ttttttttttttttttttttttttttttttttttttttttcttctggctgcaaatcgtttttatgggaacctgcagggtgacccggcaccttgctaactgggcttagagtctaagggcttgggggctgcatctgatacaggttggagtttggggtgggagagtcctaggaagggggccccaagtagaaatgagagaaatcaggaagggatatcgggggcgtccacgggggtgctccgactggccttgcacccgtaccccagctctgcaccccccgtcacgagcagttcaatgcccgtgcagaagttggcttcggaggccaggaacactgccgcagccccgacctcagcgggctggcccatgcggcccagtggctgggccagcatgccctctcggattgtggccctagggtctggcattaaggctgccagctcctcccacagcggggtccagatgtttcctggggagatacagttgactcggacaccatatggactttcatccagggccaaagctttggtcatggctgttactgcccccttggtggccacatagggaactgcctgggcctggccgattgcccccaccaggctggagatgttgatgacattcccttgactcttccgcaggtaggggagggcgagcttggtcaaggtgtacgtccccagtaggttcagctccagcagctggcggaatccctgggcagaggtctcctcaggcctctgtgggggtgggtggtggccagcgttgttgacaacacaatccaggcggccaaatcggcggatggtctcagaaaccagggtcttcacatcatcttcctgagtcacatcacagaggataaagacagctccagggagctcctgctccagggcccggcccccagactcatccttgtcgcagataaccactcgggccccgctgttcacgaaggcgcgcacgatcccagctccgatgccgcgcccgcccccggtcacgaccaccaccttcccggcatagcgcgtt

SEQ ID NO: 159516 - DNA, 1000 bp, Homo Sapiens
tttttttttttttagaaacaagacatactaattcacctaagtctttatttatttggctctaggaagaatttgcatgaaaatgagcctgtatggcaggtacagaatgtactgtaacagcaccagagaggtacatcctctctcctctacagagcctcaatgtttaatacatacatgtgactttagtcataaaaccacatagtccaggaaaaaaggagccctttagaaaaaaaaaatcagtttagaatgactttcaaattgaccattccttttcaaatacttaaattcaaataacagatacattcagaggcccaaatgttggcatagaataaaatcatgttcatttatttttttctgcatcttagaattagaaggcataaaattaaatatgttgaatgtaataaattcatccatacaagtgcaagtctccagatataatgcattttatggcagatttattattttaaaaatgtaccagtaaatcaaaaaagagggagtatgtccatttaacttttattgaagtgtatgtaggaggtcttcagaaatcaaatgtgagcatgaagatatggccaaacataaaatctatcaaattcagtgaaaagttgctgactttaaatagtagttgtaagaatgaccaatatatattctttgttaacaacccctcactctatagtaaaaaaaaaataaaataaaataaacattcagtaaacattctttcctaaggtagtttcccttatatagcagtgatttatccatttctttgtatacacaaatttgttgaacataccaatcagtggttctcacaattgaaaaataaaagcacaaaaaagtttacactcctgtacaggtaaataaaagatcaccttgaattaaactggatctccttaagggcatagtatagtttcagtttcattacctattacataattagtttcttacatacaaatattgacatatttggcttgtgcttcgaagcctttgtgtctatgaagtccacatcaat

SEQ ID NO: 159517 - DNA, 1000 bp, Homo Sapiens
ttttttttttttttttgaaaaatatagacatttattataaaatcaattggtttgataagaaagcaattatttaaaaagtttaatacaaatacatgttaagtgtacaaattaggattcttttgggcaaacaagttgttatctaaagaagaagcaaaacctccttaacagttgtaataaaacctatgcctgaaaagttggtggctattacacggaaatatttatattgtgttcttctactcccaataactacttttaaagaatcaggataacttaaatagaatatcaaaatataaattataaataattataaaaatatatctgtacaagatttttattgaagacacatcagtgcataaatgcctaaatatgaggctataaatacagcaaaatattcaagaactatgttatctcaattttagaaaagggaacttttctgaagagaaatgtttgaagttaaggtactaagatttcactaatttcacacattggtattaccaacaaattgcgattaaacagaaatcactcttttagacaaaaatatttcccgataatatgaaaaaactggagtttccaaattacaaaaatgttgaaacagaaaggtcagaaaaaacaatgtgaaattaagaaagtatttttgagggtttctttttcacatagctatgcttagtctgggtaaatcctgcacaggcatgttttttgtggcgtccagttggtcatattcctgtatgagtgctgataaagatgacacagcttctgtgaaacagctttcttccatcccttcaacttgtagatagtgatgaaggtgagcctttttcttgtagagcctcatgaatctctctttcagttccatgaaggtgggcttcacacatgtgttatttgctaaagctaataacgaatgagaatggcccacaggaggtacggaacacaggctggtcttccagccttcttgattccaggagacaaattgtagagatggttttaatctttcaatatttctacg

SEQ ID NO: 159518 - DNA, 1000 bp, Homo Sapiens
ttttttttaaaagatgcaaaactttttaattaaaaaaaaaaccaacccagcaaaatcttataaaaacgaaccaggtagcccaaaaatgcccacctgtctctctatgtacagtaatacaatatttgtcagtcactatatacaatattataaaaaatgccgcagacagtacaaattaaggcccttatttctcacaaggcatcacaagcctcgatcctctagtgtagacccggtgggagagaagatgccacttaaattattgcaccattttgaaaaacaaaactcgtcaaggaggatcgtggtcttttcccaccgggccttcagtcacagacgggggctggggtggtggcgtcgtcgtcgtcgtcatcgagggagaccctctgtagccacgctgtgcccggcccggttctctgggtccaataaataccagtcacagtttgggagggggccgcgcccggcgcgtgggacccgccacggccgcgcgcaggtgggcgggggcgtcccggctacatgtgccgtttcatgtgcagcgccaggtgatcggagcgcgagaaggcacgatcgcacagatggcactggaatggccggtggcccgtgtgctttcggtagtggcgcgtgagctcgtctgagcgcgcaaacttccagccgcagccgtcccagttgcagtggtagggcttctcacctgtgtgcgtgcgcagatgcgccttcagatgcgaactcttggtgtaggtcttgccgcagcccgcgtagctgcaggtgtgagtggcggtgcgtttgcggggccaagagcggcggccgcgctttggcttggcctccagcagctccagcggggacgcaggcggcgtgaggagaccgcgggcggcggggggcgccaggcccagggctgccgcggcggcggccgcgtcgtcgaagagaccgaaggctgggggcgcaggcggcgcgtaatgcaggccgggcccgggcgcgccgaaaccagggccaccgaaaggcggcgggaaggagg

SEQ ID NO: 159519 - DNA, 1000 bp, Homo Sapiens
ttttttttttcctttcaaatcagcttaatcaaagtttattttcacaatgctacagaggtaagtccccaaactttacaatcctcatttgtttctctcaaaaagatctctttttttaaaaaaaaggctttagaataccacaccatgtttaaaatcctgtaagctatttttgaaatctaaattaaattctgacaatgataaaatgtttgccagccaatcaaagtcccaaactaattaacattcaaagtaaaaaagaatcatcattgggatctcattatattttgatagctgtaaaggctgattgactcctgtcattaatagtgttagtgtcataagcaaataatatcacttatattctagaaaaggaaataagcatatttgtcttgcacatcttatacactgaggtataaaaccatgttttaccaactttttttattaatgtaccaaataatttcttccacaatggcaactgtggtaaaaacccccatagcattagccaacctgctggcatgttctatggtcttctaattaatatagtgcacagacatttataaactacacagccacagtaatttacaagtaactaataaatattgaaatgctgggaatataacaaaactacattctaaatagtttactttccctttttccttatattattacttttatattcattcttcccactcatttttttcactagactctattaaattcaagatttaaatatggctaagcgtaagacaaaagagatgagcgtcaacaacacagctgaattttatcagtgtctaagccacttaaagctattctccaaaagataagttattcaacccaaggcaaacagagaaagttggaattgaatcctaggttctttatatttttaactgtcaggtccacaggaacatccaaggctcaagttttgaatgtctacatgtcatgaagttaactatggcactagtggaatgtcgattactgaagatgaacccctagacacattcagcaagac

SEQ ID NO: 159520 - DNA, 1000 bp, Homo Sapiens
tttttttttttttttttttgtgtgtcatgactttaatggttagctacagtatgcatacacatacaagaagtaggggagctgaagcccaggaaaaggctacaaaatacaacacagggaccaatacatttgcaaaacattcaaaatccttataaaaggggctgtattggtcctttcaactttgtcattattcagcttagcctgtatggccattcattcagtggggtaatgggggagaacaattaattaatgagatttggttccctttcctatattcccactgtttttaagtttcaggagaggattgggggggtgagggtaggggtgggctttaggcctggtctggtttccctttatataaagagctgacccccatctcaggcggctgaggtgtataatccccaaaagaaataagatggtacaaatgcagtcagctttggaatacgtttgggtagagacaaaatggaaactcatgggattccaatagtgagcccttcccatgttcctggacatatccaattctagcacatccacatttttaataacttagtgattttcaaggtcccctgtccacattaaaaaaataagttacataatattcaaactggctttttgctattctttgggacaccaggaatgtcagaagacatggagctatgccctcagacaagtgcatggcatcagctgcctcttcattacaaggtaccagtttatgtacttgccttggacacagcttgcacaaagccaagaagttccagacaaaggttttctctttcatgtatttacacaagttcaaaatgatattcacagcatcttctaaattttggccaagagtcaaaaaaatgcatttaaactttggaacgtgcccacataagacaggaggctgatcccaacagtagttggggcagatacccacaaaccaaagggctgggaaagtcaggaagagctgaaaggattcttcagtcagtttatgaactcggtgcagtgagacctctagactgac

SEQ ID NO: 159521 - DNA, 1000 bp, Homo Sapiens
tttttttttttttttccttttgagacacagtctcactcttgcccaggctggagtgcagtggtgcgatctctgctcactgcaacctccatctccagggttcaagcgattctcgcgcctcagcctcccaagtagctgggattactggcacacgccaccatgcctggctaatttttgtatttttagtaaagacagggtttcaccatgttggccaggctggtctcaaactcccgacctcaagagatccacctgcctcagcctcccaaagtgctggtgagccaccatacccagcctaaactggtttttgtttttttttttctgagacagagtctcgctctgttgccaggctggagtgcagtggtgcgatcttggctcactgcaacctccgcctcccggttgaggcaattctcctgcctcagcctcccgagtagctgagattacagtagctgggattacagacatgcgccaccatgtccagccaatttttgtgtattcagtagagatggggtttcaccatgttggccaggatggtcttgatctcctgacctcgtgatccgtttgccttggcctcccaaagtgctgggattacaggcgtgagccactgcgcccagcctaaattggtattataagtaaaaatatatcccattgcaaaacaagtctacaaatgatggaaattaattagtatttaccaacatttagcatatacataacagtattactttacaaattgtcttcattaaaaccacaaaaggaaacaaatatgaatacctcaacatatctgttaagaataaaactagaaaaaaacactcttttgacaaaccatgagtttaatcccctacctatcaaatatatcttggcagttttatcagcatattaacattcacaactgtggtagggaagtcatttttactcagaaccaaagtttacactattttgctaaagtagctaatgccatgatctgatgaaggactttgaagtttctattcaatggaaggattttttt

SEQ ID NO: 159522 - DNA, 1000 bp, Homo Sapiens
tttttttttttttttactgatatattgtagtttaataaaacatagtttatacagttcattgaaaaagtattttaatacaaacaccacttatacacaaaaccaaatgttgatattcttgtttttaaaaattcttgatttctctaaaacactaagatgctatctcaatagagattgcttcacattttccagtttcttgatctgtgcatgtcacatgtaaagatccatcccttttcatagtaagaacagctaatatatcacgtaatccattttcttttttatctaaatcctggagtacaacctgtgcaaacttggtttcctctttggcagagttcttcccatcagactcatagagttcaaggcacactgaagatatgcttccaggggcttgcaatgtgtgttgtcttcgagctggcaaaggagtccctgatggaaacagcactgtgaatctactggctcctgattcgtccacacccttaactaaaatatctctggctgaacactctatcataagagagtcttccaccaacaggttttctttcccaataagaattcctgcttctatagctgcaccaatagggatcacttcatcaggagggatagaattgagaagctcaacagctgggaaaagatctttaatcagttgctgtagctttgggattcgagaagaccctccacaaaggacaaccttgttgatatcatctgctgtaaatccattttgatctaagagtcctctgattgcttctaaacacttattaaaaagtggagaacaaagaagttcaaatcttgctctggacacattgcaatcaaaatcttgcccttcatataatgagtcaggaaaacagttggcacttcccaaggttgacaaagaatgtttcgctacttcagcactgttcgttaatttcatcatggctcgcgcatttcctctcacatcatgtttgaaggatctttggaactcagaagctagatactgtgctaaggtttctgtgaaatgtgcaccacc

SEQ ID NO: 159523 - DNA, 817 bp, Homo Sapiens
ttttatagaaaaataagctttatttcaaagcaatctgaaaacagcagtcagggggaccacatttacaaactgataggaaggagcacacagttacatgtccatttagcaaggtatcaagtcaggaatctcaccaattcctgcccaacacctactgagtttcctcttcaggttgaaactaaaaagtagacttgaacatcccagtgatgtctttgttatccaaacatgctccaagttcaggaaagaggacacctgggctcaacttattgagggatttgcttaattatttaaaaaatatttacatgagaatacagctaagttagtagctttcttcacattttcacgttttgaaagagccacagaggtttcattcatgttttaaccagttgagttggtaaagaccctgtctccattttgtaagagatggattacattcaattactcctcacgacagccaaatggaagattattctattgcttttgaaagattattccattgcttttgaagtgctggttggactggcatctgcaatggtagccaaataaatgagatttctatgtaacacatgctggtactgcacgcactcgttcccgcggcccttgttctgatactccacaatacagcggatcagctggtcattctcctcaaggagccgctggatagtctcttgattgacttccgccttgcccctcagccagtccggtacgaaggccaccgacatcccgaggaactccggaaccacgaccgccaagcaactcgacccacgataggtggggcctacgctctcgaagttgattggattcccgctgcgcctgggct

SEQ ID NO: 159524 - DNA, 1000 bp, Homo Sapiens
ttttttttttttttttttacatacagttctttattaaacaactgtaaacacttcactgtaaaaatccataaaactttataaacaaacattttgtaaatagaatctatgctacagtaaaataattaacacaattatttacatgcaatactgacaaatttggcactttttgaaaagaaatgtacaaaacacttgctttaaaagaaatttaaaattataaaaactccgagcattactatcatgcactttgcaaatacctcacaagcacttatggcacagctatcagagagcatcaggctctctggtaatatttatgtaacttttaatgtgcttccataagtttgttgtaaaaccacctggacattgtcaagaataaagtcaaatgccatattccaaaccgattccaccgattgctgcatcagccttttcatgtattttataactagatccagtttttccaaatctttttcttctattagatcagtacagtatttcacaacttggagaatgtcttcttccattggatctgaaattgtagttatccattctctgagcaaggtcttcacatcattgaattcaacagctccagctagattgggtgctggaggtctcacacagccagctgggtcagactgcaaactagaaaggcctggcacacctgaagtagaagcagagagttcttccaggggtttctctgcaggaggtccttcatgttttagaaacccatcaattaacttctggggactgccacaggcccctggcagagtttttgcaggactgttaagcagcttgttattcaaaggactctgaatcctttttggtgaaccaatggtttttttcttcttgtttcttttcttttctttcactgctgcctttagatgaagtaaaggattctttggcacagatgcgctggctgactgctggtgagtgctgttctcgccctgcctttgtctttgatcatacgctgctttcagctccctctgaagttcagcaggaagggcag

SEQ ID NO: 159525 - DNA, 1000 bp, Homo Sapiens
ctttttttttttttttttcaccaccaaggtttttattccaaaacagttatttggctagacgtgaaccgttaagatacgggatcaatggagttacaataaagacaatgaaagtgacaatttattaatacacagtaagttctagaaggcatctttcaaaacaaaacttgatttcttttgtatttacattttttgtttcaagtcttagcaaaatgctaaaaggcctggcctagtcacaattactgacatccttctgggacacaattttctgggcctgtgttgaatgaggataaattatcttttctctaaaatgccacatgaaccctctctatattcccacatgaagaggaatggaaggtaattatttggtcttttcttctgtttaggggaatgaactgaaccactcatttttttaaaatcacacttaaaagacacatgggcaaaaaagttccccaaaactactgtcttaccgaatttgagaagggaggtaatgtatgaagcttaacagctggcttcaaaagacacctttccaaagaaattgtactacctctattaacgtgtaaaccaccaaccaaaaaaaaataataagttactccatcaaacacgttattatccataaaaaagacttcaacattgtactggaagatctatttaagcataaatagtactaagcaccaattactaatctgaaggcctcctcacaggtccaagggcaatgagcaacctcaagaggcaggtgactgcacaagcagtaagctatggattaaaaattaaaaggatttcacattctttccaaagtgtactgcccggtgtctggcacacgcatgttacaatatgacaatctgctctatttgtgagcacctgagtgtattacaggggattacacatgcatatgatagaatctggctcccggtacagtcaaaggagaacagcatcagccaccaaatgtgctgatcttacactgaaaagggttgactgaaaacatttcaagggtaatgtaaac

SEQ ID NO: 159526 - DNA, 1000 bp, Homo Sapiens
ttttttttttttttttttcatccccaaaatgaactgttttaattttaaaaagtttaaaaacacaatgacaatgaagcactgatatgccttaggaacagtcccaaatcagtgctgacttaaagctaagtcctctctttccaagaaaaagaaagcagagaacaaagttcaatctacaatgggagggaacagaatgaaaacaaccaaaagggtgctttccagcagcctaggttattctttgttttcaggccacaccactggaaatgcttttcttcttatataagtcttttcctcacaacctttattttttaaaaactgccatctgctgaacaagagatgtccacatttccaccagcaggtgatccacttctgtgcacagtttttgcttcctcactgtgagtcctccttccccgaaagtgcaaagagagcaagctgatacctgcaggccccagagccccaggactattccagctccacttataaagcagggtgaaggatttgctgcatttgtgcttcaaagatccagctcactttggttgtccttctcagttggcaaactgctcataaaaagcaaacttgatcctctctatgtgatggcaaagtttgatggcagggcccaattttaagtccatgcattcttgaacagtgggaagggtaaggagcaacagggcctgcccatcaatttcctggtctaggaatattcttgctaatggagcacagtcagtggatctgatgaaccgcacaacgtctgccacactccacttcaaggggttactgtccaggtgaagcctttcagcaacttcgatccttatttcctttggtgaaggaggtttattttcatcgtcagaaaatgaaaaggtgcgaagctccctttttctcctttgtctatctggaggcagcgatgtggatatctcactttgggtgggagaagaggagcatgactttttttctgacatttctgattcttcctgtagctcatcctgctgctcggatgtactgcctt

SEQ ID NO: 159527 - DNA, 1000 bp, Homo Sapiens
ttttttttttttttttttttctgaatgtttcatttgtctatggatttccacctgattactccagaaagtaattacttaagatggggggtgatttcagcatcacccaccctcctatatggccaggcctccgagcatgtacagtaaggcacagtcaccacaccttgggaagggcctccctgcaggtgtgcactgcaggcctcagccctgtgctggttagagttatggagcaacagccgctttcctaagcagaagtgaggcaagctacttccgcacagattgtgaaacagggtttaggtttctcccctcgtggacgagaggccaagggtgtgccccatcagcctgccttcccagcaggtcacagaccatccccactctggctggcctggaagggtttgaccagagcggatcatgcagtgaccagggccagggcggctggcaggggcggcctccgtttccattctgtctcctaagcagcctgggagatgtgggcctaagcttcggtgaggacgagagtctgtcttggaattgggcctcacaggggagagtccagagacagggccaggaaaagaaggtgagggtgtaacgtcattcagagaccagctgcacccagggctcacctcctggaggcacctagagtgagcagggggctaagtcagccgacagtgtggctgcacagcccaggcctgtcccagcagaaggcatgaaccatcagcaaatgagtctcttttccaagaaacgaaaaggtcttgttcagagccggggccttgggagtgtcctgatgtttcaaccactgcgccctgccttcctgtctcgacgcccagggttccaactccaaggtggaatggccaacgtgtggcctcagtgtggtggccgtctggggtgggtgtgggctgcccgcctagtgaccctgggaggcagaagtttctttgcctttagggacaaacttcagcgagctgctgaatattcagaatcgggactgccccggcttggggccgtcgtt

SEQ ID NO: 159528 - DNA, 1000 bp, Homo Sapiens
cctgcatttctcatttttatttgacagaaaaagttgctcttgctgtacagattttaaaaaaccaaaatgcctttaagaaacatgaaaagttggggggaggggttcacaacctcatgggggacagtagggaccaactaattccaactcctgccccttccttccaagaacaccttatacaacctccagtcccaaccaccatcacaatcacccctgggaacttctggatacaagtggggccatgcctccctggccctgactccaggctggggtatcctgaactgtatcctcccctcccccaactcccatctgcattccctcccaccccaaaccccccagaacacatgaaccaggaagaactcacggagattaacatttcacaggaacaaagaaaaaaaaaaggggagggaaagggagccctccatccaagggctgccaaggttcaaaggagagcagacaaggaccctcccacggctctgctggggaagaagggacactccttgtggctccagagcattgggtgtggtggaatcccccaaagacaatttatggagacctggaggagcggtgtctcatgggccgagggctaggtgtctccctcctgcgcttgtggctgggggagcggctgtccccacgctggcctctccgggaaccccgctcactgctgctgctctgctggtcccgtggtgagggctggggcgagggacggcgacgctccacaggcgagtagctgagggaccgagagtccctgagggagtctattggcttccgggggctgcgggacctccgctcgccagggggtggcttcttggggcttgcaggtttgggcaaggcctgagggccaggcttagcaggggaaggggaggaagacgacgaggaggaggaagatgaggaggaagaagaagaagaggaagaggaggaggaagaagaggaggaggaggaggaggaggaagatgaagaggaggagctggaactggaactgctagagcgcctcttccgtttg

SEQ ID NO: 159529 - DNA, 1000 bp, Homo Sapiens
tgttacagtctctgattttaatgagtcaatctcaaggcaaagctataaccttttccatgtgaaccttaaaacggaaatcctacgtgtttggctcagctaccatagacatctcttgccccagagttccagtgtatttttcacctttagtttcttggctcctctccgcctctacaccagcctcatatccacacgggatgctctctgctgagtattgtcttgagttagttctccctctcatgttctggctgatgctactcatggtcatagtatcacctgagggggaaggagtatgctatgaaggtgaaaaatgctaccatagcattttgtttgtttataaaatgtcaggccctggttccatttttcccccctcttatatctaaattttgaaaccactggcctctaacagtctgtagtaggcttaagttcaaggtgccatttgcttctctggtgcctgtttgtgagccaaatagaggaagagtatgctagagagagcgctgaccaggaagatcacatcaaaccaacggtgatagaagttgaactgcagttctccaaggacttcagtgattatggtgcggtattctaaaggcatactcattcggatcagcagcacagaggagacaaagtacatgcccattatctgtgctaatagcaggacaatgacattggaggacttactgctagagatggcataaaagaacttggtaagagtgatcagcaatcctctgatggatgtgacgatgattattccaacaagaatgaaggaaatgtgttgggaccaaaacttcacatcaaattggattcccagataattcacagtgatctcaatgcctcttgtgacaggatccgttttcccaactcgatcaaaaacaatattgatggtagccatgaaaattttccaaacacagtaaatagagaaaaagtaaccaagaaaattaaaatatttccccttgaaggttttggagtattctattctctccttggtagcatatagatcagctgt

SEQ ID NO: 159530 - DNA, 1000 bp, Homo Sapiens
gcaggaacagtggtttattgaccaggcaggcctccccagcccggccactgctccccaaggggctcgggctgtgtgggctggccttggcagaaggtggacaatcctctaggtccaaggacatgggggtcacagaggtgggggccttgggcccacacattcgaggagagttcccaaaagtttccagtggctgtcccaggcaggtatcaggttcggcccacacctgagtgcccatactctgggcagggctgggaggcacctgacctcacctccagcagctctgcaagtgtggggtgaaaaaaggtgaatctgtgtgaggatggggttggctgcagctgtggtgatggcctgggcgggggcggggggtgctggaggctaagggtgtgctggcgggtgctaggcagggcgatggaagaggttgccagttcggagccgcctcaagagctccagccacagcagctgccgctcccgatgggtgcccttcatgaggctgctgttctccagggcacggcgggacaagtagggcagcacctccatcacggggccatagggcacgtacttgtacacggggtagccggcctggcccagcgggaagctgatctggtcacacatgcctagcagctgtccaaagtacacccggtggtcagcaggatgcaggcccagctcctccatcctgcgcagtgcaaagcgcactgtgtcctcattgtgggaggccaccatcaccttggccttggcgttgtgcttcagctcctccaacacgtagtccaggcacctgtggtacatggcgttggtggcctcgtacgtggggttgatggggtcctcatagccgatctctgccgcacgggctcgctcctgggccaggtatgcgccccgcaccagcttggccccaaaacaccagccctcacggcgagccagctccacgtccagggtcacattgtcataggcatccttgaggtagcactggtatgtgttgaagatgagcggcttctccacattgaacttc

SEQ ID NO: 159531 - DNA, 1000 bp, Homo Sapiens
ttttttttttttttttttcatgaagaccagtttattttacatgcttgctttcacattctttactgggaatttaaggccttttttcagccttaacttgtataccaacctcaaggattttgtttgatacagaaaaggatagggctgggcccttctgccaaggactgataacctgcctgccaaaaggaagagggaatgaaagccttttgtccttctaggccccttacagtacctcaaaatctaaaggccttaaaggggaaaaaaaccgtatctgttctttctccttatctcctacccttctctttaagcatattgaagatggacttttttccaaatgtttatttgtaggaagaggtgatgagtgcaggccagcagctgagaacttacagctttgatgcaccaggaactgtattcaagctgagggcaaaagcctcctagggagggagccaggtccaccaaggccagagacagacaggcgagactgtggaaggccagggagatgctgcctggtaagtgctcagctggcctactgggcaagtcctctggggttctagagctgataggaagaaggagtccattttgatagtcctgcctggagacttggacctagctgatactaaggtattttataaagctacagtggatgtttttcttaagagaactgaaagttggaaaaggcacaagtatatataagaatttagtaaaatgataatggtggtctttcaaatcaaagagtgatctttaaattgttcttgggaaccacagggttcctggccatgtctggcggctgagaggaggccaggatggggacttcaacccaagcagctgtggttttgcctttgataaggttcctggtaaaaatcatcttgaataaatgttgctgagaaactggtaaagcattcgggggagaaaggattttgctctttgctctgccatgtttttccgggctctttcttcggggagaaagagggctctaacctttggtcctcattcagataggcta

SEQ ID NO: 159532 - DNA, 1000 bp, Homo Sapiens
tttttttttttttttttttttttttttttttttttgcagcaaccaataatcaccgttattattaagagcagtttctagtacagagcgcctcagggcacttacaatccccacagaggccagctacccaacatcagagtctgaccagctgggtggtcctgccctgcatccgagagggtgtcgggacactcatccagatggctctgagacagcagcagagctgacaaggaggccccacaagtgagattcctttggcttcaaggtcgcaagtcctgtccttgggcctcctggcctgctgagcctcccaccggctttaccctcagagattgctgcagaagcctgtgtgctggaatgggctgccacatttctaggaaggaacccgggggcacatgtagcctggttattcaatgttatcatagacgtgaatcacatcctcgtggttgctgagagcctgaatgagatgtgcggcctgttccaggtcgggctcagccagctgcacctttgagttggggatgaactctagtgcacaggacacagaacacaggcccagggagtccagcttcttcctcacttggtgcagtgaagaggcatcacaaataaatttaaaaacgttcctttcttcttcatcttcagtttccttgacatcctcagctcctgcttcgattgccatctccagggcacgctctaggttcacagccttcttctctctgtcctccacttcaaccacaatcaccccctttttgtcaaaagagtgacgagctcctacagccatcactcctccattcttattcaggatatgtctaatgtctgcttggcacttgtggctactgttagataatgcctcgatgagcagagaagagccaccagggcctcgaccctcatacagcaaataagtgtccttggatttctccattttcagtgctgtctcaatcgttgacttgggcatatgtttgctgcgacacacctctaagatattggccaggttgctgttgtgctcagggtt

SEQ ID NO: 159533 - DNA, 1000 bp, Homo Sapiens
ttttttttttttttttttttttttggcattgtataaaggcactttattttaaaatcaacacatcctgcttttataaatcagttactcttcatttccaacttccatcacctgagtttgagagcagagtgcatggtatttttctgggcttaaggtataaactgacatggcattcaagaacatgtccagcgggcagagcccatcagggcaacctctcggcacctgctccttcccgtggtaatagagctgcacaaaccactccttagattccaggtgctggtaaagttccatggtcaggtcaacagcaaacggtggccatttgtggtcaaaaatccccagggtcattaagagcggtatgaaggtcacatcatgagccgcatagagatacagctttctgatcttgtcgggggcagtggcagagtccatggctttcagcaggttgctctctaggatgtggaggaatgggcctactgccatctgaagactttccctgtcttccttgggcagtatgtacaaggatgtgtccacagctctctgttcgatcatccgtgcaaatctcttcagcatggggcagcttgggaggttgtgtgcctgctcggcagccacgttgtccaggaggatgaagaagtccactttatcactactgtcaatgcccatcctgtccttcacctttttcaaatcctctgagattcctggctgtaaagaggcagtctgcctccggcctctggttctctgcctcaggctccagcagctttggtagttgggatacaagacttctgaatctgcttcatcagtgtggatgatgatgggtccttctttctgacactggaaaagcccagccagcaaacaacgggtggactccagattccgaaaaatgttagtggaacgaataaagacctcctgtgggttgaaggttggtgaaagaaagggaatgtcttccacatagttcttcctcagtctctctcccaaggcaaacatttgctgcatgcccaccttggtcagc

SEQ ID NO: 159534 - DNA, 518 bp, Homo Sapiens
tacagtttgaacatttattcgcctcctgagcttgtacaacagtcgtgggagttgctgcagaagcaagcgaaaagccagatgagcgcttctaaacttagagagaggtgagtaaggcttgtgggcgatcacttgtcggctggggcctctttggcctcttcccagaggatgtcctgaagaaacttccccagggcctggctgtgctgctggtactgaacccctgacagcttgattccaacatcaaagggggcgttgaaccggacttccagttcatcctctgccccttctgcttgacctccatcttccgggcggagccagcctgctagagctcggggctgcagcttggctggtggcttcttcgactcctttctctgctggactctctggtgttcagggctcaggaagctggagcctgccatggccaagtccagccagagcatgccgaggagcaggaggctgcagacggtccctggggagggcatggcctcagctgggttgcagacaggtgggcctgcagttcc

SEQ ID NO: 159535 - DNA, 1000 bp, Homo Sapiens
tttttttttttttttttcacaattttacttcattttattataaggaattgttacagaaaatgcaaatatcagtatttgaaaaatacattccattacacagactccaaagaaacaatgctgataagcgccgtggtcctctatgataccatcaccccacactgagcaccaccccgaaggggctggaagccaggtgatccacccaaatgtgtgcctgcagtttctgcccagctactgcccctcctctgggatcacacagggatgtcgtaacagccaactccacacatctgccaaaaaagagcaagtcatcaaggcgagcagtctcgactcaagactccctagctgcagaaaaccaatgttgtcagttgtaacaggttaatatattatttatgccacacaaaaaaggaatagtacaggcaatgatcttccaaagaaagtctttaaggcatctgtaacttctgggaatttcagggtttttatcttgccagtcagctctcactaaagtacttccacagagtgagaaggtggctcccaagtccctttggtgagttggtgccacctgcttcctctgccaccaggctggggtggggagctttggtgcttcaggtagttcttctgggacttgtcccaagggaagcaagtgtctgtcatggaaacattacccttccttgttcctgctactgtcacctgggaagttagcgttagcttgcctttcagggtgaagcattacatagttcaaaagtgttctttttctccagataaaagaaacctagatggaggtcaagctctcccctttcccaagacgttccctccactccgtgcccgtggagaagattagtgcagaaacggttcaatatggcaggtgtgggacatgagcggggaggagtggagaaaccacacacacactgagatccacacagggacccattcagggacaagagtgaggacacagaacggggtggtcagaaatgactcggggctctgaggtagaggactaaaggtc

SEQ ID NO: 159536 - DNA, 1000 bp, Homo Sapiens
ttttttttttttttttttttatggggcagcgggggtctttattcgtcagattttccttcttggcctactccccaggtgtggccagggatagtccatacagtgtggctactgccaaggtcaggatggccagcagacccagtggggccagcagcccctccctggatagggctccagggtccttcactggaggaagatccttggtacccctgctctctccaaggctgggactagtgttcctggttgtggccaggtgtgcagtggttgtgacagcagatggtcttggcttggtcctagcagaggctgtgaccccatacatgggcctgatggtgccgaaaggcctggcgtgagcatccacccaccgcagcagggcctgtggtctccactgacagatgctgagcagggccaggacatcaccctcagccgtgtgcgagtctggaggggactgcccatacaggcgagtgtagatgctgcctaggctgtagctcttccttgggccgtgttctgaggggctgcttgctcgctccagggccttcagcgcagtgatgctatccacacagaaggcaccatccagagcactggtgaggcccagcatagccagctctgcttggagcagggggaagtcgtagcggtcaccattgtgtgccaccaggcaccagggctgtggctggcgccgcaggaaggctaggagcaggttggccaggttgtcatcaaaacattgacgcccatgcgctgccagcacagctgtgctcagacctgtgatctcgctggctgcagggctgcaggccttccccggagccacacacagggagagcttgtctaccacacgcggtggtggaggaactgtgggaggtggcccctgagaggtgggggggctctccagggcacatctgtggacagccagcaggcacagctccgtgaccttgggctgggagaagggcaagccagtggcctccatgtcgaaaaagatgagggtctgcatgggccccgggggcagggcctg

SEQ ID NO: 159537 - DNA, 1000 bp, Homo Sapiens
gtgaagcagtattttttaattattgaaagaaacattgtcatctcaaccttgctttttgcatcaataaattgtttttgaaaagtcattaaaattatttaaataaactgtgatttggttatcagtggggtgctaagcagacattaaaattacaatatatgcgtatttatatatagttaaatataacagtgaaaataaatccacaatatattgttgactggaaagaaagtttaagtaatgtgtacaaaagaaaccacatttttggttcaaaataaaaagaaacaactgatgtacatacataagcatgcccagaaaaatatttagaaggatatatagaaagtttctccaagtgactatctctggctagtagaattcctaaactctttttgatatttgtttgttgtaaggagcatgcattaatttgacaatttttgaaatagtaaagctatctttgggaaaaatactttgtaagaaaattatattacttctcttagtaatgcattttaatgtttcctatacctttcaatcagaaatttatttcaattatgggctattgcccattggtgagaaaggagaattaaaaaaaaactcattggcttttatttttcttctaacgtgttccagaacgcattcatgcttaaatttttatatttccctaagtattaggtattgtgaatttgtaatcttgttatcaggctcaattttcaagctgggtcttattaatttttagtatatgtgctgccgaggtgagcacattaattttttacattttagtagtaaagcattttttaagttatttgaaatactgattttcatggccttacatttggcatgcataagtgtaagctgtgaataagaggtaagccaccatcccatcaacaaatgatcaggtcatcaccctgctgccaagtccttctgtgtcctctgtgcatcttgttttcttagaagccatcttcaataggagccaaatcattgaactagatcatggtccagctagtttata

SEQ ID NO: 159538 - DNA, 1000 bp, Homo Sapiens; identical to SEQ ID NO: 158791

SEQ ID NO: 159539 - DNA, 1000 bp, Homo Sapiens
ttttttttttttttttttttttttttttttttttttcgattctcctagcagcgtttattgtcgcccactctgcctgacccagtgttgggcataaggaaaacagagggaaagagttaaccaccctggagagagttccagcctcaaggaggagccaggcaggctacagaagtctcacagtgagggcgtggtcctgcaggttgacagaagttagaggacagatcagggaaggctgcctggaagaggtggctttgggttcatccaggccccctgcccacgtgtgcctgggtctgcccacaggacagaggctgatgggaaatcctacgtaaagtaccaggtcatcggcaagaaccacgtggcagtgcccacacacttcttcaaggtgctgatcctggaggcagcaggtgggcaaattgagctccgcacctacgtgatgcccaacgcacctgtggatgaggccatcccactggagcgcttcctggtgcccatcgagagcattgagcgggcttcggggctgctctttgtgccaaacatcctggcgcgggcaggcagcctcaaggccatcacggcgggcagtaagtgagggtggagcccagtgagactgtgggtgtgtgcaggccggggagtattaaaggtggtgatttttggagacaagtctggtggcgtccgtcccaagtgacctgcagagcccctggtttcactgctgcttcactgatgtcctcggccccttagaactttcaggtgtgccgggcacccgcctggatgaggccaggctgcagggcggccagggagatgaggatggcttcctccgtgcggatggtacggctaccctggccaggacaggtattgacgtacaggtcaaagaggacactgggttcagccacctccaggttggggtcagcatccgctccagcttccagaccctggaggcccccgaacaccacaagagcatgcctgaagttgggaagctgggcagaggccacatctgagccgcgctctgacg

SEQ ID NO: 159540 - DNA, 1000 bp, Homo Sapiens
tttaaaatatatttgctttattatgtacacactatatttacatcacccaccctgaaaacagcaggttctggcttttccgtgaacccccagatgaatataaattggagcctctgagaacagttccttccccagagcggggagtgtgcacgtgtgtgtgtaaccttctgattccatgggacctggccagcccctctggagccacacagcacctccttgccttacaccctggctccagcttcactggtccgggggacgcctcagcctggggcagctgtgatgtaaaccagttactccacctccatcttcctcttctgcaaagaatcgaggaagtcttgccactctgctgggtaaaagcgtttatagacgttgatcttactccgaatctgttttggggtatcttgatagtaattcttctcatcacgggccatggccttatagtcctccccgtggttctctaccatgtagcgtacatagtcaatgaggtcccgagacagagtatttcctttcttttctggaaggctggcttctgcctccaggtcattcagcacatagggcttccgtacaagctctttaggcctctcctctatgtccacctccatggccttcacctttctcttacggaggggcaccgccctgttggggtccacagccaaccccatctcggccaggttctgccgtaccgatttagcgtggtcccaggcatgtcggatgtgggagcattcgattccgcgcgctgccttccgtcgagcattccggttcagacgctttcggttgacactgtaaccaaacttctgcctccgggttttgcccttggccttgggcatcgcgctgaccaccgcaccagcagctcaaacacgctgcctctgtctctcagacctcgtgtaacaaactccttccggaaggcgtgcacaaggctttgcgggcatttggggaaatgtagtccttttgtagcactaccgtgctgagcactacgactcccaggatgcaacgagcatttgcg

SEQ ID NO: 159541 - DNA, 1000 bp, Homo Sapiens
ttttttttaatccaacccagcagaaaggctttttaaaaatttacttattacttgttcttagcaaattaagacaattacaataaaacatcagctaactgggttcttgtgagaaaactgaggtcagcttggaaaggagttccccgagtggagttcccagcggcccgcggctgacggccagatctgtcctgaggggtcgtgggagcccagcgcctgccattttcctttgtaaagaagtcatccacctcctcccagcggtgcccattttcaagacgctgcccgagcctcttaaaacagcttcttgaaagggtttttccacaacgggttctggaatgttctgcttcagctctggaggatgctctaaattagttcaccatgatgaagttagatttgcagtgagctataaactccgtcacagggtcatgctcgccttccgttttgatggtacctgcgatgctgtcattctccaggatggggaggaaaagttgcacgaagtcagaggtataaggaggagcaatgacgtccagcacctcagtgacaaaatagcgaatgagtgaaatgtcagtgtccagcttctccagacactttcggatgtaactgacaacaggaagtacataacctcgactcagcaggtgaaccatcctgtccagcagtgtcttcttcaactcaagctgctccatcacgtccagctgggagtgctcagtctcaaaaagcttaacaagcagctgcaggacctgggggtgcaggagctggtggcaggtgctgatctcatccagcaacgccaggtggacaggggtatggtcagtctgcagctgaaagtaccttggttctgatacagtccaatccacccacttcagcacacccattgctaccactggaaacctaatacactgataaagtgtgctcaattctgccactagttcagaggcccctttgttctcgttgcaacacaaattgtgaacggtttcgacagcttttgacgttgacttcagctcatctttat

SEQ ID NO: 159542 - DNA, 1000 bp, Homo Sapiens
tttttttttttttttttttttttttttttttttttttttttttttttttttacttggcacactactgtttggtataggttttatttttaagtaaaaaaaatgaatcatagccaaaacaaaatgtcttgcctttgaatggtattttaagcttaaggggaaaaaagtctttaatgatgaacatattttcatttttcaatgtttttaatttttaataaagatttttaattaagcttcagtctctaagcagtttttaaacttaggtttcgtgatcctttgacctcatacttttagatggagtcagttatcttcaaaacatgacaaatttcagaatccattaaaaattattttattcaaattatgttttccaaaagagagggttctgtgctagtcgtctttgaaagttttcataccatttcagaaccacatttgccggaatgaacatttcagatgggcttggtgtcatctgggcctgagagacagcaaatgatgaagcaaaattgtagaaattgtccaacatcttttgtgtgaactgagtgaatgagtcaactgaggatacagcagcattacctacaggagtctgctgagccatactgtctaataattccactgaaattccaatctgagcaacagatggagttcggacaatattcatggctccaaaaggatgttggcttccttctccagatttaagacctgaaattttgaagatggcacttggcttcccattcgtgacaaatcctaggagttgccatactggcattccatttgaatcaggataagaaaagtagacagatcctcccattccctcaggaaatgggattgttcccagcataaaaaccacaacatggttgatactttcataatcaggtaagtcaaaaacaaatttatcctctgccacttgctgtgcagctgtttgcaccagcctccccgccaccaagcagccaaacatggcgacggcagctccgttcagccggcagtgacctgaagccggcgactagga

SEQ ID NO: 159543 - DNA, 612 bp, Homo Sapiens
tttttttttttttttttttttttttttttttttggttttaaacctttaatgagaaaaaaatatataataccgagctcaaaaacactgtgtttggtgtcattgggtcaagggttggggatacacacggcagaattcggaaacagggtatagatcaacaaaaatacacagtcataacaagaaaaactggcgcctggcacaatcaactctcagtttcctcttcactcagcagcatgttggggatcccgcggctgatggggaacatacgtccagattccgggcactgcagggtgccctctatcacttccacctccagcagcaggtggtgcatggtcctcagaaactcctcattctcctcatatccctcaaccggccctttcggcacctggatcagacgcaagttatcggccgcctccaggaacgccgaccactccactttaggtatcatacgcgccacgaagttggggttgaattccacagggcagatacggacctcggtggcctggaggcgcagggggaagccacgggaccccaccccccgcacatgcgagctcagcagattgtgggtaagcagtttcatgtcgccgcacaaactctcgccaggccggaaccgga

SEQ ID NO: 159544 - DNA, 1000 bp, Homo Sapiens
ttttttttttttttttttttttttttttggagaggcagaccagctttatttttgaacccaatcactgggtgcccaactatgactctgctatcttcgaaatgatgagatggggcacactcccctaacagtatttagctagaccaacaaggatcctggctcctcccagggctgtagcagagggacgaggcccttcgaagcttctagtgggcacagtgtatttgaaatccatcctttttaaagcccagtttcacttggcctacttgatttattgctggtagcaagatcattagaattttagttaattaatatgtgccaactctgcaccggtgaggactctggagtctcttgttactgcaagcataaaaagtgcagcccacagggcttcctggccatggaaaggaccaaatgcacctgcaggtggaagcaagcatgacctcgggccactgtgcagcccctcccatgtcccccctggaaccgacacgcctcacatcaagagtggccaacacccagcttgaaggctggcccaggacagctttatgacacagaactatagagagaacacacagcagcgcactcagaggcacaaagcgacctgcctacgtggaaactaaacaaccttctggggcaggagcggtggcagtgcgggcttcagaagcagtaggacgtgtgggtgacccagtgggcagactcctccttggagcgcttggcggagctgtgagtggtaaagagggacttgtaggcctccgattcttcactgtcagcgatggacctctttgtggctccacacggaggcttcccagcttttccagaagagctctcattcattgctgtgcttttgggagccaagttggttttcttctctctagaatcaaggctggcttcttcaggcttccctgtcttaacttttgatggccctggggcttcttcactgacatctggttttgaagcagactctgctgccttgggtttctttggtttcttttccagcttcgctctcagc

SEQ ID NO: 159545 - DNA, 1000 bp, Homo Sapiens
cagactaccttttaataaactcaacttcccaatgttaaaaatcactgaatcaaaagatattttcaagcagccttttctcccagatatatattagatataaggaaatcgagtccaatttgaaatgaattttaaaacagcacacaaacatcacaagcccccagcgcacaatataaaatagttctctaaggaatataaacatttagtatattagaatgtgaaattacataggaaaataatctcttcaattagctaaaatcacttgcgaaagattatttattgcacaatttatcagtgggtactaagaataacacagatcctattattctcaacctctaaattcagtacatagtaaaattcattttctcaaactaaggttctatacataatcggagtaaaccctctgttactgagttaggatagggaaaacaaattccttagagttcatgaaaccacttcacaaatcctagaaggcacacattatatttcctatcatagtaagtacatttaagtacttcatatttaaaaaagacaaagctgtacagaatacaaaaagtgtacatttcatccattaaacaaatttacaacttttacgattagttattacagtagaactgacctaacattcacatctaaataattatcacccagttcaatagagcgaacaaagagctgtgctcatttatttatttgataaggctaataacattttatattcacagtagatcagtaagtgtcttggagctcatattgtaaaataaaaaggtttgggccctattgagtcactgggctcattgttaaataactccttgaaaggtgaaggattctgggggataaaatcattggctatccctggaaagatccaaaactctgtaaggtaactctgttcacttttcagaaacattttaaaattaggtaatctgaattaaactcagcaagtctaatctaaaaggacaatttaaaatcttagagctggaaaagatttcagtggatcatctatccc

SEQ ID NO: 159546 - DNA, 1000 bp, Homo Sapiens
cctgtgccttaagacacctgtttattggggacacgactctgcaatagggatgacaggaatcgtaccaaaaatagcgacgtctacagggcccctgatggggctagaagggtacagtgccccccaccctcaccccttgtacaaaaataaactctcacgcctatggaccagcaaagactggcagagtggctcctcaacagggacacaaaccttctctgccagcccagggaccccgttctttgaccctcacctctgccacttctaaggcactgtgactcccttgggctgggtgggtaccgccagcccaccctcctacgcccgccgcgccttccacctctggtccgcctggggctgggatatgggtcccacgctgccccctgctggcttctctacccaactacctctagcgctcccccgctccggcggggtaagctcactaagctaatcgcccctgagggcccactaccgttcttgcccccccagccctgcctctccgggtctggacagcccggagccctcctccccttcctgcgaaggactgggaggggtctctcctgatggtactcgggcatagggcggggacgcgtcagcctggggtggccggcggcccctagcccggcggctgtggtgcacttgaaggtgcaaggccatgagctctggggctccagtggcgaacgggcagaagaggcagcggtggagggcacccccaggcccggcctcgcctcccggccctgcccgcaaggacaggtccaggggttcggcctcaccgcctcgcccgttgcgcagggtcctcccagggctggcgggcttccgacgggaccccggcccagcaccgctagaaggaggccggggacttgaggcgccctccacccaggtcgcaggctgcggagacggcttggctccagattgcggggccgaaccccgctgggaaggaggcggtggctccgggggtggcccggggccggccccgctcctctgctcccggtggtggcgctgtaggtga

SEQ ID NO: 159547 - DNA, 1000 bp, Homo Sapiens
ttttttttttttttttttcaatttagaaagtttattttgccaaggttaaggacatgccagtgacacagcctcaggatgatgtcctgaggatatgtgcccaaggtggtcgaggcacagcttgctttgatacatattagggagacacaggacatcaattaatacgtgtaagatgtacactggttctgtctggaaaggcgcaacaactgggggtggtgggcagctcgcaggtcataggtagataagagataaactgttgcattcctttgggtctttgatcagcctttcactgaatacacaatctccatgtgagaggcaggtagaggaacagtcactgatgccttagtctggctcagtgaatctgcattttcacataaacaatagggcagaggaagcaatcagacatgcatttgtctcaggtgagcagaggactgatggtgagttgtccattgtctggcatctgtgaagataagctatcaatttacattgccagggtgaaattcaacagaactattttagggtaaagatctcgaggtccacgaggaatttccaagaagaaaagcaggaactaccaacaggagagccctggggactggtgccaggaggagctgcaagacaggagggaggtcacagggcctggggagtcactgctcatggagcggggcttctctggcttcatgactcacacatccaagcagctctgcctgtggggagcttccgtctgcaggcgcagcaactcagccgtgagaagcgcgccacctttccaccatggcagtttccaccgagacgtctttccacggcatcgcctgtccaccctacccctccctgctctcgacggcagaggactcgctgttccgagtggcagctttagaatcacgcagtaaccgcaggaagtagagagcacagcacagtcatcattttccctcatctttgtggacagaggcagatcctggtatgacccagggagcactggagtggggtccgaaatacagagtccggccgc

SEQ ID NO: 159548 - DNA, 1000 bp, Homo Sapiens
ttttttttttttttttttttcaatgggcaaaagaacaagttgcagtcaatggctgcagaggggtgtctggggtccaatgtgggctgcactttgtgggtactgaggaaatgggaagatgctgcttctaggtcagctggtgggttggaggttgggggctgtaattagcagcagccttagaactgggatgcctttcaatccctcctggccccttatctctgtggggcagtcacaggacatcatctgttttattcaaagttgggacttgcagcaggagaccctgtcctgcatggagtaggggtcctctgttgacaaacttcttggtttccagctcttccccatctgcagcaggcctctggataaattctctctccccaggaccccttctccctccgatgggaggaaggacagaacacagctcacagcccaagaggtgggcagacccagtccagctgtgactggagctggttttggcttggggctcatgaaacccactcagtgcagacatcagctgcccagagagccctgggctgtcagcagctgggctccacatagttcccagggaagaatccagtcccctctgagctgacgccctcgcaccagccatcggagtagcggcgagtgacacagatgacagtgccctcagagaaggagagctcattgtccttctggctggtgtatgggtacagtgtcaccactttctccaagtatgaggcaggcacccagctgggctcatcaggcccaaatcctggtgggggtggaggcagccccaattcatctccatccaggggtggaggaggaggcaggtccagtggcaggggcagctcttcgtccggtgggggtggggacaactcctccagcgtgggaggccgctggaacacctcgacggctgctggtggaggaggtgggtccaaggagctggggagaggtggggctggaggtgctgcctgccccttgggcgtgggggccccaccgacaccttcggcgctgccggccgaggcca

SEQ ID NO: 159549 - DNA, 914 bp, Homo Sapiens
ttttttttttgcagaagacaaaagcaggtttattagggccctggggccaggaatgcctaagatatgagttaaggccagggccgtgagaaaaggtgactctcctgaggccaaacctttgcatctcagaagccctggctggagaccttaggagtcagttctgggagggacctggggatacagaggggtctctcctgaccctgggatctttgggcttttgccaggattggggaaatggtctggggggcagggagccttgaatccacagccttcatttcaataacgaccatttaatttgttccttggcagactgaagaacctgggccacactctgttcagtcaagccgccatcatctgccctaaaattcaccttctggatcacttgctgggggtcactctccagaatcacaccgccatccacaatctcgtccagcaccaagaaggctccgtccatgttctccagcaaccagcgcttctccacgttcttccttaacatgtggttcagagactcaaacaggcaggtgagaacagacatgagcatcagctcattctcgtaggatgagcccaccacgtataggaagaggtcaatgctgttcttgtagacgatggtcatacccccaaaaaatgcaatctcactctcagtccggctggtcttgttgaagacatttttctcgaaaaccatctgctccttcatggaggggaatgtgtcatcataatacttggccagcagccggcgcccgtcattatctaggatgaaaacagccttgatggtgtagagggaaggttcctgcaaccgcagccccgagggctccccggctcgagcaggcggcgccgggcccccggcctgggccgccgcggccccctcccccgggtgcggacgtggccaggcctcgggccgctgcattccgctcgccgcc

SEQ ID NO: 159550 - DNA, 1000 bp, Homo Sapiens
ttttttttttttttttgtgattccaaaatagagatttatttattaaggattatttagtttctgcataaaaatctccaattgttcctcattgggttttttcttttaaaacacacatcaactcttttggggttgctttgtttgccccagcactttaaaaaatacagctctttttagcgccaggaagaacagttaaggttaaggcagtgaggcgttttcttggatcttagcagctgaagggttcatctctccccgtcaagagaatacacacggtaggtagtttcttaggttggaaaatctgtccctgaaggaaataattctgcagaagaatgcaaacggagtcatctatggtcaattgtttgtgccctatagctttgaaagaaacgcctcttggtcatcaagggcttgctggttggtttcagctgtaaaacaacaacaacaacaacaaaaaacaaccagaaaaaagaaaacaaacaaaaaaatctgtctagcgagacagaaagagcagggtttacaatagtgctgtgaggctgggctgtgcaaaccacatgagaatacacaccagtttgctttttaaaaaatcccacataggggccctgcataattttaaatcaaactctttatagtccttaaaataacaatacagcgagagcctcataaggtcacgtgcttttttttcttttttttcttttttgagacagagtttcgcttttgttgcccaggctggaatgcagtggcgcgatctcggctactgtaacctccacctcccagtttctagcgattctcctgcctcagcctcccaagaagatgggattacaggcgtgcgctaccatgcctggctaattctatatttttagtagagatagggtttcaccatgttggtcaggctgatctcaaaccctgacctcaagtaatccacccacctcttttttttttttttgagacagagtttcgctcttgttgcccaggctggagtgcaatggtgcgatctcagctcactgca

SEQ ID NO: 159551 - DNA, 1000 bp, Homo Sapiens
tttttttttttttttttttttttttttttctctggtaaaacaatttattaccaaagcacagaggtgtcaagggtaggaggggtcccccctgtgggccggcccaaccccatccagctttgctaggacactggctgaagggcaggccaccaagatggggaacttcacattcacgggagggaaactggggccctccgggaggctaatcaggactgatgagtatcctgaaaccagtggcaggaatgcacattccagggcttgttctagaagcttatctgtgattaaacagcaggccttgagtcacattacttcatttttttttttctgttgcacactgcaaatggaaagttctggattccacctagggcaccatcgggaggccaatggggtcatatggagacacacgcagatcctgcagcaaagcttctaggttgttcctcagcatggcgtagggcggcttctcctcatacgtgagggccatcaccaccttcaggtacttctgcagggtctctgagggcctgatccagtgaccgcagggtcccacgaagggccccggcttatcaacaaacttctgtttttgcttcatgatgtcctcagtgttgggaaggcaatttgtccatggcagaaacccgtagagccacttcagcatgcagtagcccaggctctggaggtcgctgcggcgggagggcccgcatcccttgtgcaggtccatgctaatgaactcaaggtccccctcgtgagggctcctgctgccttccacgtaggccacgtgtttgccacttgggcaatagcggaaggcgaagccatagcctgccaaagtcacctgactctggtcctctggatccacaaagatattttcagctgtcacatttccatgaacatactcattctcatggaggaactccagggcatccagcagccggcaggccacctgcagcacagacctctctgacagcacatgctttgggctgacatccagggccgactgaaggctcctccccag

SEQ ID NO: 159552 - DNA, 1000 bp, Homo Sapiens
atgtgttaattttttattaaatagcaataagatacttttataactcaataaaattattcaatgatacattcggaaaataaatgtataaaatatgaaaaagtactaaaaagcatttttcagtacttttaggtaagattaatccaactaaacactagcatatgttatacagtaataataagtggaaaatacaataatgttgagaaagcaaactcaaagcatagatcaatgaaaaaattgagaaatggacataaatgatttagtatttttaaagagagtgaaaaatcattattttatgcttttgtgtagcgttagatgaattaaataacatatgcacatatagctttgcgatacaaatttccagaccataggttgtttcatacttagtattaaaaggcttaaataataagtcaataagatagtttaagaagagacaatacaaatgtttcaatgtcattcttttcatttgacaacttgttattcttttcatttgtcatataagcaaagatttctcataactaaaaatgaatttaatttagtacattttggattacctaaaatattacattctaaaacggctttacagggtataaatggacaataagtatcttatagttatctaaattagtttaaataatttccaataataacatgctgaaatgaatttctgaatgttggtatctttttaatgtgcttttctccatcttttggtaaaatttgcaattctcctttttcaaaataagctatccatagttggagtcaccaaagagttctggacttttttctggtttttcatcaacagttatacctaagtttttttgtcaaaagggagtatttgaaatgaagcaaatattcaatatttttaaacagaaattatttcagaaagtttctagaatatttaacgttgaaaaaaaaccctgaaacctgacaccgtataccacaatatacaagcaatagtagtatatcattttacactgattatcataataaaagtcaaattctg

SEQ ID NO: 159553 - DNA, 1000 bp, Homo Sapiens
tttttttttttttttttttctcataagaagagagttttattcaacattatggcatggccagtgtaattgttccaacaaagggaacctactttggtgcccgaggaaatggctgtttgtgatgctggggaaaagtcaagatgctgacgcctaatggctgttctagcctttccaggtttgtaacatgaagatggggaaggaaatggcaccactgctgtttgtaatctgaggaactcttggcagcattcactctccaaagcagtacaaaacttacaaagaagtcaaaagtcttaacactcccattctccaggaactcttgtctgtgtcatctggtaggagggaggaatcctggttccctcaggtccttgtcatgttagctttttgatagcttcaatccactcggctcgctcagccttgctgctggcctgaatgtaatagtgtgtgtcatccttagtaatcactttgaagaggtttccctggacattccctttaaccccagtgggaacgccattatcttccagagcagacacgagtgaaccacgaagagaaaacccacccactggcctgttctcttctttggaagggtcatagtaatgcaggaaagctggatccttccttagaacaaagcgacgcaccttccagtttttcctcttgtgtccctgcttggccaggtagccttgtttcaccaccgtgccacttaactccacagtgctcaggctaatttcttccttggggcttatcttctttttgtagctctcagcaaaagtgtacagggctgtggagtcatccaggaactgctcggccagatccccagagcgaatggctcccatgcttcggacacccacaggcctgaggaagttctcctccatgagcatggaggccagggtcaccgcctccagacggctggccgtgaagctgttggagatgagccagtccaccagggaggagccgaggaaggtctttttataggtgcttccctgctccatgttggggcttgaacgga

SEQ ID NO: 159554 - DNA, 1000 bp, Homo Sapiens
aaggtaaaaggctttattattcaggatcagctcaaagtctgacatggacacaggcagggataattatctcattacagttgacctttggcacccatttaaaagtactagctttccaagtgagacatgttatacccagtagactcggtataatttctgacagccaaatgtatcccaatttcactcagtagggctgccaggagatgggtagggatacaaacaaaatcatctactttatcaatcttttttttttcatggatttttttcccccattggctttcaaagcaagtgagataaacagcgttactggcagatattggtcataaataacatcttcccaaagcccaacagtcaaaaaacaaacaccaaatataagcagattaggcagatttcctaaatattcagttaaggctatggtgtgcttggttttgaccagagcaattctatggcttccttttatttttctccctggataaaactatgcttacttgatccatgcaatttcagttgttacagctttaacttataagatcaaaggaattaaaaagttgtcagaatagattttcaaataatgacaaaaactgacataaagtctacacagaactgacataaagtctacacagtcctcagggatatggataaaacaaatgaagtttcatgactggaagggggctcccttctaagtaaatagtacatagaaagtatgtaaagcctctttccatgaggttacaaaggtgaaaaatataaaacaatggttcaagatcactgatacataattgttgaataaggggagggatgtttaagatattttgcacattattaacttagagtcagtctatacactctctgtattaaatatctagagaaaattctattactttttggctcagggctatctatactaaaaggctattgctttttatgtacatgaaaagaaactcaagatttatgtttctggttctggattttcagttaagagctatattctgttacaaaaatatca

SEQ ID NO: 159555 - DNA, 1000 bp, Homo Sapiens
ttttttttttttttttttttttttttctttttttttttttttttttttataactaaaattatgtaatcatttatttataaaataacaaaaatttatgaatagatctgtttattgtactgtgaaaagggtcttggtacatgaaacattatatactttgaggacagcattcagaactgttaagacaaaagacaaactataattttaaactcaatcttgatttaagggaaaggctataaattattggctgaaaagtattcagcatgaactcagattctatataagcatgaaagagtacaaaagatgttggagtccagtaagcccatacctaaattaactgtaaagcttcaaggactttttgtttatttttatatactagttttcttctgtgacaagttgattttatctccaagacttaaggccattccctggctctttgcacgaattcttatatggccggtaacagcagcatctggtccctggtgaattggcttctcaatgctgacatttgcaagtgcatcttcaccaaatatggaacgagcataaaggttggctgccataaagccacagtaaccagaaagggccttttctggagtcaggcatttcatattggttgactttaatatgtgctgtaagtagtcatttaaatcaaccatgttggtgttaactgtcactttgttttcccattcaaattcggcccacatctgacggaattctgcatcagtgcaagttgcaggctggatatagtccatgatgtcgatgtgaatatcactgagaaccacacaatttctgtcacttgctgctccagagacatcataaactatattaccaaaaattattccattttctgttgatgctactttgacgttagctttaatatttgcgaagtcatgaggagcaagagtcaaaggagacggcttttccacaagtttcagatcccctagtgtagctagttctaatgtgcaattctgcaaagtatcactggtttggttcacaacaagta

SEQ ID NO: 159556 - DNA, 1000 bp, Homo Sapiens
tttttttttttttttttttttttttttttatgcattgttctcaaccatttaatttattgaaaggagatgctgcaacagttcttgatttagcagcagttattctcttgtttacatagttatgtttttttgttgttgttttgctctgtactggaaacaaaaataaagttttctacattattttcagccttgggttatggtatagtttctttgtgtttgtcgtaatatgcacattgtccttctaggacctgtcaccccaccatggagaaaagagtcttttggttctttttaacataagtgattagtttaagagtatgctgaggagccactgggcttaaagaaggatgtaaataagacccaaatacatagggaccaggcgctgctttctcatgttcacaaaagcagtcctccaccactgaactccattctctcagggggctcaatgaaggctaaccaatccgatgcatgtgtaggtaacagtcccatggactggcacttgtaaacagccaatgccaaacccatcaggttcccaatgagatagaccaaaccctgaagaaacttctggcttgaactttctaacatcttgaaagtggctgaaatggccataagtgcctgaatgggtcgccaggccatcatacacaccatcatagtagggaagatggagatagtattgcctgccatgtacatgatgaagagattcatgggaatctgtttgaggggacccaaggcgatgtcccagcagcgcttctccaccaggatccggtctgtctcttgcacgctggtatcaggcacttgcttgtccaagtaaccgactgggtagagcgagtctccctggccactgccccggtcacttcgacccctgctgcctcctccaggcccgcttagctcaatggcccacttgaagcgccggcctcggttagccaccaggcccccctgggccgtcatggcaacagctgcgtcctatagcctcgatgcttctcagtccaaagcgtactccacaaca

SEQ ID NO: 159557 - DNA, 1000 bp, Homo Sapiens
ttttttttttttttttttttttttttttttgagagaaataaaacaatttaatgatggcttccttgatttacacacaactctaagacaagaggacaaaattttctctccatgcactggtacaacgaagttcagggacaagaggcaacccaagtacaggggctgtggtgttcagatccacgctcagcctcgagtctcatgttccaaccgaccgtctggctcagtgactgtggacactggggagaggagggactgcccagacccctcaagtgcaggtgaggggaccggcagcagagtatgcatgggcactccatgccccagtgcgagaagtgcacaggggacagcgaacaccagcttccagtgcaccctgaagacccagtgggctcagggggcccagctctcccatcagagctgtcctcagggctggagctggggctggggctgaggcgctggggctgggagggaggtggtgataaagaaccactgcagaaaggaacacatgctgaatgctgggccatgctttcctcccagacactgagttcctgaagacccagctttatcttccaagggtaacaacattcccaagactcagagctggaaggcggcaagagtggagccaggagagacagatcgcatccactcctgaggccgcctcgaatgtctccattcccttctggcctgccttccccctcccttcaaccccaaagacccaagaagacaacggagatcagagaccacatccctcttccctaatcaaaatagccaagtacaacatttctaaagttagggagaaggaggaaaaatgccacaggcttttaaagggaagactggaaccgagggaagggagaagtagccccctgctttgtccagcctggaagctggcagccatggtgttggggccttgacccaaccacaccagcccatctagctgagcatcttgtgccgatcgaagactgtcttccgctgctcctgcacctgcagcttccaccgctgctgggcacct

SEQ ID NO: 159558 - DNA, 1000 bp, Homo Sapiens
tttttttttttttttttttttttttttttattatttatagtaaactttattttcattgatatttcacttaacataatttcaaagtcagtctgtggtctaagatgagcaaaagaacagatattgtaaatctcctaaaagactttttttcacactgttcctcagagcagggaatagggtttcagagccctgaaagctgacacctaacattttacccttgagatttacctacagatacagaaagaaaagacaacatcaatatacaagaatcaagctctatgagggtcttattaagctcttgtgttacatactcgccacctctgtaggtttgtaatcatgactgattttccacctctctgccaagtttggtgtctttttttttaggtaaaatgtcagatgcaaaaatgctgcacttatttctcttaatatattgaaaatagtggaagatgcagatttttaattcttcatcagtctaagctggaacatgacttctgctaatggggtctgttgaacatactaactccaactttggcgaccatcagcaaactggcacctgcaattaaacctgcaggcatgaattttccagagtggtagaacctcattcccataatgccagccaaggtaccagatgtagctaggaaaacccaaacgttccttggatcctgagacagctggtaagcacccaggccggctagactgccaaagagcagccctgcagccagggacggcacgctgcctgcttttacatagccaatgatcccaccagaagcaaccagtgctgcgtagccaaagccaaaccaatgcaaaggcactactgagccagtgtcctgcatttttctcttctctgtccagacaggagactaccccaggcctgcaccggtctcacgaaggccccggctgtctacaagggcgcgcaagccgcaggaatgactgcgaggtgtcgccggaaatgcagcggcgggcgcctctcgtcccggtggcggggcgaggagaggggagcggc

SEQ ID NO: 159559 - DNA, 852 bp, Homo Sapiens
ttttttttttttttttggggtaaggatataactttatttttttccaaataaatagatgtctcatatgaactaatttagaatatgatcatctgtccagtcttaaacacttttagccacaccaaatctactccctcgcttccacagtgaccagactggggctcttcctgggtggtctggcctcagttccctgcccagcagcatggatgctgaccaaggcaggggcttggagaactggtctgtgtaccctttaaaggcagctggagatagggtggcggctcagctggatagcaggtcccgcaggtcactgttgcaaggcagcaggtcacatgctagccgtgcctttcggtcccggatggccttcagggctgggctgtgttgcaggaggagggagcagatgtccccgtgacccctctcagcagccttatgcagactggtcatgccgtcgtcatccaccaccctggggttggacccatgtgatagcaggagccgcgtgatttcagtgtgcccgcagtagctggctcggtgcagagcagtggcacccccgtgggtctgggcatcacacttagctccgctttccagcaggaactggcacacagcgtagtgcccattgcggctggcatagtgcagcgcagtgtagccggccgagtcgggctgacttgggtcctcggccttctggattaaatgcttcactcggcccaggtctccattcagggctgccgaccagattcccctctcgaagtccatctcctccagcgtctgctgtacgccgagcaccgcgctgggatgcgagcagcagggcccgtccgcgcagggccgaggcgtcgccatcccggccccggcgtcagtcgatcc

SEQ ID NO: 159560 - DNA, 1000 bp, Homo Sapiens
agaagcccaaatggatggaaagagtacagcctgattccaattccagcagccgaggccaggaagaaagggggcagcagctccaaacgattgcatttattataaacaagtgtacagaccctagactcagaaacacaacagatttgagctaagacagctctggtgaaacagtaatagagggaggaggaacacgaggtattcatgtctgggccagagctgccatccagggccccacaccccacctttggtccagatggcccattggcccaggtgtccctgctgccagaacaccgtggactggggtacaggagttgttgcatattccatgaggctggtgtcgggaagcagggactcacagttgccaggttgtccatctctgagccaatttccctccacaacccaggggtttcagtctcatatcaactatcatgtttgaaacagaaaacaggcaaaatgtttggctaaaataaaatgaaaacactgcagggaagagaactgagtgtgctggtggacaggagccctgctcacctgtgggaagggcagggccagcaagggcagcagagctccctgggggcagctaggctgtgtgtgcatgtggccctccagctggtcccaggggagatgcggggacaggggacagtccaggcagacaggtacagctgagtagggctctgcctgaggtgttctggcatcaggaggctgcctgatccccaacaggcatgacaggctccagggagcaatgggacatctgcccaaaggatcaaagtccaacttggccagatcccaagcttcgcctgcatcatgtccctggctctgcaacgggtacccccaactccggggacgagccatggcctcaagcagcagctggctacgctgccgaaaccaggacacatctgcatcacacagaaagctgcgccaccctggtgtgacaggccctacttggtcaccctagggtaagctggagaagaactccagatgtgccctggagaggcccccacctctc

SEQ ID NO: 159561 - DNA, 1000 bp, Homo Sapiens
tttttttttttttttggagagaaaacctttatttgcataacaacaaacatgggtgaagtaagaagaggcatatgaaaacaagattaaggtggaagaatccttggtgggaggagaggaggagaaagcagaggcactcttgtagccataaacgcatttccttgttggcatctggactgctccctcctcatgctccactgagacttctctttgcttggctcatagtctcactgctggccctgcttccttgtctcacagtcccagagtgctccctccccaaacccgatggaggagcgcagcttcataccctattgtgtgggacagcagctactcagaaggtgttacttggattttttgcagctgttagtgattctgacacccttggacctccaggagtagctcctcctgccacgagaggactctggcttttctaataaggaaggttctggccaatcagtccaagaaaggcccggattctcttccaaggtgttgtctctgcagaaatgttcctcagggtggaaggtgctgctgcagcaagggatgtcccctgagttttcaggtatgtagtctgtggctgcagcaggtgaacactcctcacactcccatttcttactgttagatctaagagaggagcagtccctgtgggttccgtgggatccgcatgtagcacacagaatgaggcaccacctcccttcatcctcaaagctgtctctgccttgttcatacagacagatgggggcatcacagtgctgatagcgctgatataagtctgagaaagcccctggctcgagttcccaggcagcatctctgtctggaatatgaattcccattctcagcatttcttgaggaaactcttttcgattgttacactgtggacatttgaagaaatgctttgctgatgtgtgggcatatttctgtatgcacttgcggtggtagatggcttgactacaacacgggctctggatgttctcaacactctgttgggataagtcttcacaacata

SEQ ID NO: 159562 - DNA, 1000 bp, Homo Sapiens
tttttttttttttttttttttttttttttttaaatgtaatgtatattttattatctatttcctcccttttagaatgtaaactctatgagggagggactttttttcctgctgtttctgctttcaaagaacaataccaggcatatagtagccattcagtaaatatatatggaaggaataaatgaaaattgctaatcctactgttacatcagaacacatctcctaattttattttaagattttataggaaaaaatacaaatacaaagttaacaaacattgtatagttcaatcccctcatgcaagaaggcgtttttaagcactgggccacatagacaactgggatttcctgatattagggaaataaattattaacaatttacattattagagcattagtattgacactaaacatttatgaaatgctaccatgcgctaagcacttcaggtactgtatctcttttaattcttgtaactattgagatggctagtggtgtcatttccattttacagagaagggctctgtcacaccatgcagcccactaccagcggactccgtagtttctatattgtctccttccctctatgtgctctcccaattgggaaccagaaggtagggtataaaataggaggtgatgcgtttacttttcagtgtccaggcatatcaaggtttgaattaaaatttgctgaacatcatgtaacactaaaggtcatcctggccatctttctattcgtaataacattctaaagagcattggatttctagatgcaaatgtggaaccctacaaatgttcatacctcttgtaaaagataggaaaatgttttttaggaggcatgttgtttggggacttttttgtgaggatttagaacagtttagtcagtctgaatatttattctaccaaaccctgtacaatagcattacatttatgcagaaaataatggatataaatgattatgagttagtgatttgttttttcccaaaaggccattagactaggtgtctta

SEQ ID NO: 159563 - DNA, 1000 bp, Homo Sapiens
ttttttttttttttttttttttttttttttggatttttaatctttaattttcaagatggttaaaatattgaaatgtttaagtggataactatattattcataaaatgactgagtgaaaactaatatactatgagatgaaaagtacttgtcagggattttcaagcttttgctcaagtaattaccatgaagtaacaatttctagaaatgaagaacaatctgtgaagataaattaccattggtgtggggaaaaaaagccaaacagaagtagaaaaaggtgtagctggcatacaaatgttatctacagtgtatttatatatatatttttaaacttttaactaaaaagtaaactttaatgtcgaaaatgcaaacttggggaagacagaaaagatcacacacaaggctgtcacttcacacgtggaaggttgcacagcggccgggcagaggcgcttgtcacacttcccagatggtcaggcggccaggcagaggcgctcctcacttcccagacggggcagcagctgggcagaggtgctcctcacttcccagacttttatattttttatacttgaccaggtctcttatgtcctttttctggaaaactacttttaactactaaagtgattataaatgaaaaagtggccaataaagtgactactatcctcagggctttaaaccagttgggataatgtggtaagagaaaaagttcaaggtggaatgctactcccatacccattattactgtgactatggcttcactaagtctttcagaaataaggaaggcaaaccatgaaaagaaaagaggagctgcactgctagctaaattaaggtagtctggtttggctggactaccttctggtagagcaaaaccccatctgatcccacccaagaaagataggaaactggctccataagccatctgagtaaaagctaatatgggaatataagtttttgtcatcagcatgaccagtggtggagcaacgaaggggattagtcctgccagagt

SEQ ID NO: 159564 - DNA, 716 bp, Homo Sapiens
ggccagcagggaggaaaaccgcagcctggtgccttctgcgatttaggatcaccttccccaacagaagtagagacctgatggaggatgcagagcccctggccaggtctgtgatcaatacagcctcagggtgggtaaagaaacctttaatgaggattcaaggttaataaggaagacgcagagggccagcactcagccccaacctcctcacgtgtacatggctccatggaggttctccagtcggtgttgctgctgctgttttcgagccttatctcgtctgtgctcctcataagtgtcgtcatcagtgggcagctcatagcggcacaagggacaggaatttgtcttgcttagccagggcagaatgcagctggaatggaaaaggtgatggcaaggcatctcaatggcagtctcctcctcctcaaattccaaaagacacacggggcacttgagctcagcctgagagcctctgatgactgtcctggggaggttctcaaccacagtcttggcagctggtggaggcaggtggtggtcccaatctactaccaaccccaagtcttcaaagtccatcctattgaaaagtgaccttgcgagctccagcagcatgttggttcgcgtctcctgctcagggtccgacggctcgcagtcgtgttcatcgaaataggacgccatggctgcccagccttctgacacagccctcggaccctgctcgatagcggcct

SEQ ID NO: 159565 - DNA, 676 bp, Homo Sapiens
tttttttttttttttccaaagaagccccattttattacagagaaaatacaaagccgtttcctcacagggaaaagtacagtttcccttctccagggtgacagatgagccttttccgaagttctcagctttctcttctatcgaaacttcccatgtcggttaaagtgtttgtagagatagcggatgcgtttattaaggttgtgcaggtcatcagcgaacattctacttccaaccattttcctctttcggatacaacgttgcaattcattccctttccaacctcgaagccatatgggccccctgatcagttctttggggtgcttttcaaagtttcccaggatcccgatgttgtcatacactccgaacatggcccttttctcgttccaacgatcaaccactttggggggcgggagagtgagccttataccgatcaatctaggcacaccaagagagaagcttctgcacgccagaggcacccagtcccacaggcgcctacctgccccggataagaggttccctgccatttctctagtctccccccttcaacagcacaccaaataagcccaagaagatgacaggaaccgtccccgccaacttcacacgagtactaaggcgaagacagccatcttgggccttacccaggcagctgtgggcgcaccgcccacctacgccccatccg

SEQ ID NO: 159566 - DNA, 1000 bp, Homo Sapiens
aaaaccaaacacatttccatttagtgacaggaatttaagcaaggacctgaagtagaatcaactgattcacacagtagtaaatacaaagtagaacaatgatcttggcttcgctgtctggttcagtggtctgctggaatgcaatacacaagttaagtcacactgcagactgttttctagctgtggccgctggatgccacttctagcatagtagaactatgttaggaggaatgggaaaagtgagcaccacttctcaccatgttcccccctcctgctgccagtctctgctcccatgttggatgcagcagagatcacccaccagttggcccaggacagaccaataggaagggtccaatcactctaactacagccgaactcacctccacaacagtctctgtggctctagcctggactcctttacaggaatccagctctggcagtggcagctggagagggtaatagggcctcctgctgaatgaaggaagttgggtgaatgaatgggtgagctgcagggttcacttgcaaagggaccaggagtgataaggaaacaacaactcattcaggcagctgcttttgacctctaactcccaaacctgcctgttgcatgaggggaagccatctcccatgggagcgaagttaatggggtgggaggctatattctcactattgagtctttccaggagtctcaaggcacaaggctcctggtttcttactctcaaccaccccctacactctttatactctcactccttgtgcttcttcttgtgcttcttcttctttttcttcttctttgctgccttgctgtcttttgatgtgtgccttgccctcttgcctgtatcactctcagagtctgagctgtcagagtcagatgacttcctatctctatgtttctttttcttcttctccttctttctttttctagaaggattccttgtagggtcaggcttctcaaactctgctgactttgcctcttccttttcctcttcctcatcaggtatcagag

SEQ ID NO: 159567 - DNA, 1000 bp, Homo Sapiens
ttttttttttttttttttcgggcactgaaatcttttattcgttaatttagtttctggcaagtgtttcctcaaaatcatcatgtagttccttgaaccgtaaaaccacacattaaaaatgttattccactgaaaatgactcctatgcaaatatcgacatgtgatgtgtgtccaaatgccagagcattttgagaaaagaatcctctgcaaataaaattaaggtataagctgagtcagggatgatccgattcccaccccaggaatgacccggagctgcaccaactcagcgaggttggagctgaaaccctgagttaatgatcaaaagggacaagacaggaaggcctggggaccgtggacagggaagtgcgcagccctgattgccagtgggcggaacagggtcaggctcggggaagcaggaggggtggtgggcggtgggcgctgagcagagcaggcctggccgaggctgggggccactgtgcactgaggccagaggagcagggtggtgggggcagctttggaaagggactaaaaagggcccgagaagagaccactctggaaaggtgcatgtagaggccatgatcaaaacaaaaaaatcaagtttcctacgttcatgatagcatttggctgacaatgagttataaatacttggattctatcttccagataaaaacaccttccaggaaagggcactcacaacaggcgtgcccagttcccagtggggagggtggataaagctaagtgtttccgcttcaccactggaggacggttctatgtgggcggtcccatgtgggcggtcccatgtgggcggtcccatgtgggcgttcccatgtgggcggtcctatgtgggcggttctatgtgggcggtcccatgtgggcggtcctatgtgggcggtcctatgtgggcggtcccatgtgggcgttcccatgtgggcggtcctatgcggcgttggtgtcctgggccctgtgagctctgcagggttccagggaaggaaactgggggtgc

SEQ ID NO: 159568 - DNA, 1000 bp, Homo Sapiens
aatgcagggcagttatttatttgttcaacaaatatttattgttcatcaaagacgagccagattttatgggcatttgtgatggaggctggccttagctttaggagaaggaactccaagagcagtagtgatctctgagatcaccttgttcaccctcctcggggcagatttagtcaaatccatcccaagctcttcaaatataccagcaaagaggttttttttgttttgttttttttttgagacagagtctcactctttttgcccaggctggagtgcaatggcgcaatctcggctcactgccacctccacctcccgggttcaagtgattctcttgcctcagtctcccaagtagctgggattacaggcatgcgccaccacacccagctaattttgtatttttagtggagatagggtttcaccatgttggccaggctggtcttgaattcctggcctcaggtgatccgcctgtctcagccccccaaagtgccgagattacaggtgtgagccaccacacccggcccccagcaaagagaatttttaacaactgctttggtctccagagccagttcttgtgccctcttcttactgatatacccatctcaaacgtccttgctactctgtgattgtagaatatctgatcaaccttctgggagcgagaaagtagttgtgaatggggaggtggccaagaaaagaaggtagactcaatcgtctggtgtttacgggggattcaagtgaggcagaagaaaaagggagcgggccaaggaaagaaggtagactcaatcatctggtgtttatgggggattcaggcgaggcagaagaaaaggatgatatctcagggacactcccttcatctgagacatcttctccatctgtgaaactggctcctgtgcacagaagggaggcttctggccagaggtcaaaggtgggctttgcccaggcttgggaaacggctgattcgaaaaggtgccaagtcataagatggtgttaatttcatgcttaattc

SEQ ID NO: 159569 - DNA, 1000 bp, Homo Sapiens
tttttttgaagagggacatggaacactttttaatgtcaagtcagagacaaccccaccctcccggatcccccaatccccctttccctcatcacatccaggacccctccccgaggactctcaggttcccagactttcaggggaggggaaaaaaaaaaaagattacctaaaaattgcattttcttctctttcatacacactcacacaaaggtgggaaataaaataaaccaagaggattaaactctccagtggtcacaaaggcatcagagattcccataatgggctaaagcaagtgggtactgacggtactgcttgttcagctgcttgctgtctgttaacgccacagggcagaatggagaaagcggggccacctggggtggcctagcgcagagccacacctggaaagatgctgcgcccggtattagttgtttttttttttttttatcctttcactttttataaatgtctctgacatgtaaataacccaagaaaataaaaaggcaggagctgattacacaattaccagtaaactctatcatcttttagaagatcaacacacagctaacgccatatacagcatgcagtaatgtctgagaaaggaccctgcggagaaataaaatggctagaactctaacaaaaaaaatatatgtatatatatactgtataatatatgtcatcaaaggaagcatagccaacaaacccaagatacagtgcagatcacctttccatttctaaacagtgtgtagagagcatagtattgtctgcaagagatgtcagaattgggaggagtccgtagcgctggtggagatgttggttaaatcggatgcattttttggtggatatgccaaatcctcaccaggtgattagtgcctggtgtgtggtccaccagttgtaaacctagttaagaagtatactattcatttttactgtttaacaaacatacttctcttcacccttctcagttgtatttttttagttttgtcttgtttttgcagtaagttct

SEQ ID NO: 159570 - DNA, 1000 bp, Homo Sapiens
tgagaggatttggggtatctgtgtgtctgtgtgtgtggacgtgtgtagacatgttgcgagtgtgtatgcaggtgtggatgtaatagtatgtgacacatttttttccgtcttttttttttttttttaaacaaatgaaagctgccttccctgcagccctcaggtcacctccagggaggcaggagacacgcggtcacactcagctcgggacctcaggctatgccactgctccacggctgtgcggtgcgtgttgagcatgcgcctccagtggttggtctcagaggggcctgaagagtactggccaatgacgatcctcccgatgaagtcattgctgctcttcatgttgtggccgaaaactgtaaacactaggctggcattttccagttcttcttggggaactttgaagctgaaggattcattgtagaaaggatcaattgtgccccttaagaaggacgtcttcttggttttcacaagtttgagtccatgcaccagctggattttcacaaaggggtctgaaccttggctcacatctgtctgaagaagttgcttggctcgaatgacatcaacattcagtctgccagcacttgggagataattcagtgacagaagcagctcccccagctccacttcattctgagaactgggaatcagcgccttccaccagtgcccgcccttgaccaggtcaacttcacacaaaggcacagaaactttcccaatgacacagtggcgggagaacttatcaaaatccaccacggtcaggagcagggtcctcctctgggcctccaggaaggggatctcgaaggtgtagcgctcctcaaacacgggcttctgggtcttgcgtttgaccccggtctgctttgagttcttctggtctggcaggagacagatcttgacgtaggggttggagtgcgccatgtcctggcgcgagccatcgtgggagatgggaggtggcaggtccctggcctcgatcacgcgcacggtgaggtggttgtgcagcaggtcg

SEQ ID NO: 159571 - DNA, 1000 bp, Homo Sapiens
tttttttttttttttttttttttaccttttagatttttattagtagttctctctgaagaatcaaaatagttagttagcaaattattttagattcaagactgtatatcctttgtatttagatctttaatgatgtacaacataatacaaaacaaaccagagagactgatttctatgactaggtgttattcattgtgtcatcctaaagcagtgggctggaggggaagctgttcaaggagaacagaggtggagttagtgctggccaactaaatcatggcctgtctgcttacccattcaatgtgctgggaaggggccaatgatttcttaaactgtttcctagagcaggggctctaaaaccctgggtagcagaggactgtggtccaaaccaagccaaaagaaacaggctggggtagggaagcatggtgactgcctggcagaaaaggcaaactctgggccccatagggaaaagtgcattctttgcacctcagagatattgcagaaccagtgttaacactatgagactttgttaggaggggaaaaaataaaaccctggaagaatctttcacttgaactcaacttgactggagttcagtccaccagtctcaggggaagggggaagcacctagctccacagcagcactgagtctggccctcccgccccatctccccagcccctctcagcaactaggccaggcttcagctgaggacataaacaccccagaaagactagggtagtctctccggagggctgaagtgggaaggacacttctcaaaatgcaaatgcgtttaatacggaaggagccaggacagttctgggggcactcacatgcccgaatcttccccacctccccagctcagggcctaggctcacagagactggcgagcagtctccacacctgaccttctaacccccaaaagaaaatccggaagctgccccttctctttccccacaggtgggctctgcagggcctcccagggatggtggttctgcggcagggcctag

SEQ ID NO: 159572 - DNA, 1000 bp, Homo Sapiens
tttttttttttttttctatgtatgaattatttttattggcatttagactatggtgctcaaaagcctgcttttgaataacttcccccaataatggtgctatttatcttcaacataaacacgagccattattttcagtttgttctgacactgaaatagtgataggaaattgccaactctaacagtaaacttttgggaatttttgagctacatatatgaatccctgatctgtggttttctatattttctcataaattcccaaaataaaggtatgtgtgcttcacaactagttatatttacaaatagtgtcactcaggtcttaattgaatcaatccattaaagcattagcagatgctttatggtatgtgtcatgaatacaaatgacagccaatttggcaccttaacagctcacacaggaagagtttctgtataaaagctatgtgattaatttgataagggaatacaagtaccactcaacatttccctgtttacaaaaaaagctataagcagattgggtaaaagaagaaccatccatactcttacccgaaagatttcttaccattactgggcaaatattccatggagtccctactatcaatgtttgatgatctcatattaaggacattgtaggaatggagatagttgcatggataaccccatcggtatatggctttgcagcatggttctacaaagctgagtatgcacagagactgaagctctgggaatgctgcacacagctaacaaaatgttgaaacctcactgacaacccctagcccaggaggaattgcctcttctgctccccctgctaaatggccctctcctccgactccatgctatgaaaacacagcacccttcccttgaactgctacacatcacccacctagatcgaaagttttggctcatctcccattggtggcaaagacctccatatgagctgcaggcacaaaggagggcaaagaactcgattcagatgaagtctaagatccaggttgacaagatttgt

SEQ ID NO: 159573 - DNA, 1000 bp, Homo Sapiens
tttttttttttttttttttttttttttttttttcagagtgggaaacgtgtttattgtttgatcagtctcaggcctggttggggggtggaaggcaggactggggtcccttccccaacaacagcgcagaagccccaggaagatggcgcagattcctgacgacccacagccaccttttatgaggccagagactttacacaccacactccccacctccatccagtcaaggctctgccatggaacagctgatatctttaggctagaggactccattctgtgtaggggctcattcccatctcagctccagaacacggaggacctgaagattactcacggattcctccttcaggcagggctctgcctttgagatgcggctgctctgtgtctgtgtccagggccctgaacaccagcctcaggctctcaccaggtgtctggacaggagtccaggctccctgcaaagtcctgtggtacctggggcacccggcagcccggctcatggatgcttccaccgcgtgtgtttctgcagtgtgttctgctccataaagcggcgagggcagtgtggacactgaaacgggcgttccccagagtgcacccggctgtgctgggccagctcacccgcatcccggaagcggcgagggcagagcgggcagccgtggggccgcccaccacccgccaggtgaatggaatggtgccgtgccaagtggctggcgcgcttgaatgccttcccacagatgtcacactcgaagggctttacctccgagtgggtgatgctgtgtcgctgaaggtaggacatgtactcgaagacccttgagcacacggggcagctgtagcactttttctggcctggagccccactggcccctggctccctctgtgactcctcgtccaccagcactgtgtaggggacaccctgagtgtcaataagcaggtagtggttgggccttggaggagatgaagcctggggagatccgatggaggaggaaggtccaggttctggggagcg

SEQ ID NO: 159574 - DNA, 1000 bp, Homo Sapiens
tttgcaagaaagaaattgtttttattgcattgaggacttttccagaagcctggtggacccacgtctccctccagccccaaaggcagtgcaagcctctactgatcccccacttcaaggtgggtctcccctcctgcagggcccatggaggaggggtagggtgggctgtagggggcccagaagggaggccctggggacagagggagttcactcctgtttaagctggagaccagggagggcccagcctcacctctggacaacacagcaagtcagaggctggggtgtggcaggggctcagctgtcacctctggggtgtggcttcttcccggaaccgcaccagaggcccctggagcccagggagggaccacggagggcaggtgtaacccctggcctggagcacagctctcagagccctgaggctcccggggacagaaacaagtaacaaagtgagaccacgagagaaaaagaatccacagtttctacaaaaagccccaccctccccaagcaccctggtcagctggggaccgccttggccttcacccttttggggggtctgtggggggcagggctggtgggccgctcccgtttggggctggcgggctctgagccgttgtgctgggcgcagggctcctgcttggggccggcggggatagagccgttgatccgggtgggagattcctccttgggctccagcttgggggtgggcgggcggggcaggggtggcagcgccctctccagcacacgggggccgtcccaggcggggatctccagccccaggtgctccatgagccgggtcatgacctcgtcaacgtagccatggatgcggaggtcagcatggcggtcgtgcttggtgggctgcaggttgacgatgaccaggcggcctccccggcgcttggtagccagcggcaggttcccgctgggccggatctgcagcgatgtacccagcgtgatggacaggtcggcgttcctgctggcctcatcggcgagtgccaggtcccggtcg

SEQ ID NO: 159575 - DNA, 1000 bp, Homo Sapiens
ttttttttttttttttccggtgtttgatacttggctttactttataaaaatacacaacttaaatacatatgacactctgtttacaagacataaactggtagatttaacattttcagttatttcaacagaaagaaaatatgtaaattaccttgtaagagcaaagagttcatttatagactctgctttcacagttaagggggaagaacgcccaggggcaatcaatgcaggaagctaaccaacactgtccagctctccagcaaaactcatcttgccaacagggcctctattgcaccgcctaatattgcactgctcgttagacaccatctcacttatccatgtcaccagtgtaagcttttgtcttctctagaaaagtttaatggaaaaaaacgatgtacaaacagtaaaactgtatcttacaattgtgctaaataccaattatgagaagtacgaacctctcttcactttgcaaagcttgcaattgaaagtggttagctatattttgcagctaagttcattttcaaaagttttacaaaacctttgattcagagtaagcttgatggggtacagtggcaaaggaggtgacattcccatgcctagtggaattagttgtaagacgcgcactgtcactgtcaaaggcaacaagcacatggcttacagctccacctttctaacttttggcaaaatccctcccttccccttgtgatgttgtcattgttcaatggggcacagctccttttttttttttttcttttttttaaaaaactgattcagagcttgcagtggctgcttacttactctggctatctttcagaaatttagctgccttatctatagctcatttaactaacagtgaattaggtactagtttataggtataaagaaatagttacttagttgagaattcaatatatgagaacatactagagtaagtttcctgaggtaaaagtatgccttaaagaatgatgtgcaatctataaaactgtagcattttctcttgggt

SEQ ID NO: 159576 - DNA, 1000 bp, Homo Sapiens
tttttttttttttttttttttttttttataggtatatatatatattttttgccttggcagggagaaactcatatcattttttgcaatcataaaaataagcaaaataaaataaaaacatttcatgctcattaaacaaattttagccaatagagaatagtggaaaaccaaacagccaaaatcttatcaataaaaccacctctgtttagtattttgagagaattattattatatttttggagatggggtttcactatgttgcttaggctggacttcaactcctgggctcaagcgatcctcttgcatcagcctcctgagtggctgggggtataagtgtgcatcattgcacctgccttttgggaatatttttaataatcttttgtactgtatgtgggtgtaaaaaacagaagtaatcacatgtatgtacaactttgaatcctgccattttttagagataaatttaacctttgaccatatagcaacttgactcttgatgctaacaaattacctctcttctctcttttatggtgtttattttctatttccattgaacagttgtattttatttgtgtctttcactgtaaatcacctccaatcttttttttttgggggggatgaagtcttggtctgtccgcaggctggagtgcagtggcgtgatcttagctcactgcaacctccgcctcccaggttcaagtgattctcctgcctcagcctcccgagtagctgggactacaggcacgtgtcaccacgcccggctaatttttgtatttttagtagagatggggtttcaccatgttggccaggatgggctggatctcctgacctcgtgatccacccacctcggactcctaaggtgttgggattacaggcgtgagccactgcgcccggcccatcaccttcaggttttactaaaaattaaagagttggtcctctcaggtggagcagttcccctgatgataggggcacaggtggggtgtctgcaagaacttcagtccagtgctgg

SEQ ID NO: 159577 - DNA, 916 bp, Homo Sapiens
tttttttttttttttttttttttttttttttttggcgctgccaaaactcatttttcattaacacggggtggggtcccaggctcaggcccccgggcccgatcatggccccagtccgcacagagcgcccggccctggccgcccgcagctccaccgctcagccagtgatgcgcacatccgtgcggcggcggatccgccgggcccgagccgcctcgggcaggatggcgagcagctgctcttgcaccagcatctccacgatctgctccttggtgcggatgtcaggccgcagccactggcgggacagctcccgcagctgccggaaagcctcccggggacccgccgcatcctggtagcggaactgccggaaacgctggcggaacgtctcgggaccgagtctagagccggcggggcctggtgtggagcgcgcttcagcttcggcctgaggcgctacgctcacgggtgcgggcccgagaggcagctccagggccgcggaggccgcagctcggggcgtagggatggcttcagggaccgcggcgttgggactggaaggctcaggggcaggcggtgaggcctctggcagcgaggagcccacacagttacgctcaggggctgagctcgaaccggctccttccagtttctccggtggcaccgccgcgggactcccagtggccgccaagatcggctccgtagccgccataactccagctccgggcgtcactctttgtccggtagctgtgtgctcagcactgcgtctgcgcgggggtggggtgagcagggagacgtttccggttaaagggcagagctcgcgtcacccttgagggagtcggactcgggaccggccgagagtgtgcggagcttacctgcaccagcgaagcgcctgcggcagccggaagcgaaagtctctggcttctctgcgtcc

SEQ ID NO: 159578 - DNA, 1000 bp, Homo Sapiens
tttttttttttttttttttttttttttctgttattaaaaaaaatcttttattaaaatgctcctggaagggagcaggtggtattgcatagtttgttcagatggcagtggtacacacacacatacacacacaagtggcctggagcaaaagtgcaaaatccgtagctggcctgtgggtcgggaagcctgtaggactgcaagcatgtggtcttgagtagttcacagcccccctctgacctcagctcctccatttacagaatgagtccgaagactgggtcagagatgctgtttgcaatccaacagtagtcctgagacggctgagaggggaaggagcaggcttccaggcccagaatccccttcccaatccttccacccaccaggaccctctcttttccctgcttgtctgctaagagtctgtgcaagacttccctgggacctggcgtgtggtaaacaaaatcagacaactaccacactgcctgccttggacagccttttcttgctaacagtgggatctcaaaggtgtgtcctgatcccatgtctgagccatggtgtcttggtataagctgcggtgacaccaccaaataacataagcaaaattttgctttattaacccaaaatgctttaggttctaaagtgggctttgaacactcagactcattgctgagggtcctgggtcctgccaaaccagatgacaaacgggtatactgtgtttctacctgcaggggggcaggccctgtagcccctggatgggtctgatgctgctgtgggctccctggagccctgggtaactcactggagtgacaactttcttctgcagcctggatcattaagcttgagggagctgatgctgaggttctttggacagagtccttaacagtgggaaaacacatggagaatctgtctgctggtgaaagaactctggggctccttatgctggacaacctacagtccctcccttttatcctcattgagacgccaagtgttggaaataccccttcctggg

SEQ ID NO: 159579 - DNA, 1000 bp, Homo Sapiens
tttttttttttttttttttttttttttttttagacatttcaataaaaatttattgaaatttcagtgatgttttaaagagagggggaaaaatacagaaaaccaaagaactcatcaacaactataacacaaaatataccttcatgaatttgtctttaaaccatctctcagcacctgacttttgaactgtgaatatatctctataggcaggcaccaattcaaaacaccgatactgacaacagtagtaaattccacttcgttttgaggaaatcagagactagcaaatacaaataacaaaagaaaaattaaaaagtcaaaccgcagcctctgccctcctccctccccacagcaatctcagttatattttaaggaatttgaagtggagctggaaagtggcactccttccccaattttggtgaaaataggaaatagcactttcccccacttttggacattaaaaaagaaaacaaaaatgttgcagacaactcttttgaaagggtattggtgttggtgcaggaagtgtgttttctagtgttaacagcaattctgtgacctggaaataaacccaactaaaggaaaacaagaacacaaaacctgacagttgcaattctatttacacagagctatgtacaatgtcaataaattaaagtttaattttccaagcattcatattccacctatttacaagagttatcaaataattacataaatactttgtctaatagtctcacttctttattatttttttaaaaccttgttattgcatatacaggaaagagaaagaactgtcaaagaacgacatgaatcctgctacagagcttagatataataaattcattttatgtgttttgcccactccttccctttaaatccccccctcccttgggtcactgatttgagggcaaaggattgggaaaagggtagggggctatattgttttctctctaaaagcaagcgttcaaaataaaaaccacaaatacattactgtggacatgcaagaaga

SEQ ID NO: 159580 - DNA, 1000 bp, Homo Sapiens
ttttttttttttttttttacaattcaaacttttatttggcaataagttcagagtcacataacacataaaatcaacatttaaaataaatagcaaattcacatctagaataaataggtctgcctaatttgcattaattgtgcctgatatcatacaggcacaatctgtcattccacgagataactggaaaagtctccaaagtcagagttcaaacctgcaggactgaaaacacacagaagcactgtcgcaggttgggttccccgaaagcagatactgaggtggagaatggcgtgcaggaaggttcataggacagtgctgtgggctgagccggctgggtacaggcttgtcagggagaggcactgggctgtaatgtggccacaatgaggtctcactgaccccacaaggggctctggagctgggatggccccagagggtttcccaagttggggtgaggaggccagacctttgtaccccatatggagccggtaagggttacaggcaggaagggggtatgatctggggcaggcagggctcttcagcaggggaaactcctcataagggctggaagtaaatggccagccagcagcactcccagctgttaggggagtatgtccttcagtctggaaaggtcatccgggcagctgagctcagcacccagcactagcacaattacaaactaatgcaatgagaggtatattcaacaagtgtctgagcctgatggctcaagtacacacactggccatacatgtaactatgcccaggaagtagctcagagggaatacagtgcacttattacctacagaactttctcctctctgcatcccagctataaggttattcatctgcatgttctcagcaagggaatcttgccattgccgccaacacaatccattagagcaggggctagcaagccacagcctgaggaccaaatacagcccacagcttgtcttggtaaatcaagttgtgctggaacacagccatgaccatggtcattcccacagta

SEQ ID NO: 159581 - DNA, 1000 bp, Homo Sapiens
gggaggaagggctcatgccccttatttatgggaaccatttcattctaacagaataaaccgagaaggaaaccagagctgggactgctgccgtctgtccggtagagtgaagcaagggggctggaatagggcctgttcagcccctgtccctgctgaaacggctgtgggaggctgggccctgggacgccctctcatagcgtccagcgatccagacaaataggagagccgtgacggcctgaatgccagccagcaggaagaagtagaggtccatccggcaattgttgatgttcccaaagtccttggggcagtgcagccagcccccgggcaaggacagcagtgccactaggctggagcccaacagtgagcccacccccgacaggcagaagaagatgcccatgatggcgccctgcatggagcgcggggcctctgagtaggcaaactccaggcctgggatgctggcaaagatctcactgatcccaatgagcaggtactgagggatctgccaccagatggacagtggtgccgcgttgtacaggacctccccaatctgctgggacacggtctcgttgtggtggatgtagtgtaagcgctccatctccaggactcctgccacaatgacggaggtaaaaccaaagaacatccccagcgccatcttctgcagagcagagggaagcagcttgcaccgcagcagtaaagggtcgatcaagcggtccttcagagggaccagaatcagcaccaccacaacattggccaggaggagccaggcttccgggatcgtgtagctgctgccctgggctctcagggccacagagatgttggccgggttggctgggaaaatgtttgggatgtggaggtgaagaccctgcaggacataggtggactgcatctggaagtagaccatccagtagggcaccagggtcaccatgacgggcaagatcttcaccagcacctggaagttggcgatgtcctcttgcggggaagcccctggctggggagacctctc

SEQ ID NO: 159582 - DNA, 1000 bp, Homo Sapiens
tttttttttttttttttttttttttttttgcagaagaagagccattttattaggtgaggcacatgggatgttacacacgcctggtgggaaaggagagggggcaggttcctcggagagaaggcaactgtgtcatcttccagcacatgggccagccatctgtgagcactgggaagcagctcagcagaggccagccccttcctggaaggcttagaccttgatgacaaactgtagtccgtggatcagcatgttaacaatgtcatgcaccagggtgatgtccaagcctctgagaacctcattgaccagagggcacacgttgccctgaaccaactcaggcaggactttattcaagatccctgtgaggctgtccagaagaccttgaatggggagggggccaagtccatcaagcagagaaatttgcaggcttccaggggaatgggtgcagtcaccaaggaccaggtggatcctctcctgcttatctctcacagctaagatttctgcagtgatgtccagcttcacagccagcctcaacagacttgcaccgaccaggggcgtattcacttggagctttatgccgagagggatggtgacatagagacggtggccatcagggctctgcacaaggccaagttccagcagctgggggtcagtgacctttatgtcaatgatgttgttcaggccaggaatcactgacgtcacttttccaagcagtcccccaaggaggccaccagaagtacctcctccaggcttcaggatgtccaggagcggaaggttttccagaatgcccaacaggcccccagacagcaggccattgctgagggcatttgtcaagcttcctgcaagacctgtgggactcaagggcagggctggattcacattcaagggcagggtctggtccaggggcacgggcaggcctccaaactgggccatggtctgggctaacagcccgtagaagacaatgaggcccccagtttgaaacatctttgctcttagtatctggact

SEQ ID NO: 159583 - DNA, 1000 bp, Homo Sapiens
atcaggttttggaaaaattttattgcattttgtttccatgtggaagcactgacagaattgaaaagtggcagcatgttccacttacttttctgaaaaatcacatggctagattaactttcgccctacccaggacaggattgaataaaccttaactcctacccccaccccaagcaaaagctaaaaaagggggtttctggcaattgcttaaaaaacaaatcaatgtgtgagaattccccgatggtcaataatcatatttgttatttttgcacttggagggcactccctacctccttcacctctatccaccatcaccacctccttcaaacaagactgacacaggaagtgcctctcaaatggaaaatctattctgtcccagtgccacaggcttaggtgtgtctgtggattctggccaatgggatggccatatgtcaactttgaaagggtggggactgtgaggtaaccccagcatcatggtcatctccatgccaggacaacagtctcccaggttaaaatatagataagacacaggtacgtgcacatttatgggggttaactatcagaaagtgaatccactttgaggtttataaaatgagaaggggatgatggtggggctgtatgtgttgggcactggtgcctattgcagtcagaattcacactgcttaattgacatcttgctggggaagagagggagatggggtggtgagagaggaagcagatgaaacaaaggaaaacgtagcttgcctgaaattgtgtaattttttttcctcttgattgtataaggcattttgaactggaaaaacgtctttcctacacactcttccaaataatcacagggaatataattgctgattcagaatacaaataagacctctttcatctttctccccactcccccgcaaaatcattctacacaccccaagcccataaagtacaaggcaggcaattgctttgcgagttagcaggcaaaccgtgtccacttgggggatgaggtcgctgtgcc

SEQ ID NO: 159584 - DNA, 1000 bp, Homo Sapiens
tttttttttttttttttcagatttgttagatttttaataagaacatggaaatcccaatcagcccttcaacaaaattaaaatacagaaagtgaaattaaaagtattctacattaaatgacttttatttaaaaaaaaaaaaaaaagtaactgtgaacatataaacagcctgcagggcactacagtacagctggagagatatacattttccaatgtacctatgggccaatgaatcccaccattttcaaataaatccttaatcagactccactcagttggaaagttttgctgaaaatatttctggataaaaaacaaaaaacctcatgttggaaatcaactgtccttcccatttggaaacattaagaggagtccccagggaacactggtaataggtgaaaatggttcctggagtcaccagtgttgtacacacacatggggaacacaccacagcttagatgtgacaaagttccttctcatatgactgttccctcaaggtaagactaagatgggagggggagaaaaagaatcctaaaaaagccaatttttaaaaattctgctttggctgattttgtgctataatgggtagctgatttctaaaaatcatatttcttcaaagagttttatatcgaaaggaagactaaatgtaatgtgcctttccttataatccaggaaaacaactgtggtatttcaaaaattctaaaaatatctactttcatgaaatagtaactatttcactacaaacctatttttcactaaatacacacatttcctaatcctggagcctcctgggaaaagcagtgggttctccctgggtcttgcaagactccagtgttcacaggagagtgtggggaatagcttcaccccgtctcctgggatgggctttgtcagaggtcacgtgcagagacgctatcagacttccaccaggcatgtttaagcaattaccccatacttgtaccagttatgtgatttcccctatctccaaacacatttccacttaactagg

SEQ ID NO: 159585 - DNA, 1000 bp, Homo Sapiens
ttttttttttttttttttcgttatgtataaggtaaagtatatttaatggcacagtagaataaacaggctatgattacaagtccaaagattacaaatatgatgatgatatcaaatatatgcacacacaaacacaatccaacaaaattcttgactctctttcttttttcaccgctaaaggtagcaaacattcctctgtacctagctctgaaaacacatctacagaagcaaatgaactcatctgcaaaataaaaagcacatatctttaatttctaatgttttattatagatttttaagatacatatttatttttatattattagcttaaagaaagtaagtcacacaagaataggcttttgcatgtctgctaaggtaaattattatattataagtttgttatgaagttataaataaaacacatattgtgcttatgtgaataaaaccacagcataatcggagtgcatttgaaatgcacagagtattctcattgtttcaataagacaaaagaagaacattacctattagaattaaaagcttggccttcggctatccattagtcaaaaataattcatcatgaattactcattgattacaaaacaaaattgttaaaaagcaaaggtgactaaaataaacatgttcctgggcctttcatttaataagcattttggaataactggaggcaaataaacaaagttaaaccctcacgtgggaagaccaggctgcccaacagcattgtagcttgagactcaaagttaaagccagcttctaaaaagcctgttagtcctaccatcaatatgataaatttggataaggatggtaaaaaaaaaaaaatgttttaagcagtaaaaatgcaaatatgccaccttggtaagacagggtgtcaggcaacttgccaaaagagttatttcaagtcagtggctcaaagtaggattccagtctccaaacttttgttaggctaattttcattaagaggatgatttataagagaagaaaaggatctta

SEQ ID NO: 159586 - DNA, 1000 bp, Homo Sapiens
ttttttttttttttttaaacaaataaaattctttatttaaatttctcttgtggggaaaatatttttctttaaagcacacttaaaagtaatttgcatttacttcctgtaaagcatttccatttcacaattagcaaaactaaaaggctatgtctcttcatgcatttatttttgttagaaaaatgtcccatggtgctatcaaaccgattttaaccatcatcaagcttaactttgcctctgttgacaacatgactacaaacatgaatcaaaaaggagttaaggaattttaagccataaggtttcaattatagcttaccaattatgtaattagctgacaaaaatcaagtctgatgtagaatagctgtcatctacttaactgcagataatcatggcattttcatttaagatgatctgaacttatgaaataaaggatccagtcccaagaactcaataatctcttatgttttcttttgaagacttatttcaaatattaactatttcggtgcctgaatggaaaaatataaacattagctcagagacaatgtggtacctgtttggaatccagctggcagctataagcaccgttgaaaactctgacaggctttgtgccctttttattaaatggcctcacatcctgaatgcaggaatgtgttcgtttaaataaacattaatctttaatgttgaattctgaaaacacaaccataaatcatagttggtttttctgtgacaatgatctagtacattatttcctccacagcaaacctacctttccagaaggtggaaattgtatttgcaacaatcagggcaaaacccacacttgaaaagcattttacaatattatatctaagttgcacagaagaccccagtgatcactaggaaatctaccacagtccagtttttctaatccaagaaggtccaaacttcggggaataatgtgtccctcttctgctgctgctctgaaaaatattcgatcaaaacgaagtttacaagcagcagttattcc

SEQ ID NO: 159587 - DNA, 1000 bp, Homo Sapiens
ttttttttacaatataacaacatgtattttcattagatattaattataaaccaataatgcatgtaaactgaatacaatacttcaaatcattctgcacaaagaaattacagatcacatttttttaataacaaaatgtctacttgtttaataaaatgtttttaggaacttacaatgttcaaaaccaaagaataaaaatattaaatatatcactttatggcacaggacaacataaatttatttttgtaacacagcaggcaaatttttgtgctagaaacaggatggagaaaaatctaaattaaagcaaaaagtcaggaaatgggtgttcataaattcctgcttaactaagactcaacatttattgtaagaaacggggcctctgaacatcagattttgtttataaaaataaaaacttcctccctgtctctgctaaaaatacaaaaattagctgggcgtggtggtgcatgcctgtagtcccagctactcgtgaggctgaggcaggagaagcctggcgacagagagtctgcctcaaaaaaaaaaaaaaacaaaacaaataaataaaaataaaaacttcctcaaacatcagattttttcacctcagcaaatactttttcctttgataattcataatcctgctgttcatttgtcacatttatgaatatctggtaatttcataaacaactaccaatggtacacttcaaatgctgattctgttgaatcttcttattttttttcccccaatgaacttagggcctatgatagagaagatactgaaacatgctaagataataattggtcttagaaagactttacagcaagtatttaatgaaagccactacacttccagctctaaaaagagccagacacaatccctgcttccagagttcaccattcagaatacaggaggtcaagcactgattctgaatcattaatgggctttgatttcgtctttcaagatttgcatagatactgatttcttccggaagggcaaataaaatcttcc

SEQ ID NO: 159588 - DNA, 1000 bp, Homo Sapiens
ttttttttttttttttttttttagaaattagaatactttattataaatattttcagaatataaactgattttgtatcaagactctttgaaactttagaaactttatgtaacctaagatcataatatatttcattttccactttccagcctagaaaatacactgcaagttagatctaataaaggagaaaaaaattgcttcacagagaaaaaccaatgaacataaaatacccaactcaaaactataacaaacccaatcaagaaacagattgtgcaaaggtcattaatcctccaatttaaaataaataacctcccaacagaaaatatttccaccatcaaagcaatttgatgaataaaagcagagtcactttcattaaaggaaattacactatatgttcaaaaaatgtaataatgcttttagaaaatgaggaaaagcaatttctgtgttggagagcaagcatgctaaacactttgtttactaggcctttgttagaagttaaagaacctattcacataagaaaagtggtatgaacacggatatcataaaaccaagctctcacctattttttcaatttaactttgggagaaccaactttgaaagcttcaaaatccaagaatagactggtcccaaagcatttcctcctctgtcctttcttggccttgttcctttttcttttttgtacgcttacgttcctctttcttagagactacatctcggctttttttctcctttcgattcttaagcttttctgtactgacatgtacggtttctatttccacctctgttttctttctttggatgctcttgtgtttgtctaagtcaatttcctcgcagcttttttttctcttatgcttagaccgctcctcctctgatttttctctgccttcctctgggtgccttttcctcttctgatgtatctgtttgtgactggcttgatgagtactggtactgttatctgaggagaagtgcttgtaaactctatgttctacaccatgtgagcca

SEQ ID NO: 159589 - DNA, 1000 bp, Homo Sapiens
ccagttctgacacctttttaatagaaatcactgtttttaggaaacaaatagcacttttgtaatttttttttacaatgtttcttaccttgatcttaatttaagtaacactaggaagacctcaatatcttttattttcctttttaatttaaaaaaaagttttttttccccagatacaaagatttttgcccttgcataaaaaaacagtgcccgaacgatgacacaaggactcacaaagactcacgggacctcactgacactatgattcctactctaccatgcaaggtcttggctacccttaattggactgtcagcctgaaaaacagcttttctattccttattttagtttttgttaccaagaaagtaaaatgaacagtaaaataaaactttccttaaagaaaaaaagaacaaaaacaaaaattaaagaaagagaaaagaaacgtctccattcaattcacacacacctgggtcgcgtgctgcttcactcaagatcttctcttcttataaatatagaaaagggatggagcttgttttcaagtaaaatcactgatccacctttttttccttcctggacacacacatccttcttccctgccttgggcaagggccagtggcccgggctctgcttgttcttggagaggagacagcgggataaccacggagatgcgcgactcaccaagcagggaaggaaggagactgggcaggcttcaggagtggtggggttaccgcgcagggagcagagtgcaggggagaagaacctactggctgttcttggtgtcagtctccccttgcacgaggcccccgccagaggtgattaaatactgcttatttgatacactgtcccaccccctgctccctccagccactccccttccctcttctgggcactggggttggtgaaatctcaattcctttttttggttttatagtagcgaaagtttagaaacaggaaagcccacacactctttggacttgtcttctctacctaaacaaacggctcgg

SEQ ID NO: 159590 - DNA, 826 bp, Homo Sapiens
ttttttttttttttttttttttttttttgatcaaaacaggaagattattttattttgttttttgcattatgtgcaagtgtagacatgcagaggattgttttagaatccatatgtaaagtgtccaaaaggaaaagcttaattcagggagacaaaatagaaaggtctagcaaaatctaggagtgaggtgtgaaggggccaaatcagatcagttgtaataggagtggaaagaaaaagcctaggatgtttcaacagagggcactgggccaaagctttggtgttacctggcatagggtttctttcttctcatttgttgataatgataagcttttgcccatatttattcaaagtaattaactggcatcatctgtccaagagatgggatggataagaagttaagctttccaggagatgcctcatcatttgtgccggtgaccccgcataatttcttgatgaattgtgcaaactgggaagctgatagctcttttgtgttctggaaaaaatgctgccacagaggtccgattttgaagtggctgccaacatcccagacagcgaaggtgttatttttatattctactgtctccacacagaaacctactgtagggacggcaggcacagtctcccccagcttcaatttatacaagatggtggtttttccagctgtatccaaactcaatataagaatccgcatcttttttttcccaagtagacttttaaagagcttttcaaaaatgtttcccattgtaatttaatcgaattctgttgccactcaaggtaccgctacctacaacaccgccgactccgcggcctttaggatttcagctcagtt

SEQ ID NO: 159591 - DNA, 1000 bp, Homo Sapiens
taatgaaaatattttacacttttatttacaagttaatttcataaactatacttaacatgactaaacaacaaaaagttcttgacttccatcctttatggctagaaaaataaattattttaatagttatttaaacatgcctcctgcttccagagaaattaatgtattaaatatatatatttttcaaattatccctaacatttacacaaacttgagtagatactgctctatttttacacagaattgtaaacagccttttaaaaagctagagtaactttccactagttagaactgaacattgtaaaatataaaaattttataaaccctataatgcaggtaatttaattatgactgatctgtaggaatatacaataaaaatttgtcagtcatccacaattaagtacaattatttatggagaaaaattttactatgtccagaaaaagattttattcatgttcttgaaagatagctttgttcccaataaatattccctcctattatttttgtacattttaggaaaagatgtattcagttcaaaaataagtaacatccagttatttgactttttgcttttttcttgcttgaaactgctctgttttggtttttatagatttaatcaacattgacaaagcaggatcaatggacttcctttgtgattccttttcaatctcactctcttttttctttattgcctgagtaagttcttgttctttccgttctctttgccgggccttctcctcaaggattttttccatagcttttgttttcttgaaattgggatctgaggggtccaaattgaacaagtgggaagtgtacattgcctgaaaccgtgcatcgttaacatttacctcaaagtcatcctctattaattccttctttttcatgagctgctttttcttctttttgctcagattctggtgctccacaatcttgttgtaattgaagtgtttcttactgtcctcgtcctcatccatcataagcaaagccatttcagccttttgt

SEQ ID NO: 159592 - DNA, 1000 bp, Homo Sapiens
tttttttttcttttttttttccttttttttttttttgagactgagtcttgccctgtcgctcaggctggaacgcagtggtgcgatctcggctcactgcagcctccacctcccaggttgaagcaattctcctgcctcagcctcccgagtagctgggattacaggcgtgcaccaccacgccgggctaattttttatatctttagcagagatggggtttcactatgttggccaggctggtctcgaactcctgacctcatgatccacccgcctcggcctcccaaagtgctgggattacagacgtgagccaccgcgcccagccggttcaacattttttcaaagcactaaccctaccccaaattcatgtaatactaacttgacttttatacaagttgcacagaatgcagagggcagaatttgaccccaaaaccttccacagaatatcagaggtgattggtccttccactcttgagtagaacctaagaattccaagagtctcctaataggatactggccctctggagaaatggccctgctggatcccattagttaggactctagttagctgctgtagaagggtgacctactacgacccttttggggaaggcagagagctgggagactggctgtccacttagtgaatccaacactggcttaaagctatgcactgaataaagtgctcggtacatcctgcttttcacctggaatgaaaatacacacttatcttaggaattcacctacttacaggtttgggggacaagaatgtcaagggctaaaagaatcccaagaaaaagtatgaagcattgactaggagggaacaaatgcttctagtagtgttcttagaattcttaggatctgaaatgtcagaatgagtcacacgctggtcatgctccatacaatgaaagcaatcctgcttgatactattcacacggtgcatgattacttcacgggggtggaacggaacagtctgtcgccatttgatagtatggttccagaatgaaaaca

SEQ ID NO: 159593 - DNA, 1000 bp, Homo Sapiens
ttttttttttttttttttaaaaaagccaaaatttcagcaacttttattgactaccttttaaaagccctatgctgctgttttacaaggcataatagaccagctcatttggtcaaagcattctacatcattagtttgaactaacttttactgaaacagctacagcatcaaaagagttaaggcaaattggaattcatagaaaaggataagacacttcacactacgttgaaagaaagacagaaagctaagaaaagagacactgacggcaacactgaattacagcaacactcgcactgcaagcacagaacaccatgggtgaagtcggactatttaaacttcagaaagcccatttcatacagctggaaaaaaaaaacacaaattaaacacaaaatgaacaaaaccacaaaaatccggtcatgcacttggataagtcttcatggtctttgtgcatacccagaaaattgaagttttcttttctttttttttttctttttctttttttgcatcataacatttgataaaaatcttttgtttttgttttttgtttttttttttttactaaaataaacctgttcgggggaacagctactagatgaatttaagggttttatgcaccttatagaacttatagcaaaaatagttttagttgatttcattataaataacgttttcaagaacctgtgcaaaactgtcaataatttcctaaagcacaattgatcagaaaaatccatgattgttcagccttcacacccttcttcatgtaagaacacctttctgtacatctcacagttacttattaggttgaaaggtatatggagaatggtcattagacgtctcgacagccacctgctgttgaccacttgcctcctcaacaggaaccgctgtcgtctgcatatgtgcatactgtggcaagtaggctccttgcatagctgacgttgcaggcatgtatgttccggtgctgcctagtgacagatgactcatctgctgggccagagggctgatc

SEQ ID NO: 159594 - DNA, 1000 bp, Homo Sapiens
tttttttccaggtagacgtggactttattgactgtgaattcatttacatgtaacttctgacatttcactctgtgcaaataaagaacatgaggatacctgtgctgcccagtggactgtctgtacacacacgcatttcaccaggcgcagtgcagactgtctcatgcccatgtgggcgctgggatgcttcctgtacagatgtctcatgccttcagttacacataggtgttcctgtttacagttcctggaggtcagaagcacaggcacgagagaagcaggcccgttcttccgtggcccacttcttcctttgaacaaaggctccttggacccagtggcgggaaactggccctcccacaccccctgcctgttctgggggcagcagtctttggaggagtaatgccaggcagcccctcactgagggccccagtctcccctgcatttcttccctgattgattgataggaggtggctgggctgccactgaatttgtcaacttagactcattgacaacacattaaggggctgtaattatatttattagattaacaaggcagatgtgaattttctcttctataatccagtaagtctgtgtattcgttgactcagacagacaagaagccacaaggaaacaaagaagtaatcatttgttgagagacgttattaactatgatcttccctgaagctaccgggatgggaaaggtcagtgtcttcctttgaaccctgagacaattaggggctcttgaggcctgctgtgcccctgctgccaaggcagcctcaagttcaaggagcagctaatcacccactcctgcattcagtctgtcttgcctgatgagggctacgcaggctgcctcccattggtgtgcactgtttcctttttcagctgctaaatggctgaacaccatcggcctggggtatccctttttggggaatacgtctgtctgtctgaactcctttcccttcaaatggcactgtgataaaatctggtcataccatgctccagcact

SEQ ID NO: 159595 - DNA, 1000 bp, Homo Sapiens
tgttttggaaaccttgaaacaatttattgaattgctttatacaagattaacaatctccacaccacccctaacaccaacatagtcgctgcacaaaagccacagcccctctcacacctaagaaacggtcacgcccggtaagtgctcagagactttcgctgcgccagggaaacccctgcagcccccagaccccgaggctgctctgccccaccctctgctgcggcctcgcctgtaggtctgccttgccatggctgttcagtcattcgctctttcattaccacaaataaagcataaacaaggaaaagaaatctcaaactccccatcaaagaaacgtttccctgaggcaagaggcatcactagattcctaaaaatgagggtattctgctccagctgcacgcgcaatggtacatggggaggagggagcaccaaagggaaaggaaggagggcctgggacccgggtgtttatgggcagagaagcctggagagtccctgctcagcctccactgccggcctctgcttggctttgagctcagcaatacaaatctcttctttggctcttttgctactacctaagactactctgtaaacaaactggaaatccaagttgcaaaaaatatatataacaaagggataaggaatccacttagcccaatgtgaaacacagattggttcttatgtaaaaaaaggagtcagagcagaggccgggccaaagggcagacagaggtcttgctccttgggaaaccgggaaggccagcaaacctctgaatgaaggatgagttactgggcgctgtaccctgggagtcaggagccaagagcggtccgttttcccacaggtgtatgtgctgaggacaccatatactctcaacgtgcctgatcacttagctggagcagtcagttcagactcaccttgtggcacagacctcacaagacaggcaagtgccctcaaatccttgtgaaacagccactggttgagtggtgacttaggagctctgcagtaactgtc

SEQ ID NO: 159596 - DNA, 1000 bp, Homo Sapiens
ccctttagaaaactttattcttaagaagaaggcacaacatactttttcttttataaaaacacacaggtcaatgttttttaaaaacacagcataattgtacaaggggaaacattttgttagtataatcttaccaataatgtaagagaggaaagactgccatactgaaatacattttgctgctgccaaagacggtcctattgtgaagaaatgagaaaaaaatagcaagcgagggccaattaagcatccctctccccgtttttcgaatacaacacatgatcctcaccgtaacccctacacatgttaatggattgttagagtatcaaattattttcaatgtgctttcttgttgtataaacctttacctgcactttctatttaaggggcaaaaagggaatgtgagtgtaaaacacctgctcagtgtgtgtctgttggactttggagcaattcaacaaacaagcctgctctgtttaatctatttagtgagtgcaaggcttctaaatcttccccctcagctacctatataaaagacaagactgaaaaggacagccactcctggatggctggagaagcatttggatttagaccgggtttaattggcatatgaaaaagcaaaacgtcagctcttcagtcaggctctgagaagctctctttatgtgggggggacataggctaaaggccctgagcaaagcctggggtcacttacattccagctactctcaatccaagtagcaatttccctccctcagaaaccgggtcttcaggagcttggggaggggagcttggggaggggctctggagttgtgttttaaagcagtacatcttaatatgaagacaggaatttctatgatgcttacgaacattagactcaacatttttgcagccccctttcctggtctacattcacacaaacatgagacacagtcccaagggagaaacagatgctggaggagcatttagggccagagtggaggcacagaggaagctgggatttttcaactac

SEQ ID NO: 159597 - DNA, 1000 bp, Homo Sapiens
ccagttgcctcgttttatagaaaaacaggcccagggaactactagggcttatccaaatgtacagtttgaggcagagttaggaatggaacccagggcctcctggcgctgtccagagtggagtttcttaggacccctgcaagccagccaagtccaaatctctgggccggggcctggagtccgccctcctcgttacctcctctcctctcggggtgactgaagctcgtggtgcagagctcccagctcctgtcaatgggggcccctgggcctttctcattctgcccctcacaacaggctcctcagctagggtagctgcagggagggtggctccctcctgctcctcagaaggtgtaggcccctacaaagacggtgagcctcagtacagagctggcccggtagctcatgagggaattcatggtgaccatctccaggtccagcacgtactcccgggggcccgtcaccggccgggcgaggaccagcatggcgctgacgttgttgatttgcctaatgtaaaagtccccctgcgagtttccagcacggatctgaaaggcattgtaggcaccggggtagacggaggtcgcctggatctggaacacgtcagcgggtactctccgctccgaggtgatggtcatgtagcggtgcacaatggatgaaggctgctctcgacatagagggttggaggccgggcagagacagcggttctcagagacctggatgtagggctccacgcagcggttggtgtccacgcagcggtagcccccatggaagttgacacaggtttgggcctcggagcactggtgcgcaccagactcacactcatcaatgtcttggcagaggcgtgtggccagcagctggtaaccctgtgggcagtggcaggagaaacggcctggctcgttgacgcagcggtactgacagaggtagctggagtagctacactcatcaatatcactgcaggagaagccatcccgatgcagctcatagccctggtggcagcgacacagga

SEQ ID NO: 159598 - DNA, 1000 bp, Homo Sapiens
tttttttttttttttttttttaaacaaaactggttttatttcataagatgtttagagacaggcaatggctggtgttgggtcagcagctcaacaatgtggcaactggcatcttcgtggctctcttggcccttccgtcgtggttcaaataactcctccagctccagtcatcactttggtgtttatggcagtaagggggggaggaggtggcctagctgcatatgtatctttaatcaggaagtaaaagttttcccagaattcccaaggccaaagctgtgtcctgaggccactgagagttgttagttgcaacagaggctgaaaggggagcaattagcttttctgggttctttagtgaaggcaggtaagggagaagggggttgggaatggctggcaaattggagcaccaacattacctttatggataatttctttttcaaaatgggcagctgatatgtgaagaaatatctaacaacaattttaaggttgtaatttgaaactcagttctgctttcaatcatgacatttttaacagatgcatttcagctatactattttttcttgtgccccactccccaacattctagaatggaactaaaataaaattacttaatctttcaagaaaaagtgggaaaaaaaaatcaaaaggccaacagtggcaagatactttcaactactcttgatgtcattgtccttctacaccaaagaacatctggaaaacatccccacatcctttggtgtttaagaactgatagagctgaccaaagtccatgtggtttcccctggctccattaacactgaacactttttcttcaaaaatggaaaatttcctttgtctttccgtttcatcatttgtaccatcaaaaggaatgtcttctcgatggcgaattaaaattctcttccagtttaattttctgagtcttgaccagaattcttcacaggcactttgtgggccttccacacaaacaacaccaggttttccaggcatgctaaacccagacagggaa

SEQ ID NO: 159599 - DNA, 1000 bp, Homo Sapiens
tttttttttttttttttttttttaagaaagctaccaattcttatttgtatgagaggaaggtgttaggcatctgaagtaacccaagtgattcttatctgcagtcagggttgaggacccttgtttaaatatgctttttacataatacatcaagcatgttccagcatttttctttctcttctgattgatttcatgcctaataagttttacagtttatattgtaaattatttaaacattatcagataaacatttttacttgattttttaaagattaaatgatattcatactaagactaatcatgcttcatttagctacaacaattttcaaatactcaaatcaatcaccactttggactgaggttatatatatttcagttgtaaacaagaatgatccagaatctgaaaataagggtgtggggcaaaagctgtagcctactggctattgggcaaggcaagtgcagacaatcaactcactacaggagggcctggaagccaaggtctggtggctttggcaagatcacatctcactgtagaaaaatacaacaatgaatacagagaaaatgttttgccattttgtaattgtggttaccttataatgtatgatgtttatcttattacatgcctccacaaagcaaattttgaacattaagttctctatgaatcaatactattacatgggaaaagatggctacaaattaaaatttttccatcatgcatatggataagttataaaaacacagccagaaaaagtaatatttacaaaagttataaaaacagcacaattataggggaaacaatgcccatctctttattccactgctaatccaaaccctgaatatctctgcatgaagattatttcgatagaattttaagagaacctttcatagactaatcaaattcttctgttgcacttttattctattagctaaaatacccttgctgatttattaaattctcctacagtttaaaaacacagttcttttttcacttagtggaaataaa

SEQ ID NO: 159600 - DNA, 1000 bp, Homo Sapiens
tttttttttttttttttttcaggttttagccctttttattgaccttcttttcttcatgattctctctcaaaggataaattgtacatttttgtatttgaaaacatcagatatccaagccatattactatagttctcagaaacaattcatttcttcagcttttcatgcacagctggattggtgcaggcattagcttggagctcttctgtttctccctttaaaacaaactcagcagaggctgggtgttcctggaccctggatttcacagcatgagctgcatagttaaggctggtattttcactccaatgccagtaacctgagaaggggttatagagcattcctaccactgtttgaactgacagaccatttgattccagaatgctctctagtgtttcaggtgaaacaaacttctcccatgtatgagtaccttttggtacaatacttgcaatttgctctgaaaaaacaattcccaaggcataggaaagttgtgttttgttgattgtagtaatgaataaagaaccaccgggttttaacacttgacagcagcactgtaaaaatgtttctagatcaatcacatgttctacaacttcagaagctacaacagcatcaaatgtttctgcagtctcttccacaatctcttccagggaacacactctgtactctattctcttatccaggactggatcaaatgatttatggcattgtgctgttttaatgtcctcatccacagggtcgattccaataactgaagccccaagccgccctagaggttcagttaacagcccaccaccacagccaacgtcaagaatcttcatccccaacaaaggttttcctggctggtgattaggaattgttttcagaagattgtccctaataaatggcaccctcaggtcattcatggaatgaagaggtgcatatactccttgttcatcccaccatttgtgagccagggccaagaaggtttttacctcaccgctgtcgacagtggtttgggaagtactg

SEQ ID NO: 159601 - DNA, 1000 bp, Homo Sapiens
ttttttcttttaaagttttaagaaatattttattctgaaacaattacagattcacaggaaactgcgagtcaactatatactacacacaacaacactaatctacatgcagcgatactagagagagatgcaatgtaccctccacccagtctcctcagtgcttatatcttacctaactagagcacaatatcaaaatcaaaaattgacattggcacaatgtgtgtgtgtcattctatgtcattttatcatgtttagattcatgtcccacaatgtaccaccacaatcaacacatagaagtcttcgatcacccccaaagatttccctgggtcacccctggacagtgagtcacgtccactattctccctccaactaccccaacccctaatgaccactaagttgggaacacctagattttttaatatcaatttttaactacataagtaacctgagaacacatctgagacatggatattaatcatacttctactatgaatgtgctgtgtgtccccttaaactttctgcttttcagtttcctccctaggagaacagagatcatagaagcatctctgcccattgagatcagtaatgacaatgatcaagtccctggcaattgggaagagtgctgcacatggaagccagccttatgatttaaaggcatcacctggatccagtccactatgcctcgctgctggctttgttctcactgacccactcatacctcttcagagatcaggttgtgccactctctcctgaccacactgttgttatagtggaagtgtggcttggcgtacttaacatattctaggttggagttcagtttttcccagtagcccttaaagctgagcaccttcataagaggcaatgcaatgtcttctgtcacaagagttattccaggaatttctgtattccaagtgagcactgaggaatgtggcaatagtttgtccatgttacttgtctctgaatatacactccagtatgaagaagcaattataaattcctgaat

SEQ ID NO: 159602 - DNA, 1000 bp, Homo Sapiens
tggaaactttttttttttttttttgcccagaaacttccattgtattaatcaggagttagcgcagtacaggcaccacgtggttgtctccaggagcttgaggggcctgagcagactggggggatatcccctccccagggctgggcccactggccacccttctgcccaggggctgaccctcgggccccatccccagcagcccaaaggctgtgttgaagaggttgatgggagtggagccatcggtgatgagggttgatttcaggcccagggactggagcagttttacctgcatctcaggcccagccacagcaaggtccctgatggtgctggggcctatggcctctgtcatctgcttgaacttcttcacctccacctcagccagctgctgagccttgctcacctccagctccagctgggcccgggcatagaccagttccagctctcggaccttctggaccctctggagctcagcctccgtttcaatggccaaggcctgtgcttttagcttggcctgcagcacggacccttctccctcaatccgggctgcctccgcacgggactcggcctccgccttggcagtcccggtgctctccacggccatgctcagagcctccagctccaaaagttccttgcgagctttctcggcttctgactggtccaggatcttctgccgctcaagccggccgcgggcttcctgctccagtctctgagcctcatgcttggccgccgcttcctgggagttggtggtgatctcgatggccagctggacgctgcgttgcagggcgtcccgggtcctctgatccacaggctccactgactgcacgtccacactgctgaccaccagcccgttttgggggaagacagcctggtcccggggcctgggcagggccatgccatcggggcccttcgcttccgaggtctcaaagccaaagacagcagtgcgaatgatgcgggctgagttcttatggaagtcatcgaaagtgacagaggccacggccccccg

SEQ ID NO: 159603 - DNA, 1000 bp, Homo Sapiens
ttaaggtatgtatgaccttgtttattatctatcatagacatcaagatgatcatagttaataccaatttaagctttacagaatacgttttaggccaatattgatatattaaatgaaggtatcagagaatcttgtatttaggcatcaggttataaagatctattcaaaaccatttttgtcaaagtttaaacactggaacaaaagtcaaattgtttctaaatgagacacaaaatgattcttgctaatagtacaaattttgtcccatgggtaatactattgtctttttcttttttaaaaaaattatttcgatttttattttagattcaggaaacacatgggcaggtttgttagctgagtatactgtgtgatgttgaggtttggggtacgtatgatcctgtcacccaggtagtgagcacagtccccagtaggtaagtttttcagctcttcgtcccgctccccaccctacctccccagtgtctattattcccatgggtactcaggtattactattttcaagtttttttctttacatgaaactactgaaagcaaaagtatgtcatgcttataggttactctgtacatttatcattctattaataaacatcttaagtaattaagtagtatattaaggccataaaccaagtcattatcttctatcaaaggactactactgttattcaatcatctagaaaattcattttaggcaggacgcagtggctcacgtctgtaatctcagcactttgggaggccgaggtgggtggatcatgaagtcaggagttggagaacatcctgaccagcatggtgaaaccccgcctctactaaaaatacaaaaattagctggctggtggtgtgtgcctgtaatcccagctactcagaggctgaggcaggagaatcacttgacctgggaggcagaggttcagtgagctgaaattgcgccactgcactccagcctgggcaacagagagaaactctgtcttaaaaaaaaagaaattcattttaatg

SEQ ID NO: 159604 - DNA, 1000 bp, Homo Sapiens
ttttttttttttttttttttttttttttttttttttttttttttttttgtatttccatgaattcaaagccttttaatgatgtgaacacttactccccatttcttttttacattgttacaaaaaatttacatacagttttctgaaagtggcattttgttggttgttattatactgatgacacatattaacactttgtattgaagaagtatcataaaaatcacagggcattacagatttttgataagaagtagtaatagcattgtcttttaacagctggaggctcccaggcatactctttggtgagaaatgattaattttatattttcattttgatgagaatcttttcttgtttttaccagttataaaaacaaagctttttctttgttgtgatactgtgcactaagacttagtttcttgagctgatgctaaataaaatgagatcaataggaatattccaggaggtcgtgagaagtttttagaaaggatggcatctacatatatatggagctctgaaaactgttggagagtatgacctgggactgaaactgtggagcacatagccagtgtcacaggctccgagagcagagagagtttgctctgggacctggaatgagtgatggagaaatgttttaaacaaacaaacaaacaggccaggcacagtggttcacatctgtaatcctagcactttcggaggccgaggtgggcagatcgctttagctcaggaatttgagattagcctgggcaacatggcgaaaccccatctctctacaaaaacaaacaaaacaggcctggcacggtggctcaagcctgtaatcccagcactttgggaggtcggggcaggcagatcacttgaggtcgggaggtcaagaccagcctgggcaacatggtgaaaccccatgtctactaaaaatacaaaacttagctgggcgtggggccacatgcttttgtaatcccagctactaacacttgaatccaggaggcagaggttacagtaagctga

SEQ ID NO: 159605 - DNA, 1000 bp, Homo Sapiens
ttttttttttttttttttttttcacagtgcttaacaagatttaatgtacatttattcttaacatgtggaacatataaagattttatactgaataaatgatattcattaagccagaggaaaaggaggaatttacatcaagtttttttcttttttttttttttaaactacattatcttgaaatacaaatgtggattctcatcactgaaaaatctttgaagttgtgtttcttccttttagttgtatttttttcattttctcttttttgactgtactggtaaccattttctaaatcaatccatatataaccatttccacaccttgattcatgaagcaaattgtgatcagctgctctcctgaaatcgagcatgactttatacatacagaaacttgtacattaccctcttttttttttgtttttgttttttgtattttttctttctttttttggagatatggccctaatgaaaaaatatataaaataaaaataaaaaattatttaaatctaccatcacttcgtagttaccacatcatgaaaaagaaactaaaactttgtactaaaaaaaaaaaaaaaaaagaaaagaaaaaaatgagggtatgtttaatgtacaacttctatatacatcacagcccataggcagtaaaaaaaatatttaaaaaatgatgaaaggaattgtgaagaactgtcacgtggaaggtcaaacgccgacagcaggcatgacgggagtggtgaggagcagtttccggatcgttgtcaggtatgtattctcaatcttaaaaaacattgtttttgctcccagcctaatggaaccatattcctgtggagaaaccagtatcatttcatagttttgactactgaccgacatacctccttgagcccctatacctgtatctgtagaaatttctattgcacagaactttgggtgatgggatgcagtttttttcattctctgaggagtaaaacgcataggaaatggataatttttcacctttttgactcagt

SEQ ID NO: 159606 - DNA, 1000 bp, Homo Sapiens
tttttttttttttttttttaagcacagaagttcaccagggctagtagaaaatttcaagttaagaaaataactcttgctgggtgcggtggctcatgcctgtaatccaagcactttgggaggccgaggcgggcggatcacctgaggtcaggagttcaagaccagcctgaccaacatggataaaccccatctctactaaaaatacaaaattagctgggtgccatggcgggtgtctgtaatcccagctactcaggaggctgaggcaggagaatcacttgaacccaggaggcagagcttgcagcgagccgagatcgcaccattgcactccagcctgggcaacaagagcgaaactccgtctccagaaaaaagaaagtgaagtctttaattttcttaaataatcctcatatgtactatccacattgtggaaaaactgaaatacgcagtctggacactgcactgagattccggcatactggcacagacacagctatgtcgcatcttacagactacaacagacaacaggcttaactgcaagaggtttacagacaaaactttacatagatgtgctagaagaattccaaactgctgtcaaagagagtataggaatcggtctgaagagaactccgcccagtcccttctgtttggtcactgcagctgcactctgtatgcacctattagcaacttaaccttggcagagggtgcttctgtcaaccttatgaagagtttattgggacctgcaacagggctgaatgagtaaacaaaatgactgtccagaaaaacaggaagctgaaatttatcattcagaactacagcttgtacactacacggtccacagagccgagcaataacttctttacccaaaaagtttgcatggaagataaacagcaggatgccagagccttctggtatgttctgtgggggtttgtaattgaaatctgttgaaaaatctggaccctcacagagtcgatgacatgcgattggaaaaactggttctagcagagca

SEQ ID NO: 159607 - DNA, 1000 bp, Homo Sapiens
tttttttttttttttttggagggaaggagttaattacatgtattgattaatggatagggtaaacagacgaaaatcaataaacctgagccaggctgccccagagtgctcccatgcctgggctctgtctgctaagagggtcagaggcagtctttcctggtcagtgccaggatgaagccagtcctgggccagggtgctcaggcctccagatggattgccctggtgggtgacatcagcatgggctacagatcagtcctaggatcccgctcatcactcgctattggcctcggcctcactgcctgtgcctgcccagccatatgggtgcaatggcctgcctgagaggagaggacactggggagggggagaaggcctggcacagtactggggaagatggaagcagcaaacaaggctgtgaacacagccaggatgcaagccagtggagccagtgcagagcacacatgctcagatgatgttgttctcctggatcttctctcccaagtaaaagcgggtaaagaggaaggggctcaggtcgatggtctggaacctgcccttcagtaccatctctgctacagctcgcccaatgccaggggcctgctggagcccgtgaccactgaagccagtagcaaagtacatgttgacaactagcgggtgggggcccaccacgccattctggtcaaaggtgttgtagtcgtaatagccggcccaggcgctctgaaccttcagagtctcaaaagctgggaccctcagggccaaatggggccacaccttgtcctggaagaaatcatggtccacttccaggttcgccgggtccggttcttcctgctcagtggggctacgaccacctaggtagttgctacctaatccttcccggcgaaaataggctccactggtgtctgcaacaagcggagtctctaggcctggtccctgggggcagtgccacacatacacataccttttcctcggctccacaggtagcttggtgccctgcagggtgccaggcggc

SEQ ID NO: 159608 - DNA, 1000 bp, Homo Sapiens
tttttttttttttttttttttttttttttttttccatatatttactttttattgaatttgttaatgttacagaattcttgcactgccaaaccatgcctgagaattcaaacaaatggtacaatggacagcctcatccacccatcatacagtatattaaaacttgattcatttatattttgatattttcacaatcttttaaaaagttataacaagagttgtaatttaaatctgctgcaggtcttcagatttcgagtacaatatgcctttacataacacctccacttactcatctgttcattcttcagtaacataacccccaacaaaattttgttgggaaaaaatgcagggaaaatgcacagttcaacgatgaagagatttttttaaggtttttcattcccaaataaaagtcttcagtttaccaagaatcccatttctgatttaatcattcaaccttcccttggctggctcagttactcacccaaatatattagaaggcaggcatcctgcctgccacctcaaatgtcaacattgcccagatgcgagtggcaggtcccgtcaggagatactgtaaccctcctcggagtccaattcctgcacggacactttcgtcaagactaaactcctatctgaaaacgctcccacgtcaaaatagttttactcacccacttgcttcactcttgccagtagcaagtctgcaactcatgcatttggcaaagggatttattatagagaaacccggactctgcatcaaatgatgacattaccactttcacatatttctattgaaccagatacaaaactaggaaactgccagaccatcttgttaggtggacactcttctgtaatcctgggtagcttcctcaagtccctttaaatgacccaaaactattaataggtattttaagcaataattattaaaaacagaagtgctacatcacctgtctttcgccctgactctccaaatgaacataaagacacaccaaaaggctggtaacagagc

SEQ ID NO: 159609 - DNA, 1000 bp, Homo Sapiens
attattaaacaactttaatccaaatgctgattattatttgcagtgtctgaaggcacaaaatatacctaaaatgtatggaatagtctaaacagagttataaatccaaagagcaaagcatgaaaaaaagatacattctgagctgacacagaaatctgagttgggaagtttttttttttcctagagaacttgcttgaatatcaatcatttcccctcatgccaagggtagaaaattctaaaaaaaaaaaaaaatatatatatatatatataaacatggtgaagaataacaccatgaggtgttaaggattttgtataagcagaatacttctcttgaagatgctggtctctctctctctctctctctctctcacacacacacacacacacaaacacacacacacaggcgcacaaacacatcctccatctccctctctttcctccttgacactcattctaagcagaaccatccaagaagacatccaagctataccccagaagacaggccatctcagggggcaatgaggaaacagagttggtgtgagataaggcagtgagaccagagtttgattaaaaaaatagagagatatatatgtgaaaaattgaccattcagggcagggcccccaacgtgctgatggaaaacaaagcctgctcttcctcggggtcatggtagcccacctaggcttctctgagcatgcctggctccaaggtccacatgctctgattggagaaatgtcaatggattgcctaggtagcacgaatatcagaccattctcagcatccagcaataaataacataattataaacactctcttccccacagtgcttttagctgactgtgtgatttggccgttctttactgctcaatcatgtcactagggactttaggaaagaaatcaatcctgggctagttatcaccctcataaatacatctctctagaaactctacaaggctatagaagaagcaatcaataggactttgtatttctccatgatcacagaac

SEQ ID NO: 159610 - DNA, 1000 bp, Homo Sapiens
ttttttttttttttgagcttctaacacttatgcatttattttcatgtgtaagaagaaaaacgtaactagcacgtgaacatgactgcatggatacacggctcagcacgaggctaaagtcagaagtgagtgaaaacaaaatagcatgttgatttaagtgaaataacagaacaggaggcctttggttataacaattgtggaggtggtctgtgaatgcagaagttcgggactccctgctctaggctcagggcaagacgctgtggtctgggccgaagcccctggggttctacagagaagcctgcccagtgcacggcccctgtggcattctcgtgggagcgtgtgagaccccagggagggaagcacattctgtttaacttgtccgtgccgtacaaaatgtcttagaagtgataaagcaacaatgatgattctccttcaaagggaagaagaatcttccaggtgtggtcttgaggacgcagaggttacaacacaggctgggctgcagggcccaagtaggacttgaggtcataaccagaggactgaagggacacctgtcctggcaccatactggagaagtgcttgtttgtgtttgggggagagggggtgcatggcccaagtcaaggctgaaggaggaacgcttggcccctgcaccctgttcccagcatataccaggctctcaccccatgcctgctgactcaacacagcacccgggaggtgccgccagaaggcaggtcgggggatgctgacatcccggggtgtctgcggaccaccctctcctcttgggtctgggccctggccccactttgcaccacacattccagggcggggaagtccatggctgtgccccaactgggtcccattcctgtacatgtgcgaaccaagggggtgtttgctattatgctccccactaaatccaaagaatgttggttcccatcatttcaacctcaacattttcaaaaagcacttttttttttggagacagagtctcgctgtgtctcccaggctg

SEQ ID NO: 159611 - DNA, 1000 bp, Homo Sapiens
atgtttcataactaaaaatttattaaggaaacaaaaccagtgctgcaaacgggacagaaaggagagctgggtctccctcccgaccacccagtcatcggccttccagctggggagagaatcttaaaggagaggccggggaccctgtactccaaagagcccagtcttctgagactctaggggactcctacccccaaactactggccttggctcccctacacggtaccccatcgcttctggcatagtcctgggcctcagggagggcagagctgcgcacccatcctccaggcaggctgtgcagtcaggccatgggctctggggtatcccccactggtcccattaagatttgcccctggctccaccgaaaaccccgtcttcccctaagttgtccttgtctctggccctgggtttcaggaactcattcttggtaaggaagcctccccactgaggtaccagctaaaggggcaaggaaagggcccctgtgtcagtgtcagtttttccggggagtgagggcaaagctagaaaccaggttaggcgacggtgccccagcactggaatgcctcaggctgggctgtccacgcctggaagtttctcccagcacaggagccgagggtggaaggccctgggtgggagacctgtactaggttcctgccatgggtagtagagagggaaagttcagagtgagaacccctatgacgaggaaccgcggtgaagaaatgaaggggatcagggaggtgaaaaggatcaactagaaggggaagaagggtgaggggctattctggagggagggtaggcgggcaaggaggggtgaagggggagctgaggagagtcaggacatttcctgaagaggaggctagacggaaagaaaggccagtgaggagaaagggagcaggtggaggccacccgagagcacgggcctgagaccagatgcccctttcctctagactcatgactgtccacggggacgcaactggcgaagtgtgagggacccaggttgataag

SEQ ID NO: 159612 - DNA, 1000 bp, Homo Sapiens
ttttagtctattactagttttaatcttcaaatatgcctggaaaaacatttaagcgtatttataaatatttaaatgttatcaagtattggaaaacatgtttgattactatgggaatataaactaaaactccccaaatatatatagaagatgtacacatctatagcatataaaagaattagggattccttcctccccttcttcctttattctgaggaaagaggtagtgaacttgagctttagtttttaacaggttagaaaaaggaatctttttacatatctactaaaagttctattattcaatgtctaagtttttaagtcccttggtttcctagatacttcgatggaatcagcagccattgatccaatgccaactccaagactggaacgtcgcaatgatagttccaaggcggaaatttgacgtaattcttttcgacacagttttacaggtgtgacaccatgaagtcgtcccacatttcccacaacctgaatttgggatgacagtcgactgtgagattttgtaaactgattatcatctgtttctgttttattctcattacctaacatatgcccactggggggtgctaaagaactatgaattggaggtaattctgggatatcttcccagagcttttgaggatttggctgtgttcttaagctgcttgctgaactgtccatttctctttctcttccacttaatttcatactttcaggtctggatgcccattttaattcttctgaaagcatgcctcctccttctggcttcaggactccatctccagcctcttgatactctgatggtgctagttgccgccgaattgcttcccctaccagttccttaagtttcttcttatgatcccggctggttttcttatagaaataaagatctttttccaactgctggattttatcttcatatgttttgaaagtttccataatgccttctccatcttgttctttgaaatgatgtaatagcaactgcatcttttgttcgtgttccttt

SEQ ID NO: 159613 - DNA, 1000 bp, Homo Sapiens
ttttttttttttttttttaacacctcaaactcccctcagccccaatatcctggcatctttagtgagtcaggacaatcctaacctagaagcatatatgcctgggagcttcctggcctcaaaggaataaatcttttcacagcattcacaggactgaaaaataatataaataggattcctacagtaaacaagtattgtttctgtttcaaaaccatcctgcaagcataacaatcagctggtcctaaagcctgtaatacgtacacaggtcacaggcagacaggcaggcaggaaaagggattttccccagtgcaggctcctttggttctgcctcagaggcactagaagtctaggccctgggttaacagcaacccagagtctgcttggatatggttctagttgtatgcttcgtaagtgaacaccaaaataccataaaggtagaggagagtgaacacataacccacttgcaaataagaattaccttgcaagattcctatttttttatcttaacagtctatgcgtatgaacattttattctataatataacttttatataaaaataggtcatcttatgactctaaaccatttggtaagtaaaactgatgcttcaagaagatgcaggtttttaagtttgcagttttacattcccctagtacatccctgcttactcgggagcacaaagcttggttgtaagaaattgtgatttggaagtagagaaaagcaaggaagtccaacctcaggagtgtctctgttactaagaggagagtgagatccagggtgtgggagatgatctgaaggtctatgggtggggagtgccacaggaagaagggttctggtcggagttaaaggaggatatatctatatgctgggagatgagctgaattcagaacacatggaatgggaacaattctccccatactgcgtttaagccaaattaggctaaaatgggggtgggactagcaaaaacctacaatggaaattcccatttggtaatatacattccag

SEQ ID NO: 159614 - DNA, 1000 bp, Homo Sapiens
acgggtccagttcctttatttttacaaaagggtgaacacagtttgcagataggagctgcctgttcccagaggttgggctggggcaggaggaagtggccacgccaggtcctttgccctggcttttttttttttttttttggcagggggtggggacggagtttcactctcgttgcccaggctggagtgcaatggcatgatctcagctcattgcagcctccacctcccgggttcaagcaatgctgcctcagcctcccaagtagctggaactacgggtgtgtgccaccacacccagcttttttgtattttttagtagagacggggtttcaccatgttggccaggctggtcttgaactcctggccttgggtaatccacctgctttggcctcccaaagtgctgggattacaggcgtgagccactgtgcccggcctgccctggctttttaagtccaggatgttccctgtggtgcccataagacttgtgagggcaaagccgggtcttccttgcacagccagatgccaccagatcagagcgcgatgatatgactacgttacttggctgcctccagccctgtcctctcagtcctccccgtagccttctgtggggcgtgtccttcacgcaagggaaagggactaggcctgaggtcacccagcagggccgtgtccctggatgcagggttgtatgcactcctgcggcccatggctacgtgcagcactgtgggctgcctgggctggggctgtggctggacagcagtgctacctgtcccgagccaggggcacccgctgctgaggccccatcacactgctcttcctgtgctctggctggtggcagggatgactgctgcctcttggtcccagggtgcaggtttgtagccaacacagaggcccagccactgggggtttggccccctccaggcggggaccttgacctagcgcaagaaggaccttctccccatgcggaagaaggactcgatctgctccagggaccgtcccttggtctcgg

SEQ ID NO: 159615 - DNA, 1000 bp, Homo Sapiens
tttttttttaaattagaagacatgaaaatttttattttcaaaaagaatgtatttttacataaatctacaacagaattcaaatgtagaaaaaataaactatattcagggatacagcgctcagcacagcacaccccctccccggagtgggccgtccccccagaacaagactgaaggggcctcgccggccccaggacccccacagcagggcagccacaggctggcacgcggagctccccgtgtctgtcacaacagactgcaaatgcgaggcgcccagaccctgagcgtcgaagacaaaaaccaacccattttcactgtggcaactcacttcttagtgcaggtcactcatccgtacacctcatcggaaacagaggggcaggggaaaccacaggatatacatctccagatgcctcagataatcccctcctcacccctgccactcgaggacctccaggagagcccacctgacaaaccccccgcttcctccctgggccggtgcaaccaaaaacctgcaggattcatccaggactccaggccctgagaaaggcagagctggctgagctcccccaggactccaggccctgagagaggcagagctggctgggctccggggccagggccctctgtagacccaggacccaagctggcttcccagagcatcacagccccaaagccctgccccgtgggacagacccaggcacctgtgccctcagccaccctgctccgccctcactgtgtgtggcaaccctcaccacaactgtctccatgggcaggttcaggtttcagcctcgctccccagaggctcccgctcggcctctgctgttaactgctgtgcaggtgagcaccgggaagccacactgccaggagcacaggcagaggggcaggcaggcgagggctccagcagggacggcgaggctcgcgcttagcacccaacccctcgaggagtccgaggggcagcactggccctgcagccctcatagggcgcatgagtcccactggcatc

SEQ ID NO: 159616 - DNA, 1000 bp, Homo Sapiens
tttttttttgtatcaattaatttttttattcagaacctggatctttaagactggtataaacaaaaataaaatacaaacaacttgttattaacataatagctgcagttattaactgcaagaatacagtaaaaaggagtcatactaaatgttaatgttcttgcaacagaattttcccaatcaccttaaggtagcaaattctggcaagaaatgataattcatttcttattaaaaatacttaaagaatttccaagattgatcagttgtgccacaaataaaacagcagtttattcaaaagagcccttacctttctcttattttcctaaaagatctgccatttacaggtaactactaatttcagatcagttattcaaaccagggttcttcctgtaaatccacatcttagctttacatatagtaaacttacactcatattccctttccagtcttgaagctaaacacttttgtaaaaggaacaatctaatatcacttcatatgaatcttggttcttacttttcttctatctcatttttattttcttctattatttgttcttcctcctcatcaccaaaagtctgttcctgcatggtggtaaaggagagagatctagcagccacttctgcagcaaggccagcagtgaaggtaaaatctggtgacagctgtagccgtgccagcctctgcttaatggagggctgtaatgagtccctgggagttggaggggcagtggtcagaccacttccatctgcttgtggttcatcttcactctcacattggtaacacattctttcttctgctccttgggggaagacttcatttgaagaattatctttatttttaccttctagagagttttcacataaatactcagtcctacttatttcattgtctgttgtggcggattattactttcctcttcagtatcatttttactgacttttcccatatctgaattcattgatggttctgaattacttatgggttccactgggtctacaggagacaa

SEQ ID NO: 159617 - DNA, 1000 bp, Homo Sapiens
ttttttttttttttttttaaaattttttatttttttatttagtggccttttagattatggtgatcttcacctcatctccacctgtctccccacattagacaggggtcttatgcttgctactgtgagggtaaagggttgactgggaaggggtggtagggacatggtaggggcagagcctccagccccacttccccaggttttgctgacagtggccggcttttagatgatggtgatcttcacctcattgttctcatcagtctggtacaaaaaaggaatgcaagggctgctgcccaagcctgggtgctcctggaggttctgcatctcatgaagcagttgcatgatctgctgctcagtggggttgtcacagggagaatgcttccccgcctctccttgtgcagactccccactgctggcaaggctcacctcacaaagatctttggagagagggaggcagggtgctgtgggagccctcccctgctcctgcgtgcccactgtgcctgaggactctactcactaccctggcttgtcagtagccccaagctactggggggcgggggcccctggagtgggctcatcagcagggttctgggcagctgccaggaatctgctatgccacttgttgcagtcgtccacaagccacgccagctccagcagcttcaccttcacctctcccttgtcctgggccagcctgctgatgcactcctcctccttccgcactgccctctggctctggtacagtgcgatgtactctcccacagcttctccatggccccctgcagggcctggtgggtctccccacacatgggatcacccccagttcttggggctggggctgctgcctcaggttccttctgggccgaggccaacagatgagccaggcgctggcagtgcactccttcagctgcccacatagccgtgcctgctcctcctcggcactagctacagctgagttgaaaaatgccaccatggccttctggctctctagatcctccgggatgct

SEQ ID NO: 159618 - DNA, 1000 bp, Homo Sapiens
tttttttttttttttttttgaaactgacatttggttttattgtgccaaggacattacagatggcggatcttgtcaacacctgcagggcacgggtgccccatctgccaaggctgctcccacactccctacactcaaatcccgggtggcagccataatccccaaagatgacccccaccccaagattccaaagaagctagtggtggtggaagcaaaaggaatgcagcaaggtcagggtttcattgtccaagccggcctgacacctgccgccctgcccttgcccagtgcacaccctagaccctgggccggcctccatgcagctggaggccagaagacagcaacccatatctttgcaccctcctccatgccccatggcctgcctgcccagaaagatgccaccttcacagagccagtgctgtcgtctatatcatttttgattagttgattttataagataaaagtaattttaataaagaaaaaattcaacattgaaggctcagacgttcttgggggtactgggaagggaaatttcccacttcttcctcccacctccctggcatcagtgtcggggggtggcggcaagtttttctcatcttggaaggaatgaggggcagggagactttcctctgtctgaatgtctctctcctctggggctgcctggctgccagttggtctgtctctgtgtgcctcttgtctatcttcggcacccttgcccgagtcccctgtggaatgcagggatggttctgtgcgggatggggtggggggcaacagggcacatcagctggcagagagacaggtgatagtggcagcggcaatgagagagagtgcaggggtgggctagccagagggaagtgaggaggagggaaaagaggggagagcagaaagaacagaaggaggcaagagggaagaagccaaagaaggtgaggtggcaccggagagcaggagtactggggttgggagatggtgtccaatccctgggtctccatcaactcttgtctggggg

SEQ ID NO: 159619 - DNA, 1000 bp, Homo Sapiens
ttttttttttttttttttttgagtggcaacttcacgacttttatttgtggtgcctgtgctttatctcgaaaataccttctccccctgccccagacagtgggcggggagggggcagcaaaaaatagaagacgtccctccctattgcacatggaccctatatacaggcccacctggctgaggctggcgggactcttggcacattcttggatccctgctcaggaggggaggggtgacggggtggcatcacacgtgagatggggacctccaggcggccactctggtcctggctactgatccttgcacttcttggtcctcagttccttcctggtcccgtctctggccctggtcccctctggcaacgtccccctgcttggctcggcctcccacctccatcctggcctcgggtggccccctcggctcctggggactctgctcccctcccagtccggaggtcccaggggggctatggcttctctgagacttcccccggagccctgtcactcgtgttcacacgggggaaggggtgcgtgtggcagaagcagctgtataaatacgggtgcgggaaagtccctccgggtcacttggagagtttgctgatgacgcggatcaacgctgcattctcatccttgaggcgctggttgtcagcgcggaggtcagacagggccttcagctcctcctccagctctgcggccttgcgttccagggccctgcgctcgaatctctccagttccaggagggctggcctctcagcgaagcgttcttgcctctgcgtggcccgctccagctccaccttgagctgcgccagccgcagcgtggtctcggtcagggcctcgcgaagccgctcgttctccctgcgcagctctgcatacagcgtcctaaagcctccgtctggctcttccgattctggctcaggttctgggttgaggtcccgctgccaccgctgcctgcgggccgaggggccgccctccagggtgctggactcctggctgcggtcagccgg

SEQ ID NO: 159620 - DNA, 1000 bp, Homo Sapiens
ttttttttttttttttggcttttgttgtttgtttagtggaacactcaaatcaaaaacaggctcacggtctgaatagtcttctggtctaagcaactcagcaccagcgccgccaaggggaggccgcccttgtcctggccccgggaagagacgcagctccagccccgacgcagaccccatggcgcacacaggcaggcagagctcgaggtccaggcggctgccttgcgggaagtcgctgggggagggtccctggctgaggctgcaccaagggctggggagaggcccaggaaggggagagcgagctgggagctggggatgggagccgggaggtggggatgggttggcagaggggcagagccaagggcagaggcaagtgctggggccccagcagctgatgggaggcaggtccaggcctgcactacccgatggcttggtgcggcagcccatacaggaccaagttgagcgtggtgggaaggagctcggagctttggagcagcagcagcttgtccttcaaggtctgagaagcctcgccttggttcaccgcctcgtcgccactcatcttctgaaggagacgcaccgtttctccaattggcttcccaacggccaacagatctcctgtgctccacgctctccatgtgcctcttcaagctctggtaggaccgcgccaggtccagcaggactgccacctggcactcttgcaagttcatggcgaccaatctctccactaatatatgggacaggaagctctccattccatagaagaagaaaccgctgcagctgcccagggcctgctcccactgggcctggctgggaaagtgcttgcttcccagatgtcccgcccatcgcgacgtgaatgtgtcttggaatctttccaaaatgtcttgggtgatggagacaggagttagcatttctgggccctgggcctcctcgtatgggtccacgacgaacttgaagttgtctgagtcgactatgatgcagtcaggggggatggtccgggggatgc

SEQ ID NO: 159621 - DNA, 1000 bp, Homo Sapiens
tttttttttttttttttatttgtgaatatggcggtgagtttcctttaatcaaagacaaccatgacaaatttattaactatcaaaagctacattttactaaaaacaatctgcctttaaaaatgttgaatcatacaatatgtacaatacatgccgctttccgttttggacttcactatccatttgagtccttcagctagcatcaagcacttggcttctgctgcctctgacttggagtaatcacaggctctgaaatctcaaaggtcttcacaatctcctcccagtcacggtaactcaaagctataattccttgatttctaacttgtgtgttatgttcaaatccctcattttcttcattaatactaacaggctctattactggcagtcggtcttggtcaagtcttattcttgcaaaaccatcccgtataatgaaggaaacatgaaagatgttttccactgtacgggggaaagaatgaggatcaaccacaaagtcaaagaaggacattggggtatcaggatcttctcgaaaatatgtctgcaacaatcccaagattctttctacttctttctctgttgcttcttgatgagattcttccattcttcttaactgggcaggcattgccctctcctcttgtatcacaggaacttttcttggacgatcaactcgtggctttggcacagggcactctccgtatattgaacccaacagaaagtggaatgtatgggttttattaaaggtgttttctgctgttctgcctgttatcttccaggagtcatagactatgaattcaaaatcaggactatcttcatcacggatgagttcttcagcttctagcggatttacacccatatgtgtgagtagagtttcaacatatcttaacatgtcaaaggagctcaggtctgagcgcagctgctttgctttctctatgcccaaatctgaagccaaaacaagaaagtgggcatccaggactgcttctcttgctcgggacacttcattaaacag

SEQ ID NO: 159622 - DNA, 1000 bp, Homo Sapiens
ttttttttttttttttttgttttccttttatttattttagggacagggtcttgctctgttgccaagttaagtgcagtggtatgatcatgagctcactgcagccttgacatggtggtaaagccatcctcccgcctcagcctttcgagtagctgggactacaggtgtgtgccaccatgcccagacgcccagctaatgtttgtattttttgtagagatgggggtctcactatgttgcccaggctggcctcaagcaatcctcccacctgagccccgcaaagtactcggattacaggtgtgagtcaccgcgcctggccgggagctttaatttttcctacttgttaacagcgttatggggctggaaggaggctctcagatttccctgccctcctcacatcccccaaccctccctgggcgtgggggtgtcaagcatgagtcaggctgagcctgactctgaagctgttcccagctctttagtctaaacttcaaatcttcaaccctgttccctaatccaacacattccccaaatgaagggactggacagtgagatatcgggaaaccccatgaaaatagatgcataataaaggtgaaaatcatttaaaatgttcccattttttttttttttcaaaacagtcttgctctgtcaccgaggctggagtgcagtggcgtgatcttggctcactgcaacctccgcctcccaggttcaagcaattctcccaccttagcctcccgagtagctgggattacggctgtgagtcaccacacccggctaatttttgtagtttttgtagagacgggttttcaccgtgttggccaggctggtctcgaactcctggcatcaagtgatccgcccacctcagcctcccaaagtgttaggattacaggtgtgagccactgtgcccggcccccagtattttttaagctcaaatgatcccatgtccccaagactgtgacaaactaaataaccaaaaaagtgtggccacggtccaggtggaagggggctg

SEQ ID NO: 159623 - DNA, 1000 bp, Homo Sapiens
ttttttttttttttttttttctctcctgtcttgtctgaaatggcttccccacaggacatttttaaatgattcttaattgcagggtagccaagtggagtaggtctgttgctggcacgtgaatactggctgaacctgtgcaatgtagtaattgctaaagttggcatctgctacatagggggctggctggtaatagcaagtgacattagccacattaggaatgacattttggtcagctaacacccggatagccagcatggtgataaggtttaaagtctgtcttctttcatgtcccatcaggcacactgtgctctcatttaccactccatgaagggtcatgagatactcatacttgcggtcttccaatcccacaaagtggttctgcaaataggactccagttttctctgctgctctccaatgtctgagaagtcgatgaaaaacctggaacacatgtacctttgaagggccttgatttcatcagaggcgggcctaaagcccctcaccaagaggttgcagtacttaagcaggcctccccctcggatttcctctgggttcctggtggcaatgatcttgttacaaaggtgatcaaaggcttcctggaaatcgccatagacgctctccccgattattgtggggtgaaatgtctcagtcattgggttctctgaacattcataaaagagcagaagagagtctaatttgatttgaaaagaatctacactgaattcaaactgcctccggagggaatccacaaatttcagttccacatttttgccactgttgtttgacagggatataagactccatcggtcagagtcattgcacactttaaccattttctgcacataagcttccttgagcgtgagtggtgtgatcttctctttgttcaccccctcgggtaagaagtccaacaggcagtccagcacgacgtccttcacagtctgaaactccccttccccgcgcaggtcggcgcagaagatgaggtccaggtccttgtagcccagg

SEQ ID NO: 159624 - DNA, 1000 bp, Homo Sapiens
tttttttgtttgcaaacaaactttcattattctagttcaatctttcacaaacatactgtacagagtcttatatggtataaaacaaaggaaaacatctgtctgttcaatttaacacaacaccaaaataaagcaattaagactttggggaattcaaagtacaagaaaacaaaaacgattattactaattcctcagctttttaccataaacacttgtcatttaacatagtgtttgatatagtttcttttgtactgcaaatacttttggtctttcctccccgtagaacaaatgaagaattaaaatggaccccatagcatcctctgaaggaggtgaaaagataaagctcctagacatagctagcttatctttaagaatctattgtttctgaaattttcacaacaaaaatactgaatccccaactaatgatgcttattttgggaaacaataaatactgtgaggtacaataaatcctacaggaataataacaacagaaacatattaacagtttcctttggcaaatttaacggaagtgaatgctgatgtgaacatagaaaaaataattacaaaaacatgaaaaatggaaacgacataaaagttaaaataaagggatatttctaacttttagactgatgaaagaaatgtctgaggccattaaatgcaaaaaagaaatacattctctttaaattattgtgtactgtttgacaaaatattccttgtttatctcttcttttcccctccacttaaaaaaaaaggaaaaaagaaaaaaaaaagacaacaaaacagtctgcaatgcacaccctaatggttttggctgcagactgaacttgagtaaatatcatcatttagtcagtatgttgtggtagctgaggctgccgatgtggttaaccagctcaggcaacatgtgtaaacatcggaaacaaaacaaaacaaaaaaggtttggagaatagtctctctcctctttctcactctcaattgcttggtttcaggcttgctttcatttc

SEQ ID NO: 159625 - DNA, 1000 bp, Homo Sapiens
tttttcgtaaacaaaatttaatacaaccatatagtcaagtaataatggttaaaagacattttattagatacaacttttaaaaaattaaactatgcaagaagtatatttaaacaaaacatgtaagtaagtattcacgtgctacaacttaactaagaacaattaaatacaaagcattctttccactatgaagactctggagcctctaattgaaagcaaatgaccttaggtctatactagttgtaaagcagattatacttttgttcaactctaaatttgtattgtcttagagctccaacaactctcaataaaaatttaaataaagaaaccttgggggaggggtgatagggaaggggagagtaagtgctttttcaaaaaggtaaatgaaaaagcctgaagagggaaaaaattgtacataagtatggaacaaaaataagtatacttttttgacattcgatgtagatactgcaaatgaatttacacgggtttaatcaatgtaagatagatatttgtctgaatattttaaaaagcacctaggtatcaaaaaataaaaacaaaaaatataatgaaactccaaacatccaacaatctcccttaacattctcattctgccaagcaaccacacgttggtgcttattacacaatttaagaaggggaagtttatttactctataggaaacaaatatgaaccttatctaaggtaagcttcatttagattgaaaaaaaagttgaaatagcactagagaacttaaggcacataaacaaattcaggtgcagttattttgaaaccattaaaacaaattcttttctttggaacaatatataaaataagttatgaatgttgctgtttttatcagcactaggaaaatttaatatctaaggcaatcacacaaatgtaaaatgttcatataaaacattaaaaaatgtctaaagtgtctctggaattattcattcacactcctggctcaaatggtttctggtgcctagcattagatgtgacaat

SEQ ID NO: 159626 - DNA, 1000 bp, Homo Sapiens
ttttttttttttttttttttttttaaattttttctttatttaaacttcaataaaaatatagatttgtaactcaatagaaagacagcagtgataataactcacacatgagcagctcgcaaatttcaaagtctttggtcttcaagtcctatgtcacagcttcttcagtctgattccctccttctctgtagaattccgagaactagtttggttcacttaatcatctcaatggagatggccctttcctgccattcactcaaatctagaactcccaatatgtggctcacaaatacttcagtcatctacaaaagcatctggaaattagataattttagccagagtcagggacataaaacttctttaaagggatgcagtcaatcctggtattcaccacaaagaagatcctcatgtataaaaatgtggaatctgtgctgcttttaataatagaacctttaaggttcaaagaaaaaaaaaatgctttcctgaactacatcatttccagacacatcagccacacaaggagctgacaagacctgctgtttctattatagagaacgtgagactttaaaaccacatcaaaagaaaatggtgggagcttttctgctatgcagagaattccgcatagcactcctttgcccagactgggagacaaacatacccctccctcctgaactggatccccaccacctttccaaaggccactggacatgtctcttaaacgctgcatttcagctcttgatcattctgccctggggatcccttctctttaggttctttgttatggtctggggaaacactctgactttctatggtgttgacagcatctgagtccaatcttcttcttttcttcagttggttcaagtgggatttggattttatgtgcgctgcccattcgcgatccccaatgatgattcgatcacagaggtcacacaggtgataacttctcttgttctcagcttcattgtacggcatctttattggagtggctgtaggcttgtggccc

SEQ ID NO: 159627 - DNA, 1000 bp, Homo Sapiens
ttttttttttgcagagaaacagatatttttatttttaaattatcaagtgcattcacaagacagaaaaaaacaagcttgtacaagagtgactcaagctggctgggcccagctgtacctgacacacagacttatacatccagaacaatgaaaactcagtgccatcagaacagacttttgggcggatggctgtaggcttcaccagttatcagtgccactcaacactttcaaaaatgccttttttttaaagttctacacagcgggacatgtttaccaatttttatgcctctacatgtgcagggataagagccaaatatatttttattagaagatatttcacactgggtatacatctgggcaaaatttacacctcaatgcccaacattgtttttctcacttcttattttaatggaattgactgtctaatttggataggtctttctaattttatattagttttcactttcttggggttaaatattttatcagcagaccttatcacacacttgagaaaggagtcaagaaaagaacaaaaaatgaatatcccattataatatcaaacttcaaaacatatagtctataataatgacactattattctggaacttagaaaaaataaataatgcaatataataatgtaaaaatattaagattaaaataaatattaaacaatgtaagtctacaaaataggtatgtgcttaaatatgaaaagccttttttaaaaagtaaagacattgggaacattgttgccagtccagccaaaaatcacttttaatttaggtctatgaagttacctatatgatttgatcttaagaaacacaaaattttaattagaaagtaaattgttttcttttaatgtctttgttactgagactgttttgaatgcgccatattctaaagctgcttatcttttttgttttttggagatagagtcttgctctgtcccccaggctggagtgcaatggcgtgatcttggctcactgcaacctctgcctcctgggtc

SEQ ID NO: 159628 - DNA, 1000 bp, Homo Sapiens
tttttttttttttttttcttttaaattattttatttttgtataagctaaaaggaaatttacacactgaaatttcaaaagaccttgggcatgcacattaaccttgttagaggttcttctacatgtctctcttttttccataggaatttccccaaacatttaaaacccatagttttcactgtatatacagcctaaaccatagcaatctatgattatgtcattttacactgtgcaaaatcctcaaaaaatagtggtacaatagaacaaaaaaatcagtaacaagtaaattccattgtaagacattcatataatttggtccttctctgaatcatactgattttaaacagacacaatctctttaaacccctccaatcaagttctgacaatgatccataccctataacaaaagagcaattaagtaccttgcaaaaggtcaaacagcaatacgccagattgaaaagattaaaaaagccccaaaatgttaacaaaagccagatctgaaacccatcatacacaaaattaaaaaaaaattaaatgggggactttggagcttatttatgatagcaaaagtaatttgacatgtaatatgaaaaatcaagaggacagtcaatgcaatctgaaaagactgaaggggatttcacagacagtgaagatttgagttttttttttatttcaaaagttttgtaagaaggacaccaccagtgtatttcacaaagacataaatgtatacaccccagcaacacaaaaagaataaatcttcaaaaatgtttacccccgattatttacatttttctaatataaatttaggacttcagtatgtaaataaatatacattactatgtatacctttctagtgcggcttaccaacaaatcagctgaacttgaattttttttttttttttttttaattagagcaggtatgcttttgatggtagggaagggatggaaaaaaggaaaagcaatagaaactgtccaattcacatcagttatccgtctgctttt

SEQ ID NO: 159629 - DNA, 1000 bp, Homo Sapiens
tgagtgtgagagttttttattcaatttgtgaaggacagttttagaacaaaatgttagtaacactcttagaacactggtttgttcatttgacattttatctgcaccaatttttattacaaaaatcaaaaaagtaaaaattcattacaatatttgcagagtataaccactagttgcctagacaaaagctaatttctacaaaatcaaaaacttaatgcagttttattaagagagtcaaaattctctcagttaactggatatacatagtggtatatatcttaaagcagaaaaccccaaaaaacaaaaacaaggaaaaaagaaaatacatgtcaacagtcagttaaatattttgacctgacagtttctacaaatagtgatttccactacatataaaggaatctgttacatgtggtaaaacttccagagaccaagtaggaagtgtggaataaaaacaataaatccaaacgcagccccaggctgggcctgttttccatgaagcccaaggcagtgatcttcatcattaaggagggaccactgtgtccacaactaaaaccttcaaccacatggtgatctgcaaagcttcattgaaaaagacaaacgttctcttcttcacacaaatcactgcagaaatctttgtaaggctgtaccttgcatagggaaatagctgtgttccgtcaaattctacagaaaagagtggaagcaagctttttaaaatgatgcccatgtgcaaagagataaattaccaggcacctgatttaccaccccaatttatcttgatcatataatcttttaacaaaaagaaaaatggcaatatctggtgacagtattaaaaagacaatgttgagattggcatcagaaaaactccaaaagtgcaccttataaaaaggacacctcactgtagaaacatctatgcacttagtaagccctactcatgcacaaacaagcagttgctgggaacttgtcgaagtttactttttcagaaagttgaagtatataaaaaacg

SEQ ID NO: 159630 - DNA, 1000 bp, Homo Sapiens
tttttttttttttttttttttttttttttttttttttttttttttttttttttttttttttttttttttttttttttttttttttatatgaagttatttattagaaatttccaaggcactttaacaatacaaattttattaaaaaaataacatcaaaactgttcagcaaatctgtattcaatgtaaccaaaataaacaaacaagaaattaaaaaaaatatacatctatatatatatgagcaagaaacaagtgcattttttggtcccaatattttttgaatatattatctttatccagaggaattacattaatggctaagaaggtattatgtattagatgtatagaaatgtaactttaaaacttgttttaagttctgtaagaagagttttgccaattctttatgtctttgaaatcagaatccctaagctaatgttaatgataggcccaagacagagcatgtaataatgtctaatggtctggacaagtatgaaattaagaagctaccaataagtagctacacgaaatctgtagacaattctaagaaatgtcttggagtttgtaataagaacaaaacaaacacaaagagaagagttcaaaagtagacataaaatggacatcagcaaatttcatgaatctgggacaaagaagtgatggaaaaataaaatagagtaaaataaatttaagaacaatataaaacctagctaccaaaataaaattaaaaaaaaagtttaaaaatgtgagtatcggtcgggtgcagtggctcacacctgtaatcccagcactttgggaggacgaggcggactgatcacgacgtcaggagatcgagaccatcctggctaacatggtgaaaccctgtctctactaaaaatacaaaaaaattaaaaattagccgggcgtggtggcaggcgcctgtcatcccaggtacttgggagactgaggcaggagaatggcatgaacccaggaggcggagcttgcagtgagccaagatcgcgccactgca

SEQ ID NO: 159631 - DNA, 1000 bp, Homo Sapiens
ttttttttttttttttttggcggcagcagcagttcacatttattgagggcctgcccccaaggagctcacagcctgggggctgagaccccgaatgtgcagggggcggggaagaaaagaggtgaaggcaaaaaggcaggcaatgcagagacaccgtggcccaagcagagggggtgcaaggcaggcacaggcagggggcctggggcggatggggaggtggagaaccggctgccctgcctagacctgaggactgtagaccccacacgtttgaaggctgccctcccccaccaggatggcactgcccgggcaccctgtgggaggcccagctcctccacctgccctgagccgggtccagcctcacaaaggcccctccacccaggactcccaaccatgcagactcccggtggagggcaggaagctggggtctggggcccagccgggacgtggaggtggggcctatgagggagcagatgaagtgtgggtggccctgggaccctgggcaagtccctaaggaacttccaggatcccatagaagcccctgagccagctaagaagggaaggaagcagaacccaacgaagcaggaggggcctccaagaggcctggcccctcaaacctgctcctgttggggaagctcaggagtagataggtgaaaagcagggggacccacctggggggagggggcagcagacagagcagccaggcgggcagcagagcagggacacgcacacacggctcaccaccagcaccccctttaataaaacatgggggggggtcatgtgacaggaagaagggggtgaaataggaccatttacaaccacagaaaaacctctgtacatgtctagcgcctggcagaggggggcagcagggcagcagcgggctggagccagccctatttgtagaggatatcgtagtgtccaggccggtagagaaggtagaccttgggctcggagccctcagggaagatgtgcggattggtggtgccgccctcgccgcggtccatgt

SEQ ID NO: 159632 - DNA, 1000 bp, Homo Sapiens
tttttttttttttttttttttttttttttggggatcaaggacaagaggagtgctgtgtagcattccctcatatatatttattcccatttaaaaactaactgaagataccccaccacaacaaagccctttctaaatgctatcttcatgatacctctgtgaggtaggcagcataattctaatttttactcataaccaagctaaggcacaaatagagcctgagtggtaaaagtggtcttttgccaattatcagctccctggatttgttcactgtgacacacttcctccacactgatgcaggcaactcaagagatgctgctatgaaatgtccttagaggtagtagacctgatagctaaacaaaatcattcatgactctggaagacaacacactctctaaatgctcactgctggagtcttggaagatgctcttaagagtactaatatgtgcggtccttttgaataagaccaaatcatccatgattataggaaaaaggctgaagatacagtcttcttgtttcaccccacactgttgagatcggaactgtggcaatcttaacaagtcatataatccaaggaaccttagtccttaaactttagtcttaacttgtacattaacattctaagtcctatgttttgctaatgattttgatgttttttgtcagatacatttccacattcttggactcaggtaattctcttttaacacagccaaattatctttataaaatatacatggtattaacaccatggatctgaagcaaacaatgcatctggttagcatacattggttctgtatatttcgagaatcacttaagtacacaaaggaagcgtgcaatgttagagagatgatgtgaacagtcttggtggtttatctaatggagaattcggtgtccttcaggaaactaaagatactcaaaagttgctccccaatttctattaacaatctaaaaatgaacatttccatttcatataaatatacaaatttaaaatgtgtgcagttca

SEQ ID NO: 159633 - DNA, 1000 bp, Homo Sapiens
ttttttttttttttttttaaggaggcaaacatactttattttgactaatttgttagtaagtttattcttcactcataaaaagaacatatttttggctttgaaatcatgacataaaataaaaagggaaataactgaaaattatcagctaaaagtaggtagatgcagctcatgctgaatcatcagcaaatactacgtgctttgggctatagcagggcaccaatcaaagcaagaaccaaggatgcagtgccacgccatctctgaaaactgtttagttcccaaaggttgtttggtcctcacatacaggcaattaatccttcctttctcctgctttccttctttccttcttaacttttagctatgagaacagtgggcaataatgcttttatactagtctttctagtttataggatagtgttgttgttgttttaacatgtataacctgcatattttcaaccttcaaaaaataaaactgccaaaatcaactgtaactaaaggccatttttatttttggtctgttatctgctgtaggcagagcttcatataggaatttttattgcgaatttctatgactgcatccctaacaagctcaatgaacatctgtggccaaagcttctgcaaagcctcatttttcatgttgatttctgtggcttccttcacaaggtcttctatatatgttttacagaatttcttcttttcctttatttcctctagcttttcattataaaagtctcttgtagtataatttaatgtagcacgatttgtgttttctcctacaagtcttttgctgtcattattttcttcgttgataataccaggtttttttcctttggattctagtagataccgaaattgctttttcctggcatcacccagaatggaaatcagacgatactggggtaactcagaagatgctacatgtgctaggattccaaagagcctttcagccattatcatatcattctgtgtcacctctgttccatttattttctgcatactgaaa

SEQ ID NO: 159634 - DNA, 1000 bp, Homo Sapiens
ttttttttttttttttttgggaaaataacaattttattctttctcctaagattgtgattttattattccaagatcttatgcttgaattacttagcaagaaggcatgattatgcagaagacagggaaatgaagagaaaagagcgggaatatacaaaaatgaagcttccttaacagagttcatggtggagatggtagacactggtggagtttttatccaagacttaaaacttaggaaacacctatgatgccactttaactggaagtaatggagacatctgattccaaattcacattttaaatgcctatttgcaatcagcaaagagccaggtatgctgcatgctgcttgctgtaagttacgatttggcttcactagctcaaattttttcactccaccaaaagataaggcacaggcccgtttgtccaatcaagtttgctgaaaatactgcagcctgagtgtagacaaacttcccctgaatttgctagaagttttcttgtgtctggaggtttcaagatcaccatacatctttcaaacacttcttttctgaggatgttctaactgctggggcccttaaatacaaacccattctttgggtagagtcctggcctggtcatttgtgtgtataagtccatcctcggttgcatactggtaaccttggaagaagttaagaatttccttaactccagtattgtaggccaggccctgcattctgaccaccgtgccaggctgtggagggacaccgctaagattagcagctgtagggaagtagccaagactattaggcgaacctggggggctgggatagtacgctgtgtagttcatgaagagctgagtgcctgctgggtagtacgctgtggagggctgcagtgctcgtggattcaaaatcacagagggctggtaaatggcagcttctgtaggaataactgcagcaggagctggaaatgtgtaggagggaggagacaggcatggtaacttacatggcggtggggataagccatttcg

SEQ ID NO: 159635 - DNA, 1000 bp, Homo Sapiens
ttttttttttttttttttttttttttctcgggaaaaaaaaatgatttttttctttaatagtaaaataatatacgtcttggaaaatacagcatacaaaatacagaaaatataattgagcacttttatgagcatatcgatcattgaatcgcgagtctgcatcgcctatctctccgcgtctcttgcgtgcgtgtaggtatataaatggtgtataggcttgtgggtgtgcatgcatagacagtccttcttgggtactcataagggggctcagaccctcaggtgcccctgagtcttaaccccaccccttcttcatccgtcctgttcctgaagacgaccatgaaggtgactcttcattgagagcctctggaggctgggagcttttagagtaaggctttgcaatgtaaccgtgaggtagctatgatcatccttatttccagatgtgggaactaggcttcccagaggctgatgatatgaccaaggccacacagctggcaaacagtgattccaatggtctggaggtccctaggcctctgttctctcaacctggggctttcagtttcctcaagtctgattatctgccctcttcaaggtgctgctcagagggtctggggctcaatgatgaaaactgggatgggtcccaagggcaggtggagtagttacatccaccagtccatagactctttggggcaagccctgacgatgaccatacagtggggcagccccttacacaggatcttctccgcctcctgaccctcccaccccagcccctgcagctcaaggactctgagcttgggcatagtgaggcaggaggagaggatttcagtgggggagggcatttctggggtgacgaggggaccctgcaggcacagactctccagggccggcattccctccagcacagccaggccaggggcagagaggcccctcacggtcagccggatcttgcgcacatctcggaggtggcggctgatggccagcagggtgctgtcggcagacagggtgc

SEQ ID NO: 159636 - DNA, 1000 bp, Homo Sapiens
tttttttttttttttttttttttttttttttttttttttttttttttttttcctctttgttggtttttatttgtggggaagggcagctgagccaaaggggtcagaaattctgccctttgcctccaccacatggcattctggttttggtttctgtatagttttgggtctttctatgctggttgtatttatattaaacccctggttagtatatacttgtgtctgtgctgtcttgccctagcttagagtttgtttacactggtagagtgaatagctgctacggggcaagtacttcctcacatcagtgctttgagtgcatcttcttgtgttgcactgtagggtattataaattcatatccaggccgggtgtgttggcttttgcctgtaatcccagcactttgggaggctgaggcgggtggatcacctgaggtcaggagttcgagaccagcctggccagcatggagaaaccccgtctctactgaaaatacaaaaattagcctggcatggtggcagacacctgtaatcccagctacttgggaggctgaggcaggagaattgcttgaacccgggaggcggaggttgcagtgagccaagatcacgccattgcactccagccctggcaacaagagcgaaaccctgtctcaaaaaaaaaaaaaaaaaaaatttcatatccagccaggcacagtggctcatgcctgtaatcccagcattttgggaggccaaggcaggaggatcacttgagcccaggagttccaagaccagcttggtcaacatagtgaaacccctggtctctaccaaaaaaaaatcacaaaaattagtcaagcatggtggcagatgcctgttaagtctcagctaccaggcaggctgaggtggatcacttgagcccaggaagtcaaggatgcagtgagccatgatcaacccactgtactccagcctgggtgacagagtgagaccttgtctcaaaaaatataaatttttttggccaggtgtggtggctcgtgcc

SEQ ID NO: 159637 - DNA, 1000 bp, Homo Sapiens
tttttttttttttttttttttttttcagatttgaaccacacaatttattaacaagcatgatttgtggcctcgtttataaccagcccccaccccagcacttggtgcacattctccttaagcgcagaatttggcctcaaggtaatattttaggaataaataaaaagaggccgggcacggtggctcacacctgtaatcccagcactttgggaggccgaggtgggcggatcacgaggtcaggagttcgtgactagcctggccaacatagtgaatcaccgtctctaccaacaatacaaaaaaattacccgggcgtgatggcgggcgcctgtaatcccagctactcgggaggctgaggcaggagaatcgcttgaacccaggaggcagaggttgcagtgaaccgagatcgtgtcattgcactccagcctgggcaacaagagcaaaactctgtgtcaaaaaaaaaagaaagaaagaaagaaagagataaaatttccccttaggtctggaccttttgatacaagccgatgctcagcgggtgttgttgactgacaggtggatgaatggcccacgcttgccggcaggtgacacctccaggtgggtgctctgtgggaaggggagctgacagtcctgggggcctgcctggggagcagtgggcaccccaacattcacccatgcagggactggcaaacacacccccactctgcagctctctctgttaccaccttgaagccaacacgaaggccagaccagagctgggtgtccctctgtgtgggctcctgggacagatactcgcctgggagaggtggggctccttctcccagctccttcccctagccctggggttggggtggacagagctgggctgaactcagccctggttcccagcgctggctagccggtcctgcacagccccaggaggcaaaggtttcctggtagcccccaccccgaccccgtggagccggacccctccccaagactccaggagcagcgggagtcctcaggaccc

SEQ ID NO: 159638 - DNA, 1000 bp, Homo Sapiens
ttttttttttttttttttttggttggcaaaagggtgtatttaatagaatctgcaggcagatttccaatctgcctgccctgccctaccctccccctttgggtttgtttgaggtttcattccacaaataagcagcagataaaatactttacaaggtacagcacagttgtattgaagaaaaaaaggacccaactcttactttaggagtattaggcctggacttcccctgccccatgcaataaagcaagttttatatacactccccatatttttttctaacattttcttatataaatttaaatattttacaaaaaaaggctttttttcctccaaacatataaatctgagtgaaacatagattccccacccgagaacttgtttcttcactaaaatataaatgttgtctgatattaagggtaaatgtcttttgaccactggagatcactgaagtctgaattgcaccgtggagaaggcacttgtgttttctgaggtctccagcaagtatctcagtgagcactcatagaattgctgtctgtcctccagaacccgtgccaaggcctccgagtgcccagttactgaggcagctggggaaaaacgttgagtaaacatgattctacaattacggagataaaaaataaaaacagcatggactggttctaccctagaatcaaactacaacaaaatccaaagtgttcattcatgtagattcaaaatgacttcattctgtcataaattataaaatacaaaggtggctgttttaatgacaaaactcaaaacagtactaaaaggggtttgtgtcaatggacaaaagtcagtccctctaggtagggccccaaggagcatcacccaggttgaagggtggttttcctactgctgggccagaagtgctgtcctattggccttcatcttctccagccgcttggccaggtggctgttggtcatctccatctcctcaatcttgtccagtgctgttcgtaactctcgttgtagcttccgtttttct

SEQ ID NO: 159639 - DNA, 799 bp, Homo Sapiens
ttttttttttttttttttttttgggctcctaaaggttttatccacttggctgccaaggaaggcattggacaacagccagctttctcccagagagcccagctgacagaaactagctgtgaccacacagacagtaggagtatgcaaatgtccctccttgtccacatttcttgtttgtgtcccaaggagctatttccctcttagccaggatctggagtttcagggcaggcctggcagtgctgaggctgctaaagatggtctctcaggcttatttctgaggccggctgagtctccggagtttcttgagttgactgagcagctcagagataaaagcctctgtggggcgggggcagttcccaagaatggcctccagctgagtcttctgctcctctgtggatagatccatgagagcttccaggtcaatctcaggctcagaaggggttgcttgatcctggaagagctcctgaacttgagcatccacccattgctccatctccagccagcgctggagctggccccggtcatacttcactgtcaggcggctgggtctccgggacctgggtatcttggaggagtccgggtgggacttggactctgagtctgtggatgatgtccttctcctcccagaagcccagtggaccttcttacatgggttctccccatctgggctgggagatgtgcaggaagcagggcttgaagacagcatggaagtattggtctgggcaaggagctgggaaaaaccgccagttctgagcagagccacagagggaagtgccaagctacccatacggaaagacaagta

SEQ ID NO: 159640 - DNA, 1000 bp, Homo Sapiens
tttttttttttttttctttttttttttttttagaaatcaaatctgtgtcctttattccacctggtagggcatacccaagaaccatatactgagtcctgtctcaggttgatggagggttccctgggcccaaggcacacaactgcctgtgctctgctctacagatgataggagggatggacagtggagagaagctgagccttgtgaccaagacccccagcatgatggggaatggaaagttggaagaagtaggactacaagggaggggacagggaggggcttagaggcatttggggcaggctgggcattttgaagtgagaggcatttccatccagctccccatgtccactgacagccaaacccaggcttcaggtggaggtgaggctgctgtttcccaatgcggtgctatattcttctggaagcccctttccttctgctgtggctagagctgtgaccaagaattgcaacaggaggctgctaaagtctaggagagaactcaggcaccaagttaaaaagactcccatgaagaactgccaccttctacccgctgcagtcttggatggtctacccatgcagaaatcagtggccaggaaggcagggcctactgctgggatatcagggcaagtgcccagtccaagaaagccactgtaatgtcctgtaggcaaagccaggtccagtggacagcctcactgagctgtgtcttcatgcagtcccaggtcacctcacctctgcatgcctcatggcagtgctcctgggcccaggccagggcctcaagcaagaggtgccacagtggcagcagcacattctggtggaaaagcaggggcagctctctcagatagcggagtagctgattcacggaatcggggagctggatctgtagcctctgagagagactggtgagactgtcaccaaaccacgcaaggtgagaggcacagtgggcagaaaggaagctgactgtggcattggtgtgagcccaggccagctgcaagctgggccgcaccac

SEQ ID NO: 159641 - DNA, 1000 bp, Homo Sapiens
ttttttttttttttttttttgctaagcacggaggctgtttataggctgggccgcatattacaatgctcagggctccactgcaccctctcgggggtctgctagcgctttccgtagactgtctccacgccctccccactcccagccagtccagatcctctccggagggactgcagcaaggatcgttaagtctgtccaccgggatgggggaagaccagggccggagcagattggccatccttcagaagatcgacttccgctattggggagagtctgaggagtccgttctcccacggggcctcgtcactctttgcgaagggcgcctggcaggtcaaatgacctccatttccacctcgccttccaccttcttcttttgcttctccatcactgcctccagctctgacactttctctttgtcctccagcagcgagcgctgcacggtgacctggctgtacacacgtgccccctcctcggggctcaccgcccgcagctcctccctctgcagcgagaaaagctgcgccccggtcagcacacccagcgcgtccacggtcccggagctaaagcccttggcctgcagccaggcgcggacctcggaggcgtccgagcccgggctgagctgcggttccggggcgcggggccctgggactgcgcggctcggtcccgagcggccctgggccaggcgcgcctgcagttcctcgttgacgatgagcatctgggagaatttctccttctcgctggggtccaagccgttgaggctatcgcagctgtcccagcggggcctgtcccagcggggccgagccagagctggaggtggggccggggctggggctggtggtggaggaggagtgctgttcaggctgcgggcagggctttggctgtggtgcagccggggtccggggtagggtgtcaggatgttgtagggcacatatccctcctgccccgctgggtcccgaaccttccaccacttacgactgtcatccaggacctccagtacgtcccgctg

SEQ ID NO: 159642 - DNA, 1000 bp, Homo Sapiens
aaagtgatcttttattaaactatttactgcttagtctaaattcaggtagagcagtcaaagaaagttatccatcaactttgttgaattcatatctttcattttagaataacagcagactttaagcatgtattatttttccagtgttcagcttagtctaagactgtgtgagtctggtttgatccattgccgtgaagaatacacagacagcagctgtaatgagcaggtgcattccctcgtagagaagttttggagaaaatacactccatataaataaatgataacgcagagatgtcaccaaaacgatgtacgtgaaaactggaatagaacaaatcagtgcgtagcagaagcaagcatgactcagtgctgaaccactgcgtgtttctgagctcaggaagtgcactaagtggctggcccacagcacaggccctgcgtacgtcccaagcgctgtcaggagcacggctgggatttccacgtaggtgtctaagcccacgaagcctgcggagatgtccacggtggcaatgttgttggagttgccctgaaaatagaagaatgcttgaccaaaccaataatgcatcacagtaatctcagctgcatcgtgtctcaggggcttccagatgaatttagtcattagagtctgaatcaagaggctaaatgctaagaccggaagattatgtggtctaaagagcaaggctgccagaagaactaatccactatatatctcccataaacctacagtcttgagtttgaagtctgcagcaatgacttgagatttaagtaagtctttggtgcccgtgaacagaatgccaaggacaaagacataaacaaaacgagcttcaataatacccttggaaatgtccttgctgtccggccgccacgggaaccggacactcccgatggccgcccggtagcagtagacgcccagcagccccagcgccagggcagccttggacacaggggagcaccccctctgcaccagcacaaaaactacgaggagggagag

SEQ ID NO: 159643 - DNA, 1000 bp, Homo Sapiens
tttttttttttttttttttttttttcccagagggcttctccttttttaatcaatgaccaacttatccagctttggaaatctggacaaagagaaggctgagaggaggcctggtccagtgtctaagggtctctgagtgagtctgtgtcagcatgtgggccccagctgggcctgtccatgggttgggcacagcagtttcctgagtaagagccagccccaccctcaggggcagcattccagcccaaaaagaaatccaggccctccaggttcggcctgttttcaaggccctcaggacagtcaataaataggttagattctgagccaggcctggaaagtgagggtattcaaagggcaggatgagctgctagggatcgtaatgattcccaggtactctcctgcccttctccaacaaggaagtaaataaacagacttttaactcaggaacggggtgttggagcaggggaaccctccccttggagttagtaattaagtctcatgttaaaaacaaggtagccccagcccctaccagcatctacaaaatcctacaggatggagggaagggctagccagcctgggggtacacagtacccagccccgcagggtcctggaggaggtctcatgtctgttctggggctcctggggctccctcctcctttgggggtggctccaggaaaattggggtgactgagggtagcttcttcactgagtagggggaagccgggacccccaccaccaggaagtggttcttcttccgaaacaatctccacaggccccgatggttgccacgcacatccaggtcccagatatggaggcacttggcaagctgggtccaggtggtgaagtcatcatctttctccattcgaataaaggccacgtaggtgtggccctctgtgtctggcaggaaagagtcttcacaagggttcttgctgtggtccagaacctcagcctcactgagcagcctgtgaacttccacttcataagcttctttcttcagactgtccac

SEQ ID NO: 159644 - DNA, 1000 bp, Homo Sapiens
tttttttttttttttaactgttaattgattactttatttcatataaaagttacattgaaagaagaggttgaaaagtcaagtatacttgatttgcacacacttgccaagtctcacaggattcaaccacttggataattgttttattgataacaggatatacatattaaaagcctcacactgaagcccacacgcatgtccaacccagacaacaatgtgcaaacgaatatgcagaacaatctcggaaactggcgtctccaggatcacccacactttgtccctctggctgtgacacagctcttcccccaacggcgcacacgcttctgcggtgaccaagtccacttccaaaccccctgcaggtttgctcgcttggctaggacggtggctcaggtaggtccctttgtggttttgcatcagcagtggtagaagccctgattcggatggggtacagagtaattaaaaacaaaaaacagttcacagatgaacagaaaggcaaaacaattcccaggagggagacgccaacttctcttagtgtggagggcaagcataaaggaagaccctcagactttgtcacagattgcttcttgatgcgtccggcaaaaaatgtacaaaccaggcaagtttaaggcaaggccccacgaggggagctgttggctttctggcataattttaagctccgcaccaaggatcctattttatcacctgtgccgtgggtggagaagaaaacgtaaaagctaaccaaaaactccaacaagagggcgccatcctggccattcccgactggagcgctgcctgcggtggcacagtcgcccctgccaggggctggctgcctcatggtcccctccccttcccagaggtgcccaatggctgggccctgcctctccagtaaggatgcctcccctgccccacacacagcatcgggctgccccaagtatcaagtcaccgagccgcagctctgctcttacctaggtgccatttatacactgctaatttggctggaaca

SEQ ID NO: 159645 - DNA, 1000 bp, Homo Sapiens
ttttttttttttttttttaagctgtttttcatttttttattgctgttaattcaaggaaaaaaggttgcataaaatccaatctgttctagaaatataagtggcctttccagtacataacatttcaaatatcaaagtatatggtaaacatacaaataaggagaaggtaacatacctcctatgtacagtacagtattttaaatcataaaataagctccataaagtacaactggcaagtgattcacaacgcggcccataagtggcttatcaaaactctcacttgaacaactcaactgcagcttaacaattaatttaataatgtggtccaaaaatacccagatcaaataaaatatatttaatcaaaataatttcctttacttgaactttctttctaaattaaagctttcatctaccccttcacacccaccccttccccataactcccacccctgaaagaaagtttcaaaatgtacattggtgctataaatataaatgctacttatgaagcatgaaattaagcttcttttttcttcaagttttttctcttgtctagcaatctgttaggcttctgaaccaagaccaaatgtttacgttcctctgctgcataccaacgttactccaaacaataaaaatctatcatttctgctctgtgctgaggaatggaaaatgaaacccccaccccctgacccctaggactatacagtggaaactgttcattgctgatgaatgcagcagtcaccaaaaaatacacccaatcttccagataacctcagtgcactttaggaaatcaaaaattacctggaagcaatttagtacatagattggctttttaaaaaaacttttttttttttttaaaaacagcagcattaaacttagtgacatgacaccgacatgattaataccatcttaacacactcagaattccgcctttcacattataatcaagcatagtggtaaactgttataaaagtgactttgctacgagagacaggttagggaacaa

SEQ ID NO: 159646 - DNA, 1000 bp, Homo Sapiens
tttttttctaaagactgttcatctttttattgaatattctggtaaatatttcacattaatacaggctacattacgtagagccactatatgacaagaaatttactcaactttttccttttaagtatgtaaacaattatacatgtatttatcaccctaaaaggttgaaacatgtaatcaactaattctcttctgcatacaagtagtattctgtatgtttagccaaaagcactaaggtcatatgatcttaagttcaaaatggctaaactaaccagagaacataatcaggtggataggaaatcaatttgttcttatacaatgggcaatcaaatttccattgctaaagcctcagagaaaatttcttaggcacattaaaaaaaaatccccatggttcttccaaggtcataggtttcttaaacaaggctaaagagtaaagaccttctaacttagttgacatatttgagatgcatgtttccaatatgaggtgcccacgtgccaggccaaatctgctgggcatcagtgcattcagttgaattttggataacttttatcatagggttccaagcaggatctggattgtgaagtccattaaacagagggcctcctggaacatcagcaagctgaggatgagagggtattatggtgcctccatacatggaaattggcagacctttagaaaaatccacaaaaccacttgccataggctgatgaaaaatgttagagggggctaccattccagaatcatctctctccattggctgatgttgggagaatgtgcttgggtctgataattgttgatgcattggatggttccccatcacagattgcgaccaacctgataagccttctgacacagcattgacaccaaatgaccagattccactgtgtccaacgggagcgacaaaactggtccccgccggggcttgtgcaacagaccctccttgccgaattcgggccagtctctctgttccaattgggggaggtatctttcgatcttgactgg

SEQ ID NO: 159647 - DNA, 1000 bp, Homo Sapiens
tttttttttttgaccagtgtattttgtcttttataccaacaaatccagaataattcatatgtctttaggaaaatttgcataatgattcacagtttacaaaatgttacacctcatacaatgagactaaaggcataagtgttagtttgacagatccattttacaggttagcaacctggactctcaggctgaagcctgagtggaacatgggcctagcacttttcccagaccagggccagaactcaggtttcccgctccctaggtcacactgcctagcccagggccttacggctgaggctgaagaccccggagctcactatgagggcaatcctcttcctagaaaggcttcctgaaggtccacaagagctgcccctttctgtttccctcaatggtctccacggcatttgtcagcttctgttgttggttcgaggtgggtgaaatggcactttggttcagaatggtttcaagtttggcttgagaccctgcttagtcataaatcctctacatcaatgaattgtgaccagaaacttcaaactcgtgaaggaaaataatcttgttttgtacaactttttatcctactgaccgtgctttgcttcactcgctggtgaggggagttgaacaggaaggtgccaaacagtgagatccgggtgctgtcatacaacactgccaggtaggtttcggagaactcaaaagctgcaggatattgttctaacagctgccaggtggcatccaagaatagcaaaaataaaggagactctttctctgatctctttagatggttgcatctgtctagaaactgatatcctgccatgacccactccttctgtatcagactctgaaatccagtaattgtcctaaaatagggatccagcatcacttgaacaagagaagctacacaacagctcaagtctcttccttcctcctcttgtaggactacagagagatgtttgctttctagcatgtatacaagttctgctgaatgcttaaggaatgcccttacata

SEQ ID NO: 159648 - DNA, 1000 bp, Homo Sapiens
ttttttttttttttttgcttagtataccaattccatttattgttaaagaaagaagtcacttcacttagtaaagaccaatgatggcaggtagaaataaaaacatttaatctgggctgggtggagtggctcacgcctgtaatcccagcactttgggaggctgaggcaagaagactgcttgaggctaggagttccaggcaagcctgggcaacatagtgacactcatctctacaaaaaattaaaaaattagttgggcatggtggtatatgcctgtagcccctggctattagggaggctgaggtaggagaatcgtttgaacccaggaggcagaggttgcagtgacctgagatcgtgccactgcaccactccagcctgggggacaagagcgaaactccatctggaaaaaaaaaacaaagaaaaagtttattaaagatagaaaattcttccacatgaggaaaagatggccagagccactgtacaattaggttctgacttaaagattagagattgaaacaaacagaaaaaatgcaaccgcttgcatttcttgctaaaagtaaaccaaaagcagtttaatttgaaggatgtgctatggtagcggtgattaggttttaggtcaaataaccaatgggcccaactcaatgtgagacagggggagcctcattaagaagagtggctgagaaggaggcagcatgaccagtacaaattattgcccttggagaatggagatgtcgctttcctgttcattgaagattttaattagaaatgtattcttctttatagatgtttccattagttgtattctaattatagaccttgacaaaaaaagcaaaaagaagacccagcagagccaagcccacggacatcctcagcgcacagtcttgatgtagccttggcatgggcagcaccattctggaactcgctgagtcacactgagatgcagcagaggtgtgggatcctgaactcagctggttcccaagcccatttctgaagtcctttgtcaaac

SEQ ID NO: 159649 - DNA, 1000 bp, Homo Sapiens
gttgtgtagtctcatttattatgaagattcttccagtatgtacatacgaaccaaaagtatcagtttatcagtcccactcacatcccacccccacaggcataccaacagggtcaatcttccttcatggtacctagaaaaactgtctttttccttaggtaaatggctaaaaatgtattcatgactgctgcagtaagagcatccacctatgtatctttacatactttgagacagtgtgataaagctctttcagcacagcagtctattcattcaaagtcatctaaccaaataccttcccccacagctaagaaagaatcccagtgtttccctagtttagagatgaagatactgaaattgcaaaagcaaaaaggctaggactaagatccaggtcagtagttcagctataccagcagtacacattagaattacgaagagttttaaaatatacctgtaggggcctattctgactcagaacagcctgggctgtgtgtccttaaagagtacttgagatgactcagttgtgtgactaaggctgcaaaggaagtagagtgttcagataacacagacaaaaggttacatcattcttagtttttagttttatataaacacccccatttttagttttatataaccagataaatatggttcacttttatttaaattcaaatgggtgctatactgtcacgtgcctaatccccactttacaacttcatgctggatgctggtagcaaactaagatatttttctcttttatgtattaaattccacttgtgcttcatgaaacagactataagaacaacaattcaccataatccccctttgccatgaggaaggtaattctggtcagtttgccaggtattgataaagtaaagtaagagaagacagggcagcaaatcagcagaccaaaaacttatggtagaaatgccaggctgaatcaccacacccacagcgcacaggaacaccagcccatatgaatctacagttctacttagaccagcaggga

SEQ ID NO: 159650 - DNA, 1000 bp, Homo Sapiens
tagcttacaaatatggttgcagagacatctccatcttgtttttattagggatgtgacaaatctttgatttgtattcgattcgtacacggatagtgccattttcccccaaattttgcaattcagttgattattgccccccaataaaatttggatgttcataattgttcatctgagacttccttggtgaagtggcatttattgtgaccattaacaagcgctgcagcacatctacatatgtcatgccatttagaaggcacattgctgagggctgtaaatggacaatcagtgttcaagtgcagccaaatcacgtagagctggatgggaaggcctctatgtggaatttgtgcgggaagaaataaataggaaaaaaaaggcagagaatagtgtggaattgttttttttaaaactgtgtgtaatacaaatccagccaaaacaatagtgcaaaaagttacaaagcaacaatctcttgggctaatgcagtataggctatacagaaacagccacgatgaaatgtgcagatcaggcacggtgaataccaaggaaccaaggagacggttaatatttcaacccacagtttgtgttttggattttttcccccaaaatttccatacaacaaacagacatctagatcaacccagcaagctatggtggaagtgtgcagtccagaagagcccatggagaaacaagtctcctgaggccatgaagatccgcaacaggctgagtgagagtagcacttggaacatagccacgttctgtggtggaggaggtgggcctcgttagactgctcagattactggaacctcgttatcacatcccattctacaagtttttcactgaatgtttcctgacatctataaatgagggtgcctgcccatgttaatgctgattaaaaaacacaagtacacaaatctatctccttcattgctggtgtatggacccagaacaccatcacaaaatatttccttggcctaaaagatcactggattaacaaggagtttta

SEQ ID NO: 159651 - DNA, 1000 bp, Homo Sapiens
ttttttttttttttttttcattttctccattttatttgtcaatataaaaatactcaaatatttacaacaaataaatacgcggggacacaataagttacactgttaggagccctcctcctagggctggaagagagtatgccattgtccacagcaggcccaccctctcccttctctcccctcacacagcctttcccagccctgtacaggaagaaggcaagtataaaataccactgaaccccggggccaagtgggaggccccacccacccttccccccaaacacacaggaggctccatctccctccccccaccctgaaaacattcacagccctaggagcaggactaggcccaccccaagccctgcactccctctgaaggggcacagcaccctgtccaccccacctccatatgtacatcgctgcccgacactcggggcagtgggggtaggagagacaaagtgatacgaccccttccccttcatagctccaatgactcaccaggaggacccaggccaagggaagacttgacagaaacaggaaggctatgccacaagcgcgcacgcgcgtgcacacacacatacacacacacacaaacacatgtgcaaatacagacaaacacacatcttgaaacttctgccttgaaaagttttggcggctggggtcccgcgtgtctgtgattcacagagaggaggaagatgccttctgcgaggctggtgccctggtgagccacaccaagtggcagtgcccgtgctgagcagagcaggtcctcatggccgggtgggtgctgggcagtatctgtcccagacagagcaggtgcccgtgccatgtccctgaggtagctggtgcctgtgcaaaagtaggagctacacctcccacgcttcccgccgacgcggtgggggttcccctcatactgatgactcctcggggttggagtcgggcagtggctggcgttgctgcagtttgcgtctcagttcatccgcgagctcaggcagggggtgcccga

SEQ ID NO: 159652 - DNA, 1000 bp, Homo Sapiens
ttttttttttttttttttaacgttttaattaaatggatttatttaaaaagactataaaatctgacatcaagagagataaaaaaaaaagacccataagatttaaattgacaaatataaaatgattggctacaatgtaaaaatacatttcccagcccccaaacaaaacacaagtatagtaattataaaatttttgtactgtgagttcatttctcttataattcttgagaaccattctaagcaatctatttgtataaaatataaaatttatcataactgttaatttaaaaattattttaaatttgagtttattgaatttgccatttttttgtacataacagtggtttctggtcccaagttccccttgaacttatttactacaatggtctttttactcctatttatttccttctacaatagaaaagaaaggctaaccattcatgggtcccataaaaaacaatgtgaaggaaggttctaagagtgaccaaatataccagtgaacatactatctttctgaaaaagaaagaattaagtgaccaactaagagatccacttttgcaccaatgaaacacatggaggtgaaacctcagaacaagcggagcttaagctcaatgacagtatgttttatatgacaggccagctgagaatgtatctgtcaatcctgactaagcccaatacatgggtggtgaccctgaggtagcccagatgatatgctctgaattttagataggtctaaatcacaatggtacagtctgatgtgaaactttagtctacctaccataaactcgttttctgaatcagtccttattcataattagacccaaaacccagctatttctcctctcttagatgacatgcccaataaaaacagcatccatgattggtttcattatctcccaattaagtagtggtgacaccaccactaacactagtatccaaactctgatacaaatcctaaaggtattgagtcagtaagacagagcagaagctatgttgggccata

SEQ ID NO: 159653 - DNA, 1000 bp, Homo Sapiens
ttttgccctctcatcccatttattaaagaaacagtaagaaaagatacaatgcaggaaaaccaccaaccatccttgcacaccaggccgaacaaagcacagtgatttcttcccttcatcccccacccccaccctaattcccatattcccatccacatcagtttaaattttgaggttctttgattgattgggagtaccagtgaagagggagttggatgagtagaggggccttaaatctggccacctctaagtcccaggagaagggagctgcaggcccagtcagtcaagcagaaactgcattcggtgggtctttctttgaagtggttgtccatctccctgttctgtgttcaagcccccagggaaaggtatggcagtagaggatgaccaggtccaagctgcccaggtcagagctacggaagcatggtccgttcaccaacgccacgtttctagagagcagtgagctgattctccaatggtgagcaggggactacatgtgaactgggacctgcaggccaatgtatccctgaggaaaagtccacaagaacaattcaagaaactagtaagaaacaatgggcagaaagctgtgggacgaaagcacagcaggcttctgggaggctggagatcctttctctcaagggcaggattattcccacctgccacagttcacatgccacaaataacatctcaccttcagtcaagaaaaacgcaaaggaaaaagatggctcatttgaacttgagcccaagctatgttcttcagactgtagctccacaactacccttttacctaagacagcccctgccaagaaccacagtgcctagaaaccaaggtggtcctggagggaaaatggtgtttaagggggcaacattccatttgggtacattgcagccattggaccccctggtctggggaaagcagctgggtttgtgccagggaggctccccactctaggaaatgggacgaaactcttgcctgcagggccattcatccttggaaaggaagctg

SEQ ID NO: 159654 - DNA, 1000 bp, Homo Sapiens
ttttttttttttttttttggagggagaaacaactttattttcatcagaaattagtaatgtttataaatttgtttatagtagtttgtaaattattatcagaaatagtaatgtctataaaccacttactttaagagacaatcaggaactatgatgagggcaataataaaaggagaaatcttacaaaaaattaacctggatgttgtgcttgctctaaggttaagtcacttagggaaacagattcagtattatccaatggcttaaccatccttccttctttctgtttgctttttggtggtggctgggttacaaagagcagtgtcttctgccctgaaggtagcagtattacggtgggtgcctagaggtcaattattggtttagaagagattcaggcccttaacttttacatgtgctttccaggaaaggagacactttctttctcagccctgtgtgaggactatgttagcccagaaagtgttcttggaccactgggtgcccattctcagtgctaggaacaggaagaccctggtttcctggtagaatttatggatcctacagctttctctccatcaaactttaagtcacagtaagataggactctggagtcacaggcacagccaggagaggtcagcgtccttatgctgactcctggtcctagacatgggtcttaagatccagtagtcagtaggtctgttgcaaagtcagggactggctagatctctccacagcagaagaaagctcatacatgctgacctgaggaacttaatctgacagtttaccgacacactcataacgcatctcttccttcctgtgatgagagtactgctttcatgtgtactgtctgatgacgggtgagggcagagttcttagtgaagcctctctcacagtgagaacacctgtaaggcttttcaccagtgtgggtttttcggtgggcactgaagtgggagctattgttgaagattttcccacacactgcacacttgtatgggctctccccagtgtg

SEQ ID NO: 159655 - DNA, 1000 bp, Homo Sapiens
tttttttttttttttgggtaggctagatacatttattaatagtaaaagcaaccatggcaaaagcaaccatactcattcttgataatgaaaggatcttctatatacaaacctagcaaattaaaaaaaaatactaaaacaaagtgtctgaagataatgaaaggcagttcaattcatgtaatgtcaagtaactttcaattgtaatagaatcatttatattcttatagtgccttacagcatattttatcgttaatgagaaaatgaaccaaaactatagtgctaaccctgaaaccttaaaccgaaccttacaaagttaaagactaagtgttggtcagaaggaaaaggatgcaaccatgcatcttccacagggaaaatgaaaatagcaagatggcagaaatgctgaactcatgggtacaaacacacttttctttataaaaacaaaacaacacacacacatacacacagaaattattacaatgcaaatcatcatgtgtctctattttctaccagctggtgaacctgttattaaaatttaaaagaaaaaatcaattaaactttttctattttaatccatagaaatattcagtaacataaatacaacatttgttgcatattaatgaatgtgtggcttcttgtgctttccatccaaattagaggtaaaaatccccaatgactttattttcaatgagatatagttgtaaagttatattaaacatctacacaaaaatcaatctttccttcaaccgaattctatatgaaagtactaacagtgaagattcatgatgttgtgtgaaaatggtgactcataacaatgtagactcagctacagattttaattcacaaatatatatatgcgccttgtgtatgacaactgtatgaaaatagtctcaaaaataaagacaatacttgagacacaaagcaacccattttccctgattttgcattctattacagggaaaataagtctctgacgcttcataaatactttaaaaagttcgggatg

SEQ ID NO: 159656 - DNA, 1000 bp, Homo Sapiens
tcaggtataaaaagtttttattatcagcattgtacagtattcatagattttatgaagcattctccaaaatatatcctccaaggagagtaagtctgttttatagaataccatatgcctgggaaagacccaatctctaattttgttttgttttgttttgttttttgagaccgagtgtcgctctatcacccaggctggagtgcagtggcgcaatctcggctcactgcaaccttcgcctcccaggttcaagcaattctcctgcctcagcctcgcaagtagctgggactacaggcacacgccaccacgcccggctaatttttgtattttctttagtagagacagggtttcaccatattggtcaggctggtcttgaactcatgacctcaggtgatttcacccgcctcagcctcccaaagtgctgggattacaggcgtgagccactgcgcctggccccaatctctagtttttactacccttcttttctctcttcttcttccctttctacattaagaagccccttccttaaatcctaaggtccttttataggcaatctttgcaactgatgagtttaatgctgttttgtcctctatataaaattgttagccttttctgagacttctctgtttcttcatagagtcttccttttttttttatttcctccagatggctctttttattaattgacttacaataggggcaggtcagtttgctggagataggaaaatgttgaaaaacacagcaaataagacacaagctaaatatgcagcaattgctatccaaaaccttggatctttcagcagtgctttatcaaagcagctaaacaccgtgtagccaatggacattccagcaaatccacctgcaatgtgagctgcaaaagacaccggagacccatcttcaggaacaaagaaccttctatagagagcaaatcccatgtccaacacaattatcaggatgatgatcagcagtctgaaaattccaaaggcaggaatcatttcttgaaaat

SEQ ID NO: 159657 - DNA, 718 bp, Homo Sapiens
tttttttttttttttttttttttttttttttttcctggttcgtaaaactcatttattcaacaaagcagtacaagcctccccttcaatcaggacctgcctgcaggggtgggctacttcagtgtcttcagccaatgggagctagagggtttaatactttagtccacttcccttcatctctggccccatcgacaacatggggaaggggagtgagggcctggtagaagggtactaaggccccttatttcgttcgctggtagaactggaagactgctttctcctgctcataggtctcgatggagccgggtcgtagtcgtcggatttcagcaatggcatctcctgcagccaagccccgctccttcaccaggtaacaggccagcatggtgccagtgcggccaaagcccagagcacagtgcactcccacagcctctccccgtgcgttggcctcgtccacgatctgcacgaagcggtcgatctggtcgggggccggcgggcagaagtcggggatgcgcaggcggtgcagggtgaggccggggcagctgtcgctgtgagggggcccgcgctccgtcagggacaccaggtgccgcacgcccaggtccaacaggaactggtagtgggcggggagccgcggcagcgccagtcccgccagccggcccggaagcacccaggagaagttggggggctgcacgcccatcgctggcctcggcgcctcccgggccac

SEQ ID NO: 159658 - DNA, 1000 bp, Homo Sapiens
tttttttttttttttgaacataaaaattctttatttaacctaatccagccagtattgagatagtttgctatattaaaaacaagacgtttaaaaaaattacagcaaagttagcaaggcagtgactaattaagtcactaagtttaattttatattcttcacagtcatttcataatcatgtaatggtaaacaatattttcagccactttggagataagttaacttttgaaaagaattctagtagtcgtcattgaattttataaaagaggtttaaaacattaaagtttccagaaataacacagtaaagaaatatgaaaataaactggaaaataaaatatacccacccatccgaaaaatctacatcatctctttcatttgtccccaatgcctttcttttacctctccatttacttttcctagagtgcaaacagattacttagcaattaagaaacaactactgctttgtaggggcgattttgagcctaagtgctgctgttcctttaatctctcagttaatcctagaaatagtcttctgagataaacattatttgcatttcaaagattaagaaaactgcagttgagagaaagtcaaatcctttagccaaaatcatacatacagttattgaaagctgaactatgatttgaacccaggtctatccaactttaagtctgcctatgctcttttgttgcttcatggtcaggcaggtcaccttcctgggaagactggcatgtggtatttctcgagctaataataataaggctctttaggtttaaaagtgttcaattcggggctagaggccactctggtcctcaggcacttgcagttccctccccgcaaccctaaaaaaaccctccctcctgccccaaaaggattagagttgttccccggccttcatgagccctaatacctataaaaccaagcagctactccctgtcaagggcattaatgtagtaaatggggaactgtgtgtttgcataactttagtaaaggctgcctaaaaac

SEQ ID NO: 159659 - DNA, 1000 bp, Homo Sapiens
ttttttttttttttttttttttttttttttttttttttttttttggcatgttcctttacattttatttgccataaacattaagataatacagaaaatactggagaaaaaaagctttttaataatttcttgatgcaaagcttcacacttaaaaattatgcttgctccccccatccaccccaattcaacatgcagatatcatttattttcttatatgctgattctagagcattgtaatctcgacggttttttaagagttatctttgcccttgcaacaatttcacaaactgtatacaatcatggtataataccatcattcaaatgaatccctaaggtgagtacatttacacaatattaacactaaaaatctgtgtttttttaaaacaccatagaagtcaaaccacaaaaacccaggatcttgttttaaatgtgtttatgaagactgctgctgagctcaaagcatgcaggtaatcatgaccacctagatgaagctggatgttgaaactccttcatgtccaatgatgtaatttttcactcatcccaagtatctccatacttgtttactttgacttctttttttggcactctttcatgcataggcctgactgaggggtcagtcttttgtgttaaagatacttcatatgactctctgttcttattccttaattcctcatatgtaatattttttcttttaggactttcttcaaggttgggatcaggtccttggacaatatgatcagtaataccagtgggagcagattcattcatagaagaactgaatggaattggctcataatgaggaagcatttctatgttgtctgctgctggggatgtcacaaaagatgattgaccactcacacttgagtcatattttgacttttgataatagtgcccaggtggtgaagatcgtcgtgcttgtcctgatcgtaaagcttctccaaggggggaattttcaagtttcttgaatttctcttggcaagttttcacataagaaagttttcc

SEQ ID NO: 159660 - DNA, 1000 bp, Homo Sapiens
ttttttttttttttttcttctgtataaaagtatattttatttaaaaacagtgatattgacatgtatgttatagcccttacagaaaaataacacgttttatagtccttttatttgaaattcagtgtaaatcactcttaaactataaattcacagttgttggaggttttttttttactttaaatgatgtgaaagcatttgttccattcaaaggcccctatgcctttgaatgacatattctcagtaacttctttgccagtaactagagtatgtgagactgagtaactataatgtgcatatttcaagaattagcttcccgctgcattataacacatttcctaggaaagcctttgtatttttcatagccttttcacatatccctcatttaagaagtcacagtgttgcagttttactttgtttcagaggggaaggccatcttgttggcataagggggacagaagatataatatactctacactccggcctcttccctacaacctaaaagggagaggagttgaggcagatgggctaggactaggctttttggtaggcacattatagaagactgggtaagaaaggtgggttaggtttttttaaacttcaaactgttaggaaaacgaggcaaaagcaataaccataccatatgttcaaacagaagtaggttaaaatgtagtagttatcccttggtttacataggggattggttccaggaacttccacatatacccaaatccatacgtgagaactcaagtcctgcagttggccctttggaacctgagtatatgaacctgctctataagtgggtttcgtgtttggttaatgattgatatatttttgactcgtttatagttgaaaatagtccatgcataagtggacccttgcagttcaaacctatgttgctcaagggtcaaatgtatttacttctggattatgggatgatgggtaaattatttttacttggctacttaaaactcttctgtattttctaaatcttcttcaaag

SEQ ID NO: 159661 - DNA, 1000 bp, Homo Sapiens
tttttttttttttttttttttttttttttttttttttttttttgtgagggctgggaaattgtaaatttccttttttcagtatgctttaataattctctttcaaattacaaagtgcacgttttaaagaaagcccaatgatgaagatgttgactcctaagcagtgtgcccacaccactcctgcctgtggccctcattctgcctgctgtgcctttgaaggattcagctcaggaggctgggattagcttcccttcgcagaaggagccataccaggttggaagtggggagttccacttcaacaaagccctgggccactgagggcggggagctgcagggagggcgggaggctttccgtacagcacgcacagccggctgcctcttttctttgagtacacttgggctgaggcaatgagcaagcacaactgcttcgcctgcagtgccctctcgtggcagacttgcctctagagatagcagccaggcaaagcctgcatgccagcgctgctgacaaatcacttttgaggctcagagctgaacaaaaaagtatgagaatgagtcacattgtgcatttacatgtatgtcctaggagagggttatgtccatcacttgaggcaggaccagtggtctggggtagggcagctgggcatctaagaagccggaagcaaggctaacgtccatcataagtagttaccatccacagactgaacccccatgccaggccgtggagcacagctcaacgtggcttttcaaagaggtactcaagatctggggcacgcagtctctgctctttgtttttgtttttagcaaagtctctcagcagggccatgacttcattttcaaatatttctggggctggtttagcttctgtggcccagtagtaaatatcccagtcattactaggctcgttaatcaggcggtcatagaggttcagctgcttttctgtcatgtgctgcagatgttctttagcaaaaagactaagaagaatgcagttttccaacattcccct

SEQ ID NO: 159662 - DNA, 1000 bp, Homo Sapiens
ttttttttttttttttttgtgaatgctctcacctttatttctctcaatatacccgtgatacagatatttcatatgtaacaaagataaggatgtgtgcaggtataaaacagaggcagaatcatggctaaaacatctagcccagcaatgaactcattatccctgaggggtaggggccggggaggagaggagtcacaggcagttcaccaacacctggaaaatcgatgacttcatggagaatgaatgactcggggggattcagatcatgaagtcatgagaagaaggcctttctgcccagggatgatgtttctcagtatcaataatcagttgtgggtttttttcttctatttcttccagcagcttattgagttcatcattaaagtcatctattttcaacctgagtgtccggagggtgccactggaacatgtcaaggtttcaaacagcatcttcactccactagaccccaagggattctgacccaggtccagagtgacgaggctctggttgcagctgagggcagagcagaggtcttcacaactgaacggagggatggaacatccccacaaccacagacatctcaagttgcacagtggtttcctcaaagcctcacacaggaacttcattcccttaactcctatgtgattcagccccagatccaaacacaacaggcttgatttttcttggagaagctttgtgagatcgcagcagccatcgctagttatgtcgcagttccaaagcaccaaggtctgcagtttacactcggggtacctcaagccctcacacagaaacttcacccctgtattcccaatggggttcttggccaagcacaggtgtgtcagctcccggctgacaaccaacacagcagcaaggtccttgcaattggcttctgtaaggtgacagttttccaacgacaacctctgcagaaagcacttggggtgtctcaaagttgtgtacagcaacttagcaccctcatccagaagctcattgtcggagaggtttacg

SEQ ID NO: 159663 - DNA, 1000 bp, Homo Sapiens
tttttttttttttttttttctgtttttataaatagagttttattagaacacagccacacccatttgtttacttactgtctacagctgctttcacactacaaagggagggttgagtagtcacaacactgaccgtgtggcttgcagtgccaaagatattcactctctggccctctatagaacatgcatccctctccactacaggtagtggtatttgtctcactacacacttggctcatttttagtgggggctaatggagctagagtcagagaggatatctggttttttaaaggcatttgtgtagttcagacaggttaaagacaagaaaagataaaaaagcaaaacaccaggcagtatctctaggcaagaacgttaatgaattgaactgttaccaacaacataaaaaaccagtatagtatatgcaaaattattttatgtcaggagaaaatttatcatgttggcaacagaacatgtcctgcagacctccaagtggctggcatagtacatccaccccgtgacaggcccactgggactgtggtgaacatgcctgtaccccagtacaaagtcccctttccctaagaagtgtacagaaggagagataaagagcgtgtacccaaaaggaagaaggagaggctggtaccctgtgccctgagctcagaacttcagggggatgaccggccagtacttgggctgctttcggtcacagtgcttgtcaaagctcagctgcaccgcggcctccatggcttggatcttggcagcactgtccccgtacaaacgcttcatctcggcctggcgccgctcaccaggcctctcagttggggcttctaccgaccggcgggtgttgcagtacaggtcgtggtcagcgttcacatagctgtccaggcgctctgcatccagctgctgctgccgccgtcgttcttctctatgcctctcggtctctgcaaagtactggcggagctcttcagtgatttccatattgctcaggtcacattctacctctgc

SEQ ID NO: 159664 - DNA, 1000 bp, Homo Sapiens
ttttttttttttttttgttcatgtacaactttatttaaaatggcaatctgagttgtcttcctgacatactctgtaccaaatcttagtactcagtttcatcaagtcctttgccaattcatatattcaaaagaaacatgataaaatgtaaaaggagaatggagtgcgttaaggaataatcaataatttaagattatcaataatttttatattaatattaatttcttagctgtcctactttaatgattttcattgaaactctggcacatctttaatagtctcatgacattactatttaaataaacatgattttcatccaaattattttattcttcttttttgtttttcctttggagacagggtctcgttctgtcgcccaggctgtagtgcagtggtgcgatcttggctctctggaacctccgcctcccaggttcaagcgatcctcccgcctcacccttccaattagctgggactacagatgcccaccaccagccccagctaacttttgtatttttagtagagacagggtttcaccaagctggtctcaaactcttgacctctggtgatccgcccacctcggcctcccaaagtgctgggattacaggtgtgagccactgtgcctggcctattttattcttatttataacggttttctcaatttgtagcttaaattgaaagtacttgcaaaatgagaataatttgtctctactacataaagaaataatttttctaccccaaatgaagataaagtcacttctcacaaaataaacattaatttagcagaattaagtttccccttatggcatctgatgcttgaggattaccaaggatccatgcaatagagcactacattttggaattagctgagaatgatcccaaatttcctctagtaaacataattttggccacaaatgaagacaaaagataaaagtaattaattctagaagaacacctctcgtcagaaattaatagatcttatttaggtttctaggaagcatttaac

SEQ ID NO: 159665 - DNA, 1000 bp, Homo Sapiens
tttttttttttttttttttttttttttttttttttttttttttttttttttttttcctgcataaaatactgtttattttgtcctttaggaagactaaagtagtccagctcccctacagcccagtcttgcccccaccctgcactctgtcgccttagttcctggggaccaagcatctggcatttctcaagcagaccctctccttgttgctccttttcagtccctggagtctggcttcccaaagccaaagctggaggagagctcattgctgaggaagcagggttggagcctgaggagatgcagagggcctggacccctcgctggatcccagaggcccaggggcagagatgctgggacagggctctaggggaccactgggtgactcttgaggggctagaagcagggctgggtgacttttgctacggtgggctgcaacactgtctggcttctcaaagcgcttgccgcagaattcacaggggaagcgcaaggcagccaccgtctctgcatgcttgcgctggtgccagttcagggaagccttctggcggcaggtaaacccgcatatctcacactgcaggggtttttctccagtgtggatacgtctgtggatgacaaggttgctgctagtgcggaaagaccgggcgcagaactcacagatgtagtcccgggtgtcactgtgcagcttcatgtgctccttcaggtgtttcttaaagttgaaagacttcccacaggctggctctgggcaggagaaagacttctggtggatgtgctggtactttttgtggtgattcaaatactgccggttggagaagatccttccacagccagggaagtcacaaggcatcagctctcttttggcagctttcctaattctcttggggccaatttgtgcagtgtcctcatcccaggccggggttggagcagactgggcctgactcccagtgctggccagggcctcagtctgctgggccgcttgaggggtcctgctgagctgtggctgcaccct

SEQ ID NO: 159666 - DNA, 1000 bp, Homo Sapiens
ttttttttttttttttttttttttttttttttttttttttttttttttttttttttttttttttttttcataacaatgaagtcattatgttatgaatttaaaaggcagcaccacacaagccttcagggaaaggatgaatcgcatgggttggggacagttgcatgtggagtggggtggttgagtacctggtctagatcttggaccagttgcttaactgctttgcacctcagtttcctcatctggaacaagccgtgtctccaagggtggtgtcggggctcctggcaagtggagatgaggccttctgaaagatggcgctggtattttccatgctgcctggaaggtctgcatggtagcatgtgttaggggtaacaagtttggggcggtggcgggggtggatccacactggagagggagaatactagcatgtgaaacatctcttcccacctgcgaggagacagagcttcaggtgcagcagactctcttccaaattggagatgactgctctcggcaggcactctgggctcagctgtgcacagcttccccagagcaatgcctgcgttcacctgcacggccgtcttctgtgtgtcactgcctgcaagctttaacaagacctgcaaaaggtccgtctttagcagggaagacgcaacgttgggcacctccatgcagttaccaaggcagagggcagcgttgcccaccagaacctcatcctccgagctgagcagcttcatcataacgctcaactttttatccagtcttattacttcttcccgagcttcatgataactattcgtgcagatagctagtatctttatagcataacgtgatgcagtctcacctcctgtcttcaggaatttcatcattttctttaccactcctgctcgcaaggcctcctcaacaattttcagagaggaagaaagggtccggctcagaacaccagcagctcttgtcaggattcctccatcctggctgtttagtaaagacaggcaccttctgctcacct

SEQ ID NO: 159667 - DNA, 1000 bp, Homo Sapiens
gagatgtagtttcgctcgttgcccaggctggagtgcaatggcacaatcttggctcaccgcaacttccgcctcctgagttcaaatgattctcctgcctcaacctcccaagtagctggaatcacaggcatgcaccaccatgcccagctaattttttgtatttttagtagagacgggggtttctccacgttggtcacgctggtctcgaactcccgacctcaggtgatctgcctgcctgggcctcccaaggtgctgggattacagacgtgagccaccgcacccagcctcttaattcttaatggggccaaataatcctttccctccgaaatataaaaccaggacaagagaaaaatgtgagttctctcaccacctattcccactaccttcccccttcagaggccaagtttggctgcatgtgatgatccctgctgctctgtgctgctcctcacccatctccactgacccaacagaaggtggcgctattaatattatgcctcctctgacacctgctacctgtcgattagcagaggatgtttacccctctgctcttgaaatcaaatgtcatttgtctgattacatagaggctatgtgagaatctttttcaagaagtctaataggaaagtgacttttaaaactgaaatgtcttgagtacatggggtaaatgtttcttcttagaaagaggtaaatggccttggcaactatgcccctggctagaagatgatgatcatgctgacaactccattaaatcaatccacagaatgtgtacgcaaggacactgaagccactactcatttgttcagccaaagttgccaacttagagactggcacaaagccccgagttttccctgcaattcctgaattcagaggcatcatgcaggcattaacccatatttatcttgaggtctgccaaagacgaatgcaagtagatgggtggcagaggtgagatttccaaagtcagtgggttttctggttaagaacaggtgggcgagagtttgggctcctc

SEQ ID NO: 159668 - DNA, 1000 bp, Homo Sapiens
tttttttttttttttttttttttttttttttttttggagttttataagggttttatttttaataagatgaatagtttaagcttcgtgtctagccctgcaccctcttagcctaacagcacacctcgagcgctgtgccctgggctgctgacgtggcggcaggccgctagcagcagtcggccacctcctgaggcgggcagcacaggcctgctgtggacactctaggtctggccttgtattttgtggtctcagaagcctttgtggggacttctagtgtagggaaggcagtctctctgggagctcctgcaatgccaaactcttagcccaggttcactcctccgatccaagcctggcaggggtggggcatcatggtgtgtaggtatcaggcaggacttgtaagccatcccgtcaagtcaaattctggcttaatgtgtctttaggtagatgacctctgagccacagtttcctattctatgaattggggtttagtaaatctctcgggactgagagccaatgaggccatgtgtgcacacaaaatgctgggcacaaatgaggggctcagcggggctgagaagtacatcccatccagtgccgacatccgcttgcatggtgccctggtaaccttgcctctgccctccccaggccacctcaccgatcagcacctggccgagttcctgcggcgctgcaagggcagcctccgccccaacggcatcatcgtcatcaaagacaacatggcccaggagggcgtgattctggacgacgtggacagcagcgtgtgccgggaccttgacgtggtccgcaggatcatctgcagtgcaggcctcagcctcctggccgaggagaggcaggagaacctccccgatgagatctaccatgtctatagctttgccctgagatgagccggggctggcaggagaaactgaggaaccacagtcctggtggggggagctggcagctgggcaagatccaggcgccacgctggcggttcgtgagtgtcgaggca

SEQ ID NO: 159669 - DNA, 1000 bp, Homo Sapiens
ccggtatccactggaagtttatttctttagggttctatcccaaccagtcgcttaaaaaccaagtaacacagacctgaggggtgggggctggggactgcacctccctcctactcatggtggacagcagtggggactagggaggggcaggagaggtggctgaagcaaggcagcagtaatggggccacgacgccacagagccagctccgtcctctcccagaccctggtgggagcccctgtggcttggggtggggagtgggggacccaccccaggccctccctctcccttcctcagacagcctcctttcgggctcaacccatttcttccggcaggagactgaggcacacagagaggaggaagcgggagaggaggacgagggaggggcagggtggcagcacaaatgaaggcagaggtgagaggcgtgggcaaggccactccacccccacacccaccccagagaggggcgaggaagccacaccatcacgcagcatgtcggggggacaaggcggggtttaaggctgaggggcccggggcaggcggggcctcgggcctcagtcaaagccgtgccagtcgctgtgctctgagtcgtattccagctcggcgcccacacacttgacaccatccagcagcatgggcgtgccgtggtgccggtctgcaaggcagggtgcaagtcagtgccatgctggcccccggccccacccatgcggcccactaaggggacccctccccttccctcagggatcagctggaggtagggacctgccaaggaggttgagaacccctgagccgggcaaggatcccttgttcagccttggttccctgaggaggacagaaaccctcgcagtcgagcttgtgcatccctcctccaaccaggagcctcacgctcccacccatgacgcgggcctgcaccgtcacgcgcacacaggtgccagtgccaccttcgcaggctagcagtatctcctctttgaggacgccctctttgtgcgccgagtactcacactt

SEQ ID NO: 159670 - DNA, 1000 bp, Homo Sapiens
ttttttttttttttttctctttgtaagtagtgtattttaaatagctttcaagatacacatattttttcctttaaaaaagtctgttggagcagttttgttcttgaattttgctggtcatcctcatggtcccgagcccccctactccgggtcgtggaggcggccgagggggaggctgggggcccacgtggcccgtcctggcggcacctgcagcactgggggagccgctgaaccccgtgcttcagcgctgggggagccgctgggccccgtcttccgccacaaaccatgcatggccgccacgtgagctcaaacgtccgtttatttcaaagcagtaataatttaaaattataaaaatctttccaccgctgaacgtttagagggtgaggttagacagaggacggggaggctggggacgccccagaggggaccatgtggcgttctcgttgctgggcgagctggaggaggacgatgacgacgaggaggagaagctcaccccagtgaggccaggggggttcgtggccgtgttctgtcccgtgaggctttttcggcagacggggcagctgtcgtgctgctccagccagggcacgatgcagccgtcgtggaacaggtggttgcagggcagctgccgcacacgctcacccagcgcgtagtcgtccttgcacacagggcactcgagcccggagcctacgtgctcctcagtgacggggacggtggggagggcctggattttctctttatctgccggtggggggcctgtgttttcaaactgattgaggagctgtgtgatgatggcatccaggccgttggccccccaggcgtagtccatagggtttgagtgcaggactccccaggggcccaggctggggatggtggcgggcgtgatgatgccgttgacgagctgctggatgatcccttccagcgtggggacgccttcgtgccggccggtggcccgccgcgtggtgaggcgggcgcggggctgtcgggcgccgtaccggtgccggga

SEQ ID NO: 159671 - DNA, 785 bp, Homo Sapiens
tttttttttttttttttttttttttttttttttttttttttttgcagagcccaattgtgtctttaatagaattcatactaagctgcatttccaaatacattttcctgtgcttttaactccattaaaataaagattcatgaacacaaaacagtaaaatcagtaaaccaaactccactcctgctggctaaataatattcctccgtaagaattggtggttgttgggacaatttcttggatttattgcctttcccgcttgcttctggccagcaggatccccacaaggcttgcggcagccagcaggcctgctgccacacctactgtcgtgactgcaccagtgacctggtcactgcgggagacgccatagcgcagatggttcacgaagtgctcgcagttgtcactggtcagcgaataaggcaactcctgccccaccaactcctctgcccgcttgacgattttgttggaaggcagtggtgtgtatctgtcatcgtgcttgttattgaccctgtagttgtctcccccagccaccacagacagcagttccttcttcactatggctttgttggtcagggcagacaggacactggccgcaccagctccagcaatttcacttgccggagccagatggaccacatagccatctcccacgtagatggcccagtgtgcatagccaaagcgagaaatctcaatcaggtctccaagtctcggtcttggtctggccaaagccatccttccttcaagatgatgtcttgtgtgttgctgactctgtgtccagccttaaattagct

SEQ ID NO: 159672 - DNA, 1000 bp, Homo Sapiens
ttttttttttttttttttttttttttttttttttttttttttttttggggctgtgactgtatttacttcattcttgaatcccgcgtccccgtggctgggggctgacacatccctgggcaccactgtgacttcctgtgggtcccttcccttctgtccctgactctgtagaccccccacaggaagggtcctaggtagggggaggttcctcctcccttgaaaccctgggccactctgtcaaggcaaagcctctgggcccagtaccttgtaaaggctttgatgagaggagctctggcttttgctcagggcctttggcaccccaccctccagcccccaggaatgcaggcgctcaaagcctgtggctaggctgcccgaagcacgtgccgcagttcttctggagtgggagcagggggacagagctttgggtagaggagggtcacctgcaaagctggaatgccaggggagtgggcggtgcctccagctcctgggggccagggtgtctccatacctcatgggcctgagcctgggcaggggtctggagtgcacatagcccccaggcagggagagggcagtgacaggacagagccactcatctgtcccaaagctgcacccaaggggtgtcagcaaccccaacctactgacctactttgggaccacaggcccatctagtgcaaatgaggcccagaaaggagaaatgctttgctcaacagccacagtaggctgacgtaacctatgtaatgtagggtcagggtgggcctgagggatgagccaggtggtgggcaggtgacacaccaggtcccctcctggcctctgccccacccagccctctcctgcacggctaccagaagatgtccgggaagaacagactagccctgagtagggagtgtggtcaggtgcagaggagggcaggggcccggatcctggcccagaaacactctaaaacagaatccgatcctgagatgatccaaatcaaacagaaacttgacggaaatagtagagtctg

SEQ ID NO: 159673 - DNA, 1000 bp, Homo Sapiens
ttttttttttttttttggtttctcttttcccaaaaatacttccatttaatatagtcatatgaaagctaatcagcaagaagggagattgacagacatgcttaggaaaatagctacgtaccataccaccacaccaaagtgttgttttttgtttttgttttttttttaaacaaatggagaaaagacagaccagccaggatgacttcccacagggaagggatttaagggctgcccccatgaatttcttcaggccacgacagctacttcctcctcttgtatctggatttagatttaaagtttcctcctcgtctctggtggggcaagcccaactgtttcctttcttcaaaggaagggctagctcgatactgtttcagggccttcttgcttgtgttggtgagttcttcatcaaatacagatttcttcccctgcttttgcttcttggcaggacctctcactggctcctcctcgggcattgctcgggcccgcttggctctgcgattcctcttcgctagccgttcagcaaacatctgcgccttgaggatttcaaactgagacctttcctctgctgtcatctcccccttttttttggcatccttcataaacttcttccttttcttctttcctcttaaggccaagtcaaattcctgcagagctttggcaattttctccttcttcctctcttctttggtctggaaccagctcctctcgggctcttggaccactgcctccttccccttctccaggagccgctttgctgtattgatctgggcttctgactgctgcatctctttttcctccgcctctagctgcagaactgcatacacatctttctccattttctcaatcttgtcccggaatttgaggatgacatcttggggaagtatcctggccttcacaggggccttggcagcttttacaatctccttcagcatcttccgctcatcttctcccaccagagagactgagcgcccagccctgccagcacgtgctgttcgccccaccc

SEQ ID NO: 159674 - DNA, 1000 bp, Homo Sapiens
tttttttttttttttctgagaaaaatgtgaaaacttttactgttacattaagaacaggtggtagaagcaacctattccgcacttctcaaaagatacagaggggcacatatgccacactggaataaagaatacagaatcaaacatgtacaaaggtaccacagcaggttatggttcatacaggactttaaatgacccatgttgacaatacaatttgcaaaaaatatgagaaaagcaatacatatttctgaaacaaaaacatacctgttgtaaaaaacaacacgcgtagtatcagaatagaacagttaacagagcagcagttactgaagacagacggcaacaggcagctgcgccagccatgggtctgccatgcggctacacccatgaggccctattgtgaacaacgcaacgttctccatcagcggggaagcacacagactgcttggccaccaagctttccgcctggtctgttcatactgagatttagcagtaacagcccagaagggaatgcagctccccgctccctatgacatcaatgtcttcaacacatgtgtaagattctttctggagcccctagctcctccactcttcaaaactaacaacgcagagaaagagaaataagaaagcaaagacatcacattgccttagaaaagctgtcctcaactcatcttctctacatgttttcagatcacgtcctgacggaatggaaggagcagctccacctccccgaggcttccgtggactccgcacacacacgaccaccagtcttcagtcatgtgccatggagactttggtcccaaccagtgtctgccttttctagaaactggagaccctgattcaaatggcaagatgtgttagttcccatttgccttgcaataaccctatgcttcacaaagattccagactaggggttattcctcacccaatttcatgcatctggaacacagagtaccagaatactctcacattttatttcaaggcactctccagcagaaagtataat

SEQ ID NO: 159675 - DNA, 1000 bp, Homo Sapiens
tttttttttttttttttttttttttttttttttttttttttttttttcttttttttttttttttttttttttttttttctttttttttttttttttaattaacaaaccttttttttttttttttattggagataaaaacagcgaagtcccacataccataccctacaagacacaaggtgcgcagacgagccttggctatgtaccggcgctgcaggaagaggctgtccgccgggcctgggctgctccagctacgcggggaggcggccccattgcaaagtgcagtctctccgcggaggtggcggtgggtcagtggcagagggccatggtttccatgttaaggaagcggacgtgcatcttggtctcaatgtcgatcccctgccagatcttcaggaagtcctcgaaggtgatcccctcgtacacctgatcaggctccatctgccccatgcacacgctggccgcctccatcatggccccgtcggcgatggagcgagcggactccttctagatgtgagggtttcccgacagcagctcctcgaccactttacatttcgatattcttccagagtgatgcggccgtcgctgtccgagtcgtacatgtggaacagaaatctcagcttctccttccgggacagctccacctgttcctcgtccatggtggtgtcgatgggccggaagtaggacatgatggtcaggaagtcctcgaaattgatctcatcagccaggccactgggtcccttgcgcaggttcctgttgtcgaagaaggcacgaacaattttggatcggatggggttgagctccaggtccgggacattgttgaagttctccttgcgaatggtaggctgatctccactcagctgcttaaatctccgatggagctgctcgatctgatccgatgagaagccggtcttgccctcgagctcccgcacctcctcagacgcggagtgggcagcgcccatggtgcccgcggcgggggccccggggcgcgcgtccctctcaggcc

SEQ ID NO: 159676 - DNA, 794 bp, Homo Sapiens
ttttttttttttttttttttttttttttttttttttttttttaaaggctgagtcctctgagaatttattactacggatcacagcagcaacgggcgggaagggcggcgccagactcatttgccccgcaggtagatcttgggggtctgccagccttcgggggcttcctttagccccgccttcagccagatgcgcctcaggtctttctcgaacttgatctgcttgcgtctcaggcgtccctcctggaccttcctccgcaggaaccgcgtcttcttcaccagcttccggtacttgtggtggttcatcttccgccggcggatcttcagcacgtttttgcactgaatttgaggcgcatccgcgacgccttcatccccctgctcggccccttcccctatctggctgggcggacactggtaggattgcggtggagccacagtccctgcggtcccggtatccagtctgggcaggaagcagcgggccgtgagccagctctccagggggctgacggacatcttcctggggaccagcatctcctccagctccagctgggcccccttgcgagggagagaggccgccctacctgggccggccggcgatgtgctgtaaaggggcccgcagacccggctgcccagcactccagagacgggccaaggcgggcggccgcctgcccaaggaacggccctcaacagctgggaagtcaggcgccccaggagcatggtctgtgggcggcggccacaggtcccaggggagctcgacgcggctcaaattgaccgttctgcggccgccctcgggcactt

SEQ ID NO: 159677 - DNA, 1000 bp, Homo Sapiens
ttttttttttttttttaccatgatcataaattatctttattaaagaatacatattcttgtgatttaaaaccaaatattttaagtgatatatctaatagaaattgacatgaaattatttcatttaaaagttacaataaaaggcaaatagacatccgtatttgtctcattttagaaaacataggctttaagaatcaaaagtaagcttccaagctcacggccaggattacaacttcatattacagaaatgtttaataacaaatatttgactaacagattataattctgaagttgtacatttttaaaagccttttaattttgcttctttactaaaaaaactatgaactgatgaactcacaatagaaaattaataataatttcagggaaaaaaaaaaaaaggcacatccaggcaccacattcaaggtgatcggtaaaacgcagtgtcccgggtctactgcacataatcaacagactgcaaataaactactccggaaaattctaaaataggacaagaatattctgtaaaagccgggataacacgactgcactgacgctctgctagagggctgttctgttgccaaggtgcgagcttcccagaaggagcagctgctggccatctaagcgctcactccccacagacgcttcccttccacggtccatcatctccgagccatcagaggctggaccgtctctccggtctgggcacacacctcgtgattgcagctctccacagcaccggggcgagcaagaggctgagcgtggtcacactcagtataaggaggtacacctcccgagagatgacgcccgctcttcgcgcccggctccccaggacaaaggaaaactcgctgacctgggcaagccccgcagagacgatccacttgatgtactggctgctcctcggcagaatgagagacaggaccagcgccgccaggagaaacttcatcaccaccactgacaaggtgaggaacaccagcaccgtgagctcgtacgccacaaacgtggg

SEQ ID NO: 159678 - DNA, 1000 bp, Homo Sapiens
tttttttttttttttatcttaaaatgcatattttatttcagtagtcaatgaccatcaatcaaataaaggaaagaaaactaatttcttgaagaaagacaaatctatggagtggtttacaggaagtgaagaatgagatggcccaactaaaccaatttggaatcattaactacaaaatgtcaaactaactgcaagacaagtgtcaaaatgggatgtttaagcagttttgctatgttatacatcttttagttgttattttcaaaattatatgtataagttatataagtcatagtaatagctaaaaatgccaatctatggaagcagtgattttcaatataaagttctattttgatatttttccatcttcaagtcagttactgtcatctggagtactcagttaagttgtggtttgaccttcctcaacttgacaagaaaagctgtatgaccaggttgccagtgtactggtctagcaacatagggaaatgatccatatggaaaatcagaatgcgattcttcatggtcatcctcttgaaacagctcacctttaactccaattttctcttgagaatctagttgtacatctgtgttgattttagattctactttttgagctaaaattccatttttctgttttgcaaggcaaaccaaccaatctctgacaatgacctcgcttatcttttcacatgaaagagcaagttcacaggtgcgaattccatctaaaagttcaataacctgtgtgatgtttactacatatacagcacatacaccaccatgcttaagatgtgggtaaaaaacaggcaaagtaacatgaggatttaacatatccaaagctactgcgtcaaatgttaaagattttatgtcttcggttgctcctgaaatgtccttatgaataaaatccacattgtctggccactcttctacatgacttaatttccatgaatcacgccagtgtttgtaattcttcttagccagatcatggtggtcttttcgtacctcaaaactt

SEQ ID NO: 159679 - DNA, 1000 bp, Homo Sapiens
ttttttttttttttttaaaggcaaaaatcttttatttcaacttttagggaagccagcagcctcttctccacatctcagaagcacaaggagacaccctgatcaagaaggcaccggcagaagcggcatggccaccattaattgctttctcttccggtggaaggctgccttgctctcatgagagttgatctgcagcgggatataagcgtctagatgatacagctgctgggggccccccatcaccaggcggttctccccgatctccagcgacagccccagggctccatccagtttggggaggtcaacttcggccaagaggaggtcgggggcttccagccacaggttcaggtgaggcttttcaggccctgactcagctctcccgggggcgggcgtgtacaggtcccccagctcctggatccgaggacgctgctccgagcggatgttctgctgcgagatggagcccatgaatggccggttcttcatcatgcgccattccggattcagctgcaagttgtatttgtcctcaaggccctccctggcgatggtgatcacgagctcccgcaagaaatcgctgttctgcatcctccggtagaagtcgctgttgacagctacgtcgtaggcggtacatccctggccttttgcatccagttctgcatgaggctctcccagactcatggggatgcgaaacccagcttggtcctcctctagcatctgaagcagctcctcctcggtcacgtcggcgggaggagggatagagggggagtggcagatgttgatgaaaaccttcccttccgaggagttggtctttatgcagaaaccaggctgaggctggatttgtgtcgattctggtctggttgtctgggcttgctggagctccttcgaggcctgcagcagcagctcctcaaatcgcgccgaatcagcaccgatcgcctccgcctcgcttagccccattcccagcagcttcgggttcgccatggccctgggaaagagatctaggcgtcct

SEQ ID NO: 159680 - DNA, 1000 bp, Homo Sapiens
ttttttttttgtgttctctaggcatatcaagtgttttatttagaccatttctgaggattttgctttaaaggctttacatgcagcattcaagtatctcataatataagacagtctagtctttcagagatcatgtatcatcaaggtctgcagagttttcactgtcatttgcaacaagagcctctctgttctcgtaagtccagaagccattcaaatcgattagaatggtggttactgtgtctccttgattactgttgattaaatcctgaagagagattttcaaaggatcctttggttttaccatgtcaaagatttcatccttgacatcttgaaatgaaacaggatcttgtccatggattttcattagttcctgtatggccctaaagaaataattaagtgaaaagacattcaggtatcctttgttctcaatatcaagcagtttgaaaatatattgtagagctgcaggttcctttctgttttctaatgcaaggacaaagtccaagtaggtcttatagtccatttctccatcataagtgagacactcctggaaaacacggtctaagaagacattggtcatggtagctgttccatagcgtgagagttcttctttactgagcatgccattgtgatctttatcaagattcaagtactggccataaactcttagggcagaaggagcagaaaaccaatttgtttcttgactctccttggacagttcctcatcccttagctccaataaatcatctaggaagctgcatgctaaaatatcttgaatttttatctttcctgttcttaaaggatctaaaaagaagaagaacttcctaactgctgtacaaacataaaaggagtagaaagatttttccagaccatctaattgtggcaacgtagggataagttccaatatgtagttttctaaatcagattcccgaaggtacccctgcccagcgacatcatataaactgagtcctattcttgtttgatgaagccaaacttttctcatgac

SEQ ID NO: 159681 - DNA, 1000 bp, Homo Sapiens
ttttttttttttttttttttttttttttttttttttttttttttttttttttttttttttttttttttttcatttaacagacatttattaagcgtctacaatgtgccaggccctggggacacagagctggagaatgtacagtccctgccctcaaggagctcacagtctggggggacagacatgtaaacacatgagttacaacgcgctgcgtgaagtgtgtggcagaggtataacaaagtgctgtggggcacaacagagcgaccagtgaactcttcctgggcaggggtcagggaagccttcacagatcagtcaataaatacggtgccatgggagtgccttgcacaccacgggcactcacatcttgaatgctggtccactggaggcccttgggttgggcgggagcaaggcctacttctgcttcctcaggacaacttccccacctctgtcctgggaccacctgcccgcctgggcctgcagtgactaaggacgctgctcccactccaggggccagtgacagagagcagctatacagagggcccaccccgcaggatccttgacaggagctgagacagaacaaactgctgcttgtctccctaccctgggggctgtgatattcttggtaacatctctgagctggtctgtgaggtcacttcctcttttaacactgttgaggagactccaaaccctctgtcttctgctcgtcttctcatgtcgattgggcaccagccattctcaggcaccagagcacagccccacacgggtgccccatcagacagggctgcccacagcagcctcctacacctgaactgggtttctctgcacactcacagccgtctcaccagctcaatgagctgctggatgtttttgttttggttcgacaagccgttcctgatgttttcgagtaggcatctcttcaattcaaatatggcttcactgtaggccaagctcactgcggccatgggaggtgctccgtgccacaggcctgggatgtgccagatgt

SEQ ID NO: 159682 - DNA, 1000 bp, Homo Sapiens
tttttttttttttttttgcttcaggcgcttttattaggttccactgcagggctggggtcaatgtaatgcaaatccaagcccagtgatgcacacctgtgagccgaaacagagccgaagcaggagcacctgtgtcccaggagcagctggttggagggagccagggccaggccccacctcctctcgggaccaggagactggcagccgctgtgttcacctgggcaggtgtgcacccagtcacccccactggattatggtgctggtagcatgagagggtgtgtccacaccaagggcaggtgaagatgcgaggtggggctgagacctccttcccacaagaggaggtggctgagcctcccagggcctgaactctcacagcagggctcacccccaagcctgtatgcttagctctgactctctttggacaataaaataaagtgcattactgaacaaagagtaactcaaaaccagaatcagacaaatcgccaatgcttttcctttagctaaaagacaaaagaaaacatgaatgatgtgaatgccggaacttcagagtaagggaaatgctggtggaggacaacggaaactataatagcgtggtggataaggacgagcgagtgggagaggaactggcaacgcggctctctctagaagtccgtgctgtccagcctctgcccagtggtgggggaaggccttggactcacagggaagcaatgcaggaagccttggccacctaggctcacagctcatctcaggaccagaggagacagcagaggacaaaacttcagtgtgacagctgctaggagggagagcagacagcccgcggtgggcaagctgggagttgcatccgcagcagtccgcttcaacccagctcctctccacccttcctgaccctccacaaaagctctgccgtgaccagacccaacccaactggcccctggtcccaagagcagatgagctgcttgggccttccacttggtgtcccatgccaggcggacctggaggtgtc

SEQ ID NO: 159683 - DNA, 1000 bp, Homo Sapiens
ttttttttttttttttgtttgaaattaaatttattaagcactcactcacgtgtatattgtcctagacagggttgcgtttcagagaacaaagatccctaacacgatcatccagtcccgtcactacctgactccctcctcccatacaataacacattcccccatctctaggacatagggatcttagtcccctccccccacctttttcttcttcttttttgagacagggtctcgctctgtcacccaggctggaatgcagtggggtgatctcagctcactgtggcctcgacctccctaggctcaagtgattcccccacctcagcctcccaagtagctgggactacaggtgcacaccaccatgccagctaatttttgtatttttgatagagacagtttcaccatgttgcccaggcttgtctccaactcctgagctaaagcaacccaccggcctctgcctcccaaagtgctgggagccactgccaccactcccagcccccttcctttcttaagcactgttagggattgtgtctagctacctaaagaacatagactgactcttcccttaagccacttcccttgctgccaagttaggtcttcttccaataatataagatgctagaagacttagatcttgatcttatttctactttaaggttcgatagtccctcttaatgatttcctgtttagcttaatgcttggatgaggcggggcttcatgagctctatctttaagggtaaagccccttagccagacgtggtggtgcggcgtgcgcctgtagtcccagctattcggaaggttgaggcaggagaattgcttgagcctgggaggcggagattacggtgagccaagatcacaccactgcactccagcctgggcaacagaccaagaccttgtctccaaaaaaaaaaaaaaaaaaaggtaatgccgctttatctactaaggctaggcattattccatgccaaatattaccttctatgttcctaggttgctggttacttcaga

SEQ ID NO: 159684 - DNA, 1000 bp, Homo Sapiens
tttctcttactcttcacttttctttttattattcaaaagtcaaatgtttttaaatcatccatcctcaattttgatttaatgtaccgtcatttccccaagaaaagaaatttcagaatctctttggaatactaatttcatgtttctagatttaacaaaactgttgaagttttaaattccattctatttccctgaattctcaagacagttgctgatgtaaattttaatataaaatatttagtcacaaaatagtattgcttttgtatgcacatagttgtaagattactttgcttttgtcaataaaaactataccatctttcataaaactctaaacaaattaagaactgtgatgtagaacaaaaattacacatggtaaaacaggtaccagcacaacgttaggttatattacatcaaaaaaagttttaatggtcccaaatatatatactcaacaactaagcatacactcaggggaggaaaaaaaaaatcaaaaacaaaataaaacaaaaaaattatgacacaaatgaccacatctagaattccactcaatctttaatcaagtagggagaagtccccacttaaaaaaaaaaatatctgcagtttgaagggcaaagggaacagttaaaaaagaggaaaactttatactcgcccctcccccacagaggttttccaaacctgttgtagcttgactaaaatgttcagaatgtatgattttaaaggcaggtctctttatacaaagaaactgctggcattcttgactagtgaagaattatggcagaaaggcccattcttctgagtctcaaacatggtccaagaaagcatattctgattgtagcaactgaccagtcaatccagagttccacttacaaaacccctgccctgttggctttttgtttccatttccttccctgagaaaagggcaatgtgtggtccaagctggagagctcaaaggcttaagtctttcccctaaatatatgatatcccctcctcctgctccattgaattg

SEQ ID NO: 159685 - DNA, 1000 bp, Homo Sapiens
ttttttttttttttttttgacaagtgatactactttatttatagcagtgatacaaatgctcctgataaccttgagggctgaaaagctatcccttaatgctaccactacacttaggtgttacagggcaattcagtgggcaacacagggcacgaaggcactagagagaagtcacgaaggcttctcctacttaaacgtgcttcctaatccaaacatgttttagagcggcaatccccagtcgtcttcgccacaccaatgcatggaggtactgtgctcttccagggcaggggtcggcacaattttttcagacgtctgaaactccagctacaacacaggacgaagtatcctgtgaagagcatagtgatgccaccgaatccactcttccttatggtggtgttgcacctgatccagcctttttgtacagctcccaagagcctcattagagagaagttggaggttgtaagtccggcagggggttccaaactccttatatgagttgagcttcgttccaacaaagaaacttgtgagagtctttccccctggggactgataagttgtggcttctgggtcattgcattccaacactgaggcttccctggcaacacccctagtccaaggtaaccaggatagagctctggaaaccactccagccccatgcagctgcgaagagtcttcctgccagcagctgcagcatgattggtgaaggggctctgaggagtgtgacgctgggctgaacataaagggctctggcacccagtgtgtgatgcttggaactgactatcagatttgggctccagagataactgtccctcgggactctccattaatgcctttacatcagggacacaattatgattctgggcttctgctttcttttcttgaagaaatgttgtagctagagaggcaagactttgactacttgactgcgatacagaatgaaactggtaagtcgtctccctcggaatgaacaaacttaaatgtggtctttccccttgagactcct

SEQ ID NO: 159686 - DNA, 1000 bp, Homo Sapiens
ttttttttttttttttttccatttaagatgcatgtttttatttaagttttaaaaaattttgtaaccagacaggataaagtagacaagaatgttattatctaactatataatattttctcaatcttgtggatcactaaaatataacaaaggattgttttctatgctaattttcaggttgtccagttaaaccattatttggtatcctttgagcaggttagcctttcaactatttagagtttcttctcagaaacattcatatattatacaggaaacattcatagtttatttgggaaacattcatattttatacaagatgtacaaatttaagactagacaattaaaaaaaaaaacacaaaattatagccgcaacactatcctagctgcattgtggtgattatattgttccgttagctgtccattatatacaactggattttaatcgtgctattcacagaggggccaaagcactcatctaaaggtaaaggcgctcaggtttaacgtgcactttcatagccccatgaaaacacaaccattatatacactgtaaacaccacagggcatgaaatccacctccagccacaaacatcaatctcacaggatcaagcatacgaggtctaaggtggggtgcctgacttttctttttaagaatacttttcatctaaaagtcctgctattcttttcacaggacaatattcacttatttcaaatatgttgccagtgctcaaaacatttctggaacccatttttgaggactacctgcagcatctgcagtgaactcttctgaatgtcctggatggtggtgagtcttcatcctttgaggatgggtttgatttaggaaaacaggcagttattcacagccaactgaatccaactgtgggataccacccgggttcaaacatgagatgccactataaacaacaagaccaatttttttgtacagctcgtaaatttagagtttagaaaatgcctgagcaatgcagtcctgatgatgtacagattc

SEQ ID NO: 159687 - DNA, 1000 bp, Homo Sapiens
ttaagatggaatagttttattcagcaaacaaaaaacttgctaattcagagtatcctctagtccacgtaatgtggtttagactacatttgcaaaattagggccttgacgctgaacaaaataaaatccagaggaagaactacagtatccaatcaaaaaggaagtactagcaaatgaaccagaataaaagactttattgtattccatacattcacaggtcacttccagatttagtaacaacactgcaatgctatgatgctgtgcggtcatttagcttaaaccacagtgtaagttggtagctctctcctgctctcttggcctctagatgtatcacaatacaattcctaactgtggcctggcaaccaatgcttatttcattggattattttctgactgggacatgagttcatcgcatcttcccagaattttaaagtaccttcccttacattataagagatgaccaaacactctagtgtgaaggctgcttcacacactgttcttatctatcatgattgctcttccttacatacacgtcccgtacagatcagctacacacggcatggtcctgaaaccacagcttttgtttctttggccagaatgcacccctcaccttgagtgcccgccttagaaacacaggtacttggttctcacagggtgtgcatggttgacacaagttcatctgccccacggtaaaagctcttcaaaacctttgcatgacttgtggggagcagggtcacaatttgttgcatgtgacctgcctcagcctcaaaagataagagatcatgaggctccaccgcccccgggctcaggaaacttgatccacatcgctagggctctgcctgttaggttatggatgctcacctgactctctgaagcagagggaggctgacacagattagcttttattgaaattattaaagtgcaactttgtgttttcactctatcaggcactgaaaagcaagaagcttttaattttttcttttctataatgaaatatattttc

SEQ ID NO: 159688 - DNA, 1000 bp, Homo Sapiens
aaagggaggttggttcctgcatttccactctttgaccataggaacgcccggctacaaaaggggctgtaattggctgctgcctataggggccccaggtccttcctccaattgcaaggcagcaactccgaagttctaagtcccatggaaagtggcagtggttgggctggactgtggctggaggatcaccgggcctcggttctcaagcaccatctgtctggctgcagctgggcccttcagctgggggccagtgttgctttccagctgcccccaccgggtcagatcatctctggcaaggaagagctgctggcatctcttactgtccttctcgcaggccttcctccaccttgggtgcctcctgacgcctgccccggaagtcttcatcacacgcgtggccctccacatcatccaggaggttggctgttgacgcggcagcccccagcgactgatgcttcaacaagtgtttcctctttgacttcctcattttggtcttctctgagaaggctcgggcaagttcaaacagtttcctccgggtggactttcccatgtgtttcagcttgtccctgaataaggcatcttcagacacagcggggttggcgtcgccagttcctgggacaggagaggaaaagccaaagtcgtttccgacagccacgctgctggatttagatttctgggattcgtatttcaatcgatctctctccagagcgaggaggaagtcgcggttccgttgcagttccttcatgaactcctcgttctgcaggaaaagcgcgatcctctcgtcctccaggtactgcttccagcggctctcctggtctccgggccctggcccagccatggcaggtggacatccctctccactcccaggcttggggcccccagcgttaccctgtatgctgtccagctgctggggcaggatgcggagaaagtcatccggaaggttgcccagcagtggtgggttccagttccgatagcgtctctggcttgtaggggctccagagcccag

SEQ ID NO: 159689 - DNA, 1000 bp, Homo Sapiens
tttttttttttttttttttttttttttgggctgtcaattttatttatcatatcaatctacctcccattaccaccatccgagtccaagttaccatcacctcagacctggacaaccacagaagcctcctcactggtctctctgtttccatcttggccctccttcagtcaattttctatatggtagccagagcaatttggaaaaagcactgtgtctttcactctaaaataaccgatgtcctgtgtatagttgcttaatagtcacgtgagacagttcaaagaaactctcattttgcaaataacgaaacccgaggccaaaacatactgaaacttcaattccagaactgaggtcagaatttggaattcataattgcacagatgagcctcatttcaatgggccatgctgcttctcccaaacaggtatttcattttctgttatcaatggaagacaaatgaaataatttgaatcgatctagagcctgctttcagggctataaaatatgaaaaaaactgatcaccaggggacaaaagggatgacaacctggactgaactgatacatttaagggccactcgcacgtggatcccatgtgtcccaggatctacctcctctagccaactgaaggacaggggcagcattccagatccaggactatgtgatccacatggggagcataggatttcactggttggatgtgcagaatttgtgtcttccatggtttcccatgcacctgctgaagaagagtggcgattcgagtttctgcagattctgcccacctttgccactctggcttggtggctggtgacagcatttttcccctagaatccctggtagctccatttttccattggttggtggtaatttgctgaggatacagccaatgctctttctctactttgctgactccaagagcctgaagattcttccctggggaagattccacattttggtggatatgcaaaatgcctccagcatcctgccttaacacttggcaggcaatgggcc

SEQ ID NO: 159690 - DNA, 1000 bp, Homo Sapiens
atttacaaatgtactaaaatttttaaaggagagaaactttaacaaaaatcttgataattaaaaattcaaattgtgctagatagaatgtattccaaaatttctgctaaaaatttttgcttttagtttgtaagacataattcaggagaacctcaaagaaaaatttagcaattaagtttggaaaagctataaaagagacctttactttttgaacagacatttttccctttcccaaaatgtgtattattcaagaagcatatttataaatttcattaaagaaaatatcggccaggtgcggtggctcacacctaatcccagcactttgggaggctaaggtgggtggatcatgaggtcaggagttcaagaccagcctggccaacatggtgaaatcccccgtctttactaaaaatacaaaaattagctgggcgtggtggcaggtgcctgtaatcccagctactcgggaggctgaggcaggagaatcatttgaactcaggaggcagaggttgcagtgagctgagatcatgccactgcattccagcctgggcgacagagtgagactccatctcaaaaaacaaaacaaaacaaaaactaaggaagccttaataaagtacagccttaagttaataataatgtattggccgggcacagtggcagagcaagactccgtctcggaaaaaaaaagaaatatcgtatcttagtaatgtgacagatctactccatcaagtggctcttataaaggtaaggtcacatcacactgcagtcaactacaaaaccaaagataccaaaatccaaatttaaagaaacacattttctaaaggaagcctatttaaagcctttaacatttacgaggatttcactgtcacaaatacattttacaaaaatatagtttcataggtttcatgaaatgtgaacaagactactattatctaacatttagagtaaatgattaaacagtcaatgcaaagttggattactaaataaattggaagccaaggagtcaata

SEQ ID NO: 159691 - DNA, 1000 bp, Homo Sapiens
acagaggaggagctctttattgtgggaggtgtctggaactgcaggaaggtcagcagcgcagtggggcgcgaccccagccagctggcagttagggctgggctgggcgccatccgccccgtttcccatctccctcggcgcatccctggggagccgccatcactcggcagattccgcatcaaacctaaggtcctggagaacctcgctgatcgcctccatggttttaattaccctacaagagcggatgggaactataaataaaacccagatggggtgaattagctgctgccgcgaagctgcaagagggctgtggctgtggtgagccccaggccctcctgcccgccgccaaacctccaggcagcactagcagcaagagggaacacttaggtgctagggagaaggggtggccccataggtcacagtgggctgagagaaaaggccatctgggctgggcatggtggctcacgcctgtaatccagcactttgggaagctgaggcaggcagatcacctgaggtcaggagttcaaaacaagcctggccaacatggcgaatccccgtctctactaaaaatacaagaattagccaggcatggtggcgggcatctgtaatccaagctacttaggaggcagaggttacggtaagccaagaccgcgccactgcactccagcctgggtgacagagcaagactctatctcaaaaaaaagaaagaaaaaagaaaagaaaataaaggaccaggcgtgctggcttacgcctgtaatcccagcactttgggaggctgaggtgggcagatcacgaggtcaggagatcgagaccatcctggccaacatggtgaaacccatctctactaaaatacaaaaaattagctgggcgtggtggcacgcgcctgtagtcccagctactcaggaggctgaggcaggggaatcacttgaacccgggaggcggaggttgcagtgagctgagatcgcgccactgcactccagcctggtgacagagtgagactgca

SEQ ID NO: 159692 - DNA, 1000 bp, Homo Sapiens
ttttttttttttttttttttgtgtgaacaagccttcattgtgcaagcgtgagcccaacaaacaaacaccaggtctgcgctggccgaagacgaagcgtcctccctggaggtgggaacaagtcacctctgaccacacctcctctgacgccatcacctcctcctggccccacccaagggctcgacacaagccccaaggtcggggggagaggggcggggcggaaccgagggcggaggccaaggtgggattccaggaaggccttccgaaggatggaggtgggtcctgtccctccaggtagcttgtgggtgtggacagcaggacttgctggctcagtgtgggcacaaggacactgtgccactggttgagtgagtggtgagggattggaggtggctcccagaggcctccatctgcatggccctggccctgtggctccagcaggctgccctggctgtgggtagcccaggagccacatgcgcttagtggggccgctctggggcaggggctctcacaggacagcatgagccactgagccgcctggggagggccaggccaggcggggagctgtggtgcaatttgctcctgtccctggaggtctgtgggcggaagctgtgggcacaggtggacatggctgtcagacgtggggtcataggctcccactccccagctcctgcctcctcacagacagaagccacggccaaggagaggagagacatggggaaggcagagatgagggaacaggaagggagaaggcaatgaggaaagagaaagggagggtaagatgcggagggcacaggtggatggggacgagggggccaagcatggacagcaggaggggagaaggcggaggggccgagaggcagctgcgcaagagggccttcaggcagagttgaggtctgtggccttgggctgggccttgcgggaggtcagctccgacagcttcttcagccgcttcttcagctccagcgggaacttctcgtagcacctcttacacacgggcttcatg

SEQ ID NO: 159693 - DNA, 1000 bp, Homo Sapiens
cactttgggaaattttttaatcaatcagtttcttaggaacaacacccagtgggcatgatgagaccctcaaagtaggaatgcaggaatgataggcaggtgaggtggctgagctatctgggctgggaggccagcctcctggaatcttaggacaaataaaagggggaaaaatccaacctcacacttcttttgaaggtcggatatgtttacagaaacaatttctgttttggaaaataaatgtatggttcaatttggggctgggggaacaatgacaattgtcaactagagagaggctcatgattctgagataaatgttaagtggagtctttttaaaatgctgaaacaaaacattaccttggttactgtctccatcatgagatgtatttgaacacattctgaccatgtgtaaaaaccaccagatttacccaatgccatggatccatgtgccacaccatgaatacaaacactgatgatatgttaccagaagacagcacagagttcatgagctctactttgtgaagaaatttccagaaagcagagtctgcccacctttcctttcctttctcactgcaactgccacatcctgctttcgtcttgcttcgagtagagttgtctggatgaaggaagattctccaaatgtcacacaaggacctttcctttgggagctggtcccttgctgagggtgcaggaggctctgctgttcttccagcatctcaacacaaactttctgcagaggctgacccatccaaatttggagtccagagacagtttgaagcagatgttagaagcaaatttacatgatgtgacatgctttcagagggggcggggagtacttgccagtcaatgggatgcgtgatgattcggtgggatgtgcgtggaattgtcccatgttccacagcacgatacacatttaacacccctcatccaagaccacgcgagggcttccctgctgccccggttccccatgggtcttggtgaatcctcaaatctcatttaaaagcac

SEQ ID NO: 159694 - DNA, 1000 bp, Homo Sapiens
gtttttggtgtttttaattgtttttgttaatgtaaaaacagaaccatcacagccgctcagctctataacccatccagcccaagactgttctagtggtgaaaccaagagtagacaggtcttcctacctcagtgacctcaaaacacaaggacatctccatagggcatcaacatgcatctgtcatccaagaatctaagaacttcctgatccttccacattttctatcaataatattgccttctgaggttatggattccaggtcttctatgaaataggtaaagcttcctttcgcgttccaagaaatatagtttgcgaagggaactggaaaacgtgactctaggcctcagccacttcctctgttaccctgtgcaagttgtagaacaatccacgttctcacagctccccttcttcagttgtggagttcttcaaggtggacagatcacacctcaggaagtcatcccttgtaagcacactagaatttatcataaaggcaggtcggcttgttagtttttctttgtccccagcatacactgagccaacaacttaagtcatgaatgggttgtttagggctctgtctgtcctaaatgattcctaaaagcttcatatagctcatatagtcttattgtccactgctcttttggtgtggtatgatcctacctgtaaagctatcaaacccctgggtcctggatgcctcctccagatttcataccttcctcaagtttactaaatactttctgaatttaagaattttgagaaagtcacctaccagctaatgcaaaaacacagcctaattctgtgtgaatccctgttgagatcagcttttcaggtcagggagggaaggtatggggtttagggtaccctctcctatcacacacatcccccctgcccacagtaccctgacctaccttgcctgagactcctagacactatgagctcccttctggctgccactcagactggccaggaaggctcccagattgaacacaggtgacctggtataga

SEQ ID NO: 159695 - DNA, 1000 bp, Homo Sapiens
tttttttttttttttttttttttttttttttgtccttgaaataatgtttattccacgctgtcccgacagccccctctgcaggtcccctcggtgtactctgaggtgggaaaccctccctgggggcggtgaaggggaactcgggccaccccaccagccagcagatgctccagcagccagagccccagcctggagctgaggctcttcctggggctcgccgggcccctgcaggcttttcggaccctcagccagcccggcttcctctgctttgggcagcagcaagctggcccttgggcacctggactgctcaccagccgcccagccatgggtcctgctctccaggttccttctagcagatccatctctgtcagagcaagggactcaggcctggaccatcttctgggctgtcactggggctctcagtggccatcccagctctgcgctggcccttctggagcgtgtaggcagacggccccagccgcaggatcttcccgctgcccaggcactcgtcccccttgtagaacacagcaaactgtcctgtggcaagggcacgcacagcctgcacagctgtcacccacacggtgccatcttgattgagggtcagcacacagggcactagtgccatctggtggcggaatcggaagtggcactccatcatcttgtcccggaccagtgctgcgggaggctcctccgcaatccagtgcacgcggctggtcctcagcaggtccctgtacagggctgggtggtctgtccggggggccacaaacacgtcacccttgacgctgtccttctccaccacgtaccagggctctctcaggccacctatgtttgctctctggcccaaggtatacaggaaccaacctttatgtgttcccagaaccttattgtcttctatggaaataaagtgaccaggtcgaggctgcagatactgaagaaggaaatgttcaaaattcctcttcccgatgaaacacatgcccatgctctctttcttctgaagcacatg

SEQ ID NO: 159696 - DNA, 1000 bp, Homo Sapiens
ttttttttttttttttttttttatttaccaatgtcatgtattctgaacaaaggcaaaaaatacaaattcctaccattaaactggcttggttgttgtttgggttggagtagctgtgggggcttggggaagggtgtcgtttctttctagtagtctcatgtcgctttaggtcagctgggctggcttacacgcgctgtgcggtcttcatggagatgggagctctgtgtgtcagcacaggaagtggtctcccagcgttcagcctgaagcagcccaagtcctgtaggtgcttgccgtctctgaagccccaggaacatcagtgcaagaaggaagagactgctggcaaagatgactcccaaggctgttctccgctctggtgggacaacctgggtgctggccccaaggggctcctccagagagatgtgtgtgacctggcaggtgtaagtggcacctgcagagccaggttctgcggtgagagaggaggagatgctgtaggtgcctgccacgctttgcctgaggctggagaaggaggcaccagagacttgggctggggatccacccagctcctctcgggtccacgtcaccaccacatccagagggtaatagccagcaatgtcgcagatgagggtgggcagcagagcttcgtttgccaagctcagtcgtactttaggggaagcttggatgttgagctggatgatctgctgagctcggtacagagaggtggtgatctggcaaatgtaggtcccctcgtcctgtatagtgaggccgggcagggtgagggaggcatccctggccatgcccagttgtgcaggctccagggtagcgcccttccgcacagcctgcccctgccctgcggtccagctgtacaccaactgacccctgcccttgtgctgcagtcgccactccacactgatgaggtccaagcccggtgccatggagaagccacagtccaaggaggctgaggaccccagcaggaagctcagggattgggtctgtgtcatcacct

SEQ ID NO: 159697 - DNA, 1000 bp, Homo Sapiens
aatgagaaaagccaaataagcacatgtaagtgcattttttttcttcgagatttattttttgtttgatgaatctgacaccagtcagggagaggagaatgttgtgacccagcagaaaaatatggccccagaggaggggcggcttcttcctgcctgggtgggtttggtgctggggttgatttgttattattttttaatttgttgctggaaggttttcttttgtttacttttataaatctctccccgggcttgcgagcttcccctccctcccgcctccccttcccctgcccccaaatttcatttttaaaaagcgagcttgctcgccaggtgtgtcccccaagctctcacagctctaataaataaggagcacctgtaaaacagtagcttgacttgtgaagtgactctgtacaaaggagaatctagaaatacagtatgtacaccgcatccttgggccgtggtgcttcaaggctggcgccacaccgtcctggccctgcccacccgcaactcgccacccctcctgctgaggctccgcggccttgtggggcgggggcacctggacccctccagagggaacaattgctttatttgagttagtaaacagatacactgaatcacaaggtgatttgattttttttttttttagttttcttccttttttgatttttttcttaattttttctcttcttttctttttctttttttttctgtactcatcagaatgggatactccacaactgtctcaccaactcagtgccagtacacatgctctagaggacttctggactcgcagctacaactgtacaagtgcacacaagtgaatctaccctgttatcctccacccactgattgaggatcgaattgcacatttctcttaaccatgacaggagaaagcaaacagtgaaacagaatcatgggtgatctttctcactttccctcttgttttcattggtttgtccataccattctaattatcatgaaagggctctgcatatagagagattgt

SEQ ID NO: 159698 - DNA, 1000 bp, Homo Sapiens
cggtaagaaatcaccaatttattgaatgaaaaacccaacatcaactcagtccctcccacccccatctcctctctctggcccaggagacgctcaggacagcagggctgagccctgggaagggctggaggagagcttgggggaggtatggagaatgagaaaaacactttcaaaatgaagttctgtgcaaaaacttctgggaaggagtgagaggacaagagaaaagctccaaaggggctgtggggcgcagatggccgggctggggggtgcagagggctgggctggggccctgtgtcctcaaccactcctgagaacacggacggtcaggaatgaggggctcagaccccgggttggtgagagggaggtgacagggagggaaggagcctgctggagggaaacctggctgggaggatgggtctgggcccaggctggggcctaaggagggggaagaacagagcagggaaaggcagaaaaactgacacggtgggaggagggagatgaatgggagatgaaacagaatgtctgaggggccacagacagcatgtatggtggtgggggtctgcctcccatctctccaagtccaggcagagctgtgctgggtgaggggctgggaggcagaggcaggagcatcattaacaagggtggaagccacgaagacagcgaccagtgcacagggtgtgtcacatggtacaaccaagagacttggcgtgcaaagaaccaaagaaacactcaggacacacacgacatctgcagggaacctgggggtggtgaggaagtcgtgcacgggtggtggggggagactgggaggcccctctgtcctagaaacgctgtgtcaccatagcaacagggtcctggaggcaggggagctgcctcctgcccctgtgagctgtgaagtaggggtcctgtgggctcagggtgcccccttaccctcccttgagaagctctggggcaggtggagaaccccataagagttgaaagtggccttgggtcctgctggaggcag

SEQ ID NO: 159699 - DNA, 1000 bp, Homo Sapiens
tttttttttttttttttttttttttttttttttttttttttttttttttttttttcccaacattttgtatctttaataacatacacaatggttaccagccatattcataacaaaagttattcataaaatgtatctaaaaataacattttttttccttttcggtgtgaaaagcttgagaatgtcccagttgggaaggtgggttgagggggaggagggcgttgaagagggagaccctggcttccccgcagtctgaacccccaaatcccctccctccacctgggccccaacacaacccctcattaggaatagggaccagacagtctgtcggactctggggctgggacgaatctctgggttatgatatagtgttccacttaagtgaggtcatgacataatgggggaaggaaaaaggctgaaagaaaagggaggggcttagggaaaaacccaaaaaccaaacaatcccctttcccttattcctgactcccaagtctcaccaaccagacctgggagcggagaagggtgtgtgttcgtggggaaggggacgttaaggcaacagacttcctgacctcactggctaccctggctgcccacctccaacctcttcatccgggtagccagggctggaggaaaatgggttagagcttgggggtctggaggagggggctctgccctctcccctcataaagttcaggctctccctgccactgtcttggctgagagagacctggggattctaaaaatgagaggaaatgatcagagaaaaaccgttaagaactatataaatatgtatcttaaataggcctaagaaattaatcatagagaacctctggtgaacagggccaggggaggtgagagagaggaaggtggctcctgtccttgcagaatgtggggaatggtgaaggggaagcagggagaggagagagagcttcctctccttgctccccttccttctccccagctcctctcaataacattctggagggcaggttctctgccctgc

SEQ ID NO: 159700 - DNA, 1000 bp, Homo Sapiens
ttttttttttgacctctacactctattctttattctggcctggggcacaagagcaaagagatgggccagtgactcagtctctgtctctagatatgcaagttcctggtacagctcagcatggatttcagctcctactacaaccgggtacacatcctgggggtgagcacacagcaaaacggggtgggacgtgcagagaggtatagggtaaaggcaaaggaagcagaggatgagaccagcaggccctttctctttcaggagcctcgaccacacctctttggtcagatgttcgtccgcctgcagcttctgagagctgtgcgtgaggtgctccatactggcctggctatgctgggtctccctccactgagccacatttaaggccacagaggctccaatacctgggaatgttcacaaagtcatcaactggaaaaaaagcaaaaacccacggccaaaataaattggtactgtttgttacaaagttctgtcttgtcatggggagtcgggcatattcttggcagcactccactcaccttcagctcctgcaccgacatcaggaacccacggccaccacctcctcccctcaaggcatgctgagcatgggcacagacagcccttccctgctccatgctgtctgtgagcaggccccatgcccagcacgccagccaccgcaggatacctcagtcataccagttgtaaacctcaagcccctgacccccaagggcacaacggtggccaaactcagggctcacaggccagcagtccatgtcagccacatcaggcacatggaacacagtgctattcatgaaggtgggttcaccatgccccagacgccagaaggtcagccgttgatcaatggaggctgagaccatgatgcttgggcttaggatcttgaggcctgtcacatgggcagcatgtgcacaggggacagagtattcctctagcacacgcagctggggtaccagcccagcctctcccacagcctcttctagctgtagcatctcca

SEQ ID NO: 159701 - DNA, 1000 bp, Homo Sapiens
aacttgaacagggaaagtttaatatagagaattactggctttaacagtgaactggaataatgagggcttcactggtaaaatgcttctgaattgactggaaatccatttggggtgctggggaacgttattcccagagaggtgcctcagtggaggcgctgtgtctcctacgcaacttctgagggctggagggtgccaagggcagctgctgaccgcctggtgcttcaggagctgggtgctggggaagccacatgcactgcggcgtccagaggcagaagcacaaccaacaagaaccacgaaggaggcgcctttcctcctataatgcctgtttggtgccctctactgacaaagcttatcccctttcaaaaaactgccaactgaaaaagctgaatttggaacataaagtcaataaatccataaccagcaatactatggggcctggggtgcgctggcctttagtgagtggagtggggcgaaggatgctgcatgtcctgcagtgggcacagcggccctgcacgggggagaaccatccctgtaaagtgtcagtagtagcccctgtgtcagtcagggtccctgcaagaaatggcagtgcactcacataaggacagtttgagaagagtctcctgacaaggtgagtgtggctctctgcggctactaacagcctgagcctttacctccccaggcctgaacaggggcatggaaagggctgcctgacagggtgacaggagctgtgacctttagccaagggcagccaggaataaatactgggaactcacgctctctcctgtgattggccagcaccactcccccaccctgacgttgagtgaagacaaatggaagccagaagtgtggtgagctaccagacattccatgcagcccgctgagaagccacgtgagtggggacagggctaaaggctaggcagggacagggctggctgtgtcccgaggctgctcctccggccctgacttcaggccctcagcccagtcgactcccacaacctcg

SEQ ID NO: 159702 - DNA, 1000 bp, Homo Sapiens
tttttttttttttttttatgcaaaattcaaactgtatataattcacatttatgcttctaaacaaatagaagctcacatctgtactacttttacaatttacaaagtgcttttatatacattttctcatttgctattcatgacagacacgtgagacaaatattcttattttacagatggaaatagacccagacattattcagtactttaaccactaatagtggaaccctgagactttagatctgcaaaggggtttaataatgcaaatatcacatatatttccatttttaacaccatatttaagttttccattttcttaatagaaaatgataaaaaatgttttccccaatataataatacaaatggaaaatattatagacagtcatatactaacccaatgaccaagattcaccagaagcaaaacctatttggaggggtcctatattgttacatatatacagggcaccagcaccagaaccacatttagactaatactttttatttctaattaaaagaaaacaatgcagggcactcctgcagcctgcaagtctaactgtacatacgtatgtgtcagactatgcaggtggccaagaagaatgcaaagagatattttatccaaatttggagtttagggcctgattgtcctagcttaagcccataggaacctgacaactcgttcatacctctcatctttagtcatagtttctccttctccatccccttttctccgtaactaccctgtgccatttagactggaaattctaacaggtagctttttctttctgaattatctttactactgtataatttttattttcagaatattccttatttctacatctcgaagacatttctttatagtagatgggggagctagagcttacattcactgccagaaaagggtcagttccagtgttaatttcccagcaaacacctgagagaaaaactgaacagaaaaagaatagtgataggtggcagagcagtgacacctgtgcccagaaag

SEQ ID NO: 159703 - DNA, 1000 bp, Homo Sapiens
ttttttttttttttttttgcggtggagtaattccttttaatttagacgtgtgttcacatactttatgcataagaaaatagttcattaagatacattttcatggtaggctgtttaaaatctagcagtaatgtgacaatatttaaactgttctaaaaataactcgaaatactctcagaaaagagcaccctggacgtggctctacattcccctggaagttttgtaaatgctagaatgttctttgtttccactcaaaagtagtcatgtatttactgggaataccaaagaaatattcatgtaaaataaattatatacagaatatacatagtctatatacataaatatacttgcacacaaatgtagaattatccaccttatgtcttttaaatctgggtcattacagaaacgcggtcctctcagccacacccgctacttgtgcagttttccctctggccacagggcttcctgcaaaagcagacgcagcctgttgcactcgtccacctccggggccgcccaccgcctcttcaggtgctggatgtcgatggagccagacgccctggccagcaccagggccaggaagctgccaccagccttctcaggctcacccaccgcagccatggccaccagcctgttgggggagacctgctgtttggcgacaggacccagatcgctctggaggaggtcccagatgtagatgttggatgtgtcgtcctgcaccaggaacacggcaggcctggttggggaccactgcaggccggtgaccgcatggctgtccgtgctgctgtcccactgcaggagcggaaacgcggagctcagctggtgcagcctgatgcttccgtccgaacagccggccaaaaatattggttctccaaatggtgaaaaatcaatgacattaactttcactggtcttataccatgttgctgaggtttgaatagtttgggagccactctcaaatcttgtcttgtgccatggcttatgagacccatgtctgtgccaataata

SEQ ID NO: 159704 - DNA, 1000 bp, Homo Sapiens
tttttttttttttgagggttttctgttatttctttattggggtgggggtggggtgcatcattcagatctttgtgctggtgcctacgtgcatacaagtacacacacacacacacacacacaggcatgtgttcacgtatgtatacatatacacacaaggccagagctctagtgtgctggaggaggggcaagctctttttccaagagggtattagaaagaggttgattccagaggatgagtggtctctgaggctatagccccccactgggtgggcagccagctctgtgagaatgccagggtgcagctgacagcgctggaggcctggggactggactctgagaggagcttgggcagacacagcagcctccggccccaacactgccctgggttggcaggcccagccctggtcctgacaggcaggtccttgagctcctcgggagggcgtgacgacccttagtgtttcatgggaccactcggtgggccctcctccgtgccaggcctgtcagaggacaaccctccggtccaggtggtccccacgcccgctccgctggtgccgcacttccaggtgcttgttctggaccttctcaaagtgctgcagcagctctgcgtagtcgatgctaggggagtcagctttctgggacttgggggctgcctttagactgtcttcggtctgcagcagctcagggttgggcacgcactggagccggtgcgagagcagctggaaggcgctgctctgcggcaggagcatgagcaggccgtagagggccttgatcaggtaggggttgttcttcacgtccagcagctgcaggcgcagatatgtgaagatggggcactcaatcagctgcaccagcttgtccacctctgcgaggaagtccacggtgacctccaggtccccaaacttctggatgaggtcataggcgtgccggtagttctgggtgaggaagcagagggacaccgtggtgactgggttgtggcaccaggagcggtacaggcagcagaaca

SEQ ID NO: 159705 - DNA, 1000 bp, Homo Sapiens
cacgtgttgacaaagcccagtgagaggcacttgtttttattgagcctttactatgtgccaggttttgtgccaagtgtcttacatacatttaatctaatctccacactaaccccaagattctattcttaatccccattttgcagatgcgataatggatggctaacaagttaagtgactggtgtaaggtcacatagctttgtgagttcctgaatcaggatttgaactcaggacactaaagtcctcatacttcctgtgcagtgacaccacctccctgggcacatctgtgtcctaagatatggtcattagacccactggaatgtaagcgccatcagggcagcgaccctgtctgctgtgatcacagctatgtgcccagcacagggcctggccttacgagtctccctaattgttagctaagtaatgtgcatggatgggcttggggagggtctagctcccaggcctttacatccctactgtctaggcagcagcacaagcccactttcccactcccctgctggactccatccgctggttcatgtcccacccctgctcagcagctgggctcgcagctctccttaaccaccgaccccagattgagatctccatctacgaggaccggtgcagcagtggcagctccagcagcggcagcagcagcggcagtggcagcagcagcggtgggggtggtggggcgggggcccggtgactggccgagagtccccacgcaggctgtgccatcctcgttgggctcgtagccccgactgcacttcttgttggtccggcacctgtagcttccataggtgttgacacatacgggcttgtctcgagggcacacgaatgggaactggatgcattcattggtgtccatgcaatggccattttcctgctgggagaatccttggccacactccagtggggctgggtcctgaagtgtgtcctcatcccgggggtagaggatctccagcactgagttcatctccccgctggccacgttccggctcaccat

SEQ ID NO: 159706 - DNA, 1000 bp, Homo Sapiens
ttttttttttttttttttttttttttttttttttttgatcttgtataacattttatttagcattcttacacactacacaaaataaatacttggataactcacgtctaacaaactaaactatatatgtattttttccataggaaagcacaaggagaagacagaaatatcaagagtctcaagaacctttgaatgaagtaaacagtttcccacaaaaaatcagctatacacaattcccaaactcattttatgagcctcatcaagattttaccagtccagatatattcaagaagtcaagatctccatcttggtataaatacacttccacagtcagcacggggatcacagacttagaaagttcaactggactttggcctacaatttcccagtttactcttagtgaagagacaaacgcagatgtttattattatcgcatcatcatacctgtccttttgatgttagtatttcttgctttattttttctctgaagatgataccaaaattccttttgataattttttaagtttccagctcttcaccgaaatgttgtattcttatttcagtgtttccttccagacatttttaaggtaattggcttactacaatatggacattcaccaaatatgatgttaaaactctgtctactagttagtagtcctctcagccactcatataagcatatttgatggaaaggttgtccacactgagaattatcacacacttgatcaggaatggtaccgtcaagttgataagcataacaaattccacaatccatagtaaaatcagatttttccaggatagcacgagctggaaaatcaatttctaaaacatctttcaaattttgtaacacactattttctggatcccacaaatgtatgttcctgctcagcttaattcccaggggttttaccacatggtcagctccaagaaagaagcactcaggaagcatagtaggatgcctggggtctacctctatatttatggaaacattattacctaatgc

SEQ ID NO: 159707 - DNA, 1000 bp, Homo Sapiens
tttttttttttttttttttttttacactttgaatatagaatttatttttctcttaaacagatgaccccatagaaagtttccgttatgggattctgggtgactcattttcgttttttttttttttgagatgtactttccatcttgttacccaggctggagtgcaatggcgcgatctccgctcactgaaacctccgcctcccaggttcaagcgattctcctgcctcagtctcctaagtagctggaattacaggcatgagtgaacacgcccagccttgtatttcatttttgaagtacacctttttttttgagacaaagtctcgctctgtcaccaggctggagtgcagtggtgcaatctcagctcactgcaacctctgactcccgggttcaaatgattctcccgcctcagcctcccaagtagctggaaccacaggtacgcgccacctatgcccagctaattaaaaaaattttttggtagagatggggtttcaccatgttggccaggatggtctcgatctcttgaccttgggatccgcctgcctcggcctcccaaagtgctgggattacaggcgtgagccaccgcacccagccttgaagtaaacttttaaccactactgtaaatggaaaactagttaacacttgtcaacaatagaataaaaccataaaacaaatacagtgaatataaaacattaacaaagttctagttaggaagtgttgcctgtgaaagctgaagcttgaggctctgttaaaactgaaaattgtgggacatggtggctcacacctgtagtcccagttactcaggcgtctgaggcgggaagatcacatgagcccaggagtttgagtccagcctgggccatatagcaagaccccatcttttaaaaaacaaacctcagaaccaaaaactgaagattaataaaaacacatgactggagactgaatgtaaatcctatgtgactgaatgtgaattatatgctttggggaaatactgattattccaaggcta

SEQ ID NO: 159708 - DNA, 1000 bp, Homo Sapiens
atcataaaaacctttttatatcagctcacccacacctccctccgttcctccctgccctttctcgccctggtgatcatcagggatgctggagtctggcgcccccccacaccaccagagctgaagccgacattcaaggtggacgtggcgcgtggagagcaagggaaggcccagctcctctccttcgtccccactctctgtgggctcaggaaacacacgctgaccggaggcagtggccaggagaggcaggctagggtgcaggctcacgccattggtgcagtccttctggggcagaaaactcaacacgggctccggcttcccatcattgccaggcccgtccgtgtcccacacagagacagccccgctcgtgctgccactcactaggaactgcccggtcgggtccagatcgaagtagatgcgctgattggtggtcacctctcgacccagggaccacagtggataaccagactgccggagatcccagcacaggagctcagcatccttgcgggctcctgagaagaagcggttgccatcgggatgaaagcagaggtgggtgatgcccccttggtgccctcccagcaaggcgagaggggagccatcatcccaggcatacagacccagggagcggccgtaggagccacaggcatagaggggctgggctgggctgaaggctatgcaggagatgatgccgctctggccctgcttttttgcaaatgtggctcggacctcgcagtctcggccaggccgggccgtggaaaaaacacgcacagtccggttgaagccacagaagagctgggagccatccggggagaagcagagcgaatgggctgccgtcagctcatccaggtggttgtaggcgcgaaaggaagcccggagctctccagtgaatgcgtcccagatatgaatcgggttctcccggctgctgctggccacgtaggaggtgtctggctgggctgaggacatcagagaataccagcagtaatcatagatggtatcaccttcc

SEQ ID NO: 159709 - DNA, 1000 bp, Homo Sapiens
tttttttttttttttccggaggcagtgggaggattttactgactgcacaacacacaacttccccaggcccccgaggatgccggcgtctccttcagccatcaggccccagcagtgccccttgctcctgtacccactctggactctcgccggtagggagggctgggctgacagtgccacgagtgggagaacaggggtcagggcaggacacagggttgggatcagggctgggcacaggatcagggtctgggctgggcacaggatcaaggtctgggctgggcacaaggtcgggaccagcgtcgtgcccagcctttgggtcagaagattccacaggagtagggctgggggtggatctggagccggggaggggtttggagctgggatccggcagagtgcccggcccagagccagggtcagggttgcggccagagctggtgccagggctgaggcccaagccagagccgagcacagaaacagcatcaggacccaggagggagacctgccccggcctcatcatggatgcagggcttaggccaggcccgaggcccaggccggcggccgctgctgcagctgcagcggccgcggcagctgcagcagcggctgcaccctcatgcacccgtttgtgcttggtgaggctggaggcctggccgaaggccttcccgcagagctgacagcgatagggacgctcgcccgaatgcacgtgcaggtgctggagcagcgctgagctctggccgaaggccttggagcagtgcgggcaggcgtagggccgctcgcccgtgtggatgcgcaggtggtgttgcaagttggagctctgcccgaaggctttgccgcagtgggggcagcggtaggggcgctcggccgtgtgtgtgcgctggtgctgcagcagcgccgagctctgcccgaaggccttgccgcactgcggacacgggtagggccgctcgcccgtgtgcgtgcgcaggtgtttgagcagcgcagagccctggccgaagcccttggcgcacac

SEQ ID NO: 159710 - DNA, 1000 bp, Homo Sapiens
ttagatgccgatggtctgtagaactcgcctctcattgtcattaaggtggcctgaaaacattatgtagcagggctgctgagcaaactggcagaggaaatctgtgagatatgcctgcagatcaatctgatagagaggatccttcagggcatcagggtcatcttcctcatcatcctcgtagtaatcctcctcatatttacttgtagcaagaatgtcagataaaagttggccagctaaaccatcctcctcctcctcctcttcctcctcctggtcctcccacatatcattggagtcatcttgactccactctgcaggagtggcctggcgagcggcattagcctccatgacgttggagagctcgttgatgatcagctttaggatcttgaccagcaaaggaatgtttgtccagcgttctgggtttttggctgacttagagcgggtgcggatgccctcatccatgctgtagatctcctctcccttcacacggatatcctgtagccgtttgtcatctgcattgatgccatgctggagcagcttacagagtgccacagagctgactttgccttcatactgtccatagaacaggtgctgtcggcttgtccactcagccatcacaaactctagagcaggtttgccagtaggtcctgggaggctacacaggaactccaagagaggttctagctgagtgtgcaccagatgagcgaacaccatgatcagggactgcatgacactgagcgtctctgcctgctgcatcttactgaggatggcacgaagaatctggtctagattctccccgagttcccgccctgccttggagatgagggtggaaacaaggcggcccacaaaggccgcagtgaactctgaggtgcgggggtccaggagctggctcaccacttgcatcacataccacagtccattgtggccctgctcatcatgccactgggctacttgttccagggtcactgacacataggcccgcaagcactctccgccattctgcatg

SEQ ID NO: 159711 - DNA, 1000 bp, Homo Sapiens
tttttttttttttttttttatatgttaaagactttttattttcaggccctttcagaggaatcaattcctttaaacctttgtaaaatgccacaggagccaaggttaagcgatgcttttaacttaggaactgaccctctccaggcagagtctccaaagtagattacctcgaaatttcaaagaggcagttctacaagaggagcctttgaagaagccaatcctgttttccattgttttgctttcacacacgggttgaacttgaactcttacctttctccatttataacaaccaaaatccaccttaaaaaatcaaaggctgggagcggtggctcatgcctgtaatcccggcatttagggaggccaaggtgggttgatcacctgaggtcaggagttcgagaccagcctgaccaatatggtgaaacccccatctctactaaaaatacaaaaattagcagcggcgggtgcctgtaatcccagctactcaggaggctgaggcgggagaatcgcttgaacccgggaggcggaggatgcagtgagattgcgccactgcactccagcctgggtgacacagcgagactttctcagaaaaaaaaaaaaaaattgcaagtaatggcttctgtggaagcaaatcttgatttaggggcacacaacctgagactccacccgctcaggatagacagacaggaaagccaaacgctctctggggaccacacttggggctgcccacactgctctgtagttgccaagagggtgggaagtagagataacaaagaatgtggaatgaagctctttgtcatcgccgtctcggatggtagactcccgcctgggagaggctgctggctggctgctgccaggctcacacccccacaactgcaattcctctttcccagtcacactgctatttatttctaaacatcagcactgtaatcagaatgatttccatgaaaacaaaagctcattttcctaacttgcgctccaatgcgtatgtcgttaaagggctgag

SEQ ID NO: 159712 - DNA, 1000 bp, Homo Sapiens
gagtttcaaatggagtattttattcacatgttagttatcattttaacacacacacaaacactgacacactctggtttgcgtggaacaagggtggtctaaatatcctaaaagaaaatgaaaaattaaagtacattaatttttcattactgtaggcaattacgtccacatcacttacaaagctattactgatattgtccaaggaagcagagtggtacagaggaaggaaacttgagggtaaattcatcagtgacataacagatctcaacatgagaaagctgacaaaacatgaatttttgctgtgaaatttctctttgcaaaatatgaagaaaagtcaatcaatgggcagtaaataagagtaggtggtgaacttttgctgtcaattctcctcacagtatcttgcagaggcatcaagaaaattgcttagtccttctctgggaccaatttcagaacttttccaattgcaatggtcttaccctcatctcttaaagtaaaacgacccatctgaggaaaatctttgaacgtctcgaggcagatggttcctgctgtccttaaacgagcaatgcatacttgatcttgtttcacgaagcggggtcgtgtcttacttttttctcctgattttttgtctaccaaggagattaacgctgttatctcaacttcctcaatacaagtatgaatgtgcagcaccgcattataacctgggcagatgatggatttgtgctcaataatcactatctgaacatcaaacgtgcgtccagaatggcagaggttactaggatcacaaagtatgaatcctggaagaatctcttcttcttcaattcccttcagtctgattttgaggttttcacctggggctacaaaatcagtttcagtatcatcagaaagtattccaagaacttctacattgtgcttgtttggcatcatcacgagctgctggcctttaaaaatggacccggattccagctttcccaggaccacagtgcccatatctttgtacttatcc

SEQ ID NO: 159713 - DNA, 1000 bp, Homo Sapiens
tttttttttttttttttctagttctgagcagtttatacaaggatggtttggaaatccaatctgagtagttcagaccatgaccctgcttagcatgggatgcaggagaaagcagaggcagggtacattcagggcaagatctcggcctggggtctgagtcctgatgggaattcctttcactgcttgaaagttctcgtggcaaagaacttcctctgtatcaacaatacccacttctgctcagagctcatactgctgcctccccatctgagggaatcctctggaagagccatcaccttccccgctctatcccatgggcccagggcagtgcttggtgcctggcagggcctcaagcagtgtgctatgcgaaggcagaggcatcccctggagcagggctgaccagcagaactctcttgatgatgaaaacctttctgtgtgctgtccaatactggaggccttacccagtgcgatggaggaactgcacttctatttcatgccagcagtcacatgtggccggtgcctactgcagtggacaacaatacagccctagattctccttggccactatcacaactggcctctctcttaccaacacgggggaagagagggaaggcaagtgcctggtcagtgtggttttggcgtagtccagtgcaagggcgggggctggacaatctcatttagcacagtccttgattgagtcatggggattctaggacaaggaattagaacccaacacacaaaacttaagttacttatttggtcatagaacctgggatctgaccctgtacagagctgacactaggggcccactcatagagcctggctgcccaccacccctgtctgtaccagcaaggtacagagtagcagacacgggccaagttcagtgacaacttcctgtgaccttcgatttctggctctggggtgtgccacaggcggggatctgtgggaaaaccccattccggtctatcgaggacagcaggccacacgcattctcaggtccccactg

SEQ ID NO: 159714 - DNA, 1000 bp, Homo Sapiens
ttttttttttttttttttttttttttttttttttttttttctttttaaaagtgtttatttttggcaataaagagcacaacataatctccttcatgcgtcatcgtgccacttagctgagccagccagctctgcctccctccccaaagacctttggaccccagttcccctctacaggctagctcatccctctgggtggtcattccccgggtcacgttgagagcgaggctgactgcaccacctccctagctcaagggctcctttgggaggggccgcgtgctttatcatcctcctgccacaactcaaatagtggttatttacaagaaggtctgttcccacaaatcaggaccctaaagtattaaaaaacaaaacccaaaaaacaacaaaaaaccccacacaaccaaaagtttgacgtgaatagaaagatagcccttctgcatggtagtcaacaaataccagcactagaaaatcaattgctttaattgcattgcagcagggagcctcagcaccatgtggggaggaggaatgggaaggtcttggtttcagagtgcttttggctggccagagggtggccaaacagggcaagggggctccctctgcttgggcattgtccacccctggtcagtgagaggggggcagcaggggtgctccccacggcagtcctgctgcggccttccctcctggcctattcctggggcaggaacaagctccagccttcctccacatggctgaggtaatcagcacccctaccccaggggcatcttcccagcctacaaagcaggaaggagcctgtgcagaagttacattttaaaaccagattttcacctgaggcgtcaaccagatgtcacctctgcttaaaactccaactgcaaggctggcaagcagcacagaggaagtgcagatccttcctgtgtcactccaggcccagaggaactgagaagccacctgctgttccggcccttgggctgtttgggaaaagccagcagtcagagtgccagcctca

SEQ ID NO: 159715 - DNA, 1000 bp, Homo Sapiens
aaaaaaacaaagcaaaccctgggatcaactttattgctgatggctgaagcctcctcctccctatccccttggtctttcaggtggtccaaagcccctccaggatagcacagtgcttaggctctgctgggccagaggcaagggagacaatctatctcccgagcctgccctggcccagtcctttccctgcccctaccccaccctattgcacatcaaatcatgtaaacatggctatggggatggcccagaacagcagtgaggcagattgatgtgtaaacagatttgggatcaggggctagacccagtcacccagccctaccccatgctgaggccacagttaagtatggaaaagcaggaggtcctggtcccaaactctggctcagattatgcaatagtgcagatggctctgctcccctctgccacccaccctctcagattccaggtcctgaggtccaagtagccttgggcttccctccaggcctaggcagcagatggcagtgtccagttttttccttcccacccccagctggaggtcactggtgctgggtcttcctagatgcctgggggaaaccggagacgggcagcggcagtctgtccagcccaaaggcccggatcagctctgcccgcacagctgcagtgaaggtcttcaccagacagagtgtggtgaggcctgcaaaggctgcgttgtagaggaacacaatgtagaaattgcccagccagttgaagcgtccaaagtcacccagcaggtcaaagcgagtgagccccagggttcgagagaagacaggaagtgctgagcttaggaccaggagacagacacagttcccaattatctgcgtcatggcagtgtcgtgccatctgggccgcaggctccggaagagtggagagctatagaagcccacaactgaggacaccattaggtaaaagatgagtacaacctgaatgacggcaccaaaggagcccagcttggagaaggagacctggcctaaggaggtaccctgcatga

SEQ ID NO: 159716 - DNA, 1000 bp, Homo Sapiens
tttttttggaataaacaaaagattttgcaaatcaatatatagtgcttcataaatgttaacatgttactaaggatcagtgaatacagccctcctcctttcttaggtttcccaccattttcgagaactcatgcagctcttccacactgcctgtgaagccagctctgaggatgaggatgatgcaaccagtaccagcaatgcagaccagctgtctgaccatggggaccttctgtctgaagaggagctggatgaatgagactctgggaatcatctacacaggaccaaacccaacaggcgccctggcaccggggaggcgggtagttgtactctgcttgtacagtccttgagcccagtttacagatctggagagcaggaggccaggacaaggacaaaggctggaggatggagtaggacccaggggctctgccatcctaggcatcattcaaggtcttttatgaagactttacagatgtcctctgtaagtagcatcgagagtggagttcagctcctttctctacttttttttggtctgatggcacatatttattgttctgtggtctaatcacagtgtttctaaatgtaaaaagtgcatatgttggtgtagctagtcccgcgacattgagctcctctgcatgaagacactgggctcctgcatccagctgtttttattgcaaactagctcctttctcccacactgggaactttagtccacgaggctgtcaccaccctggtagcactgggccaggctttgtagctcctgcagcagctctgctacgtcatcgtgctccactccagcatccatgaagctggcccagcgccgcaagtcgagtttggtgaggtctctggccaaggcttccagggtctggtgcagggacgaagaggaacacagtgccccaaacactgggatgctctccactgctgctcccttgggggaaccatccagaaccatacccggtggactgcagcttgagaagaggtgggggtaaggaggagccaccctgca

SEQ ID NO: 159717 - DNA, 1000 bp, Homo Sapiens
gataagtaaaatgacttttactattgatatcagttttgtttaatctgaaactataaaatagagatatatctacctatttatggatggataataccatcatctcatatttgtggaatgctttatagtttttcaaagtacttttattcactttatcttccatatatgttatctcctctgattccagcaataacagcccggtgaggtagccagggcaagtatgtattttacacattagcaggaagggaggctaagcgaggtttatgtaacttactcaggctgaaacactgaagaaaaatttgtgactctcatttcagtgatgttttctgcattattaaaaaatattatgctactcctcactatattatgttgatggttgaaatgtcattataaagcttaatttatatgattctcttgatgaggatgatgaagcaaatgctccatcaactcactagtttacaggggcaagcattttcctacatttcacacataatttgattacctctgtcctaagtgaataatctactatctgggtatgagaaacatgatttgaaaacactaaaccactatattatttcaacaaagaaccatctttcacacctaagtaaaaaggaacttcaaaaaaagtcctaaccaaaaaaaatccaaatgatgcatgaaatcaagtcaaaattgggtatcttttatctgtttcttcgttgtggtgaagaatgttgcctggattccttccatctaaagacttgattgttagacctgtggcagaactctagatctgactttagccttggggaagcaaagaggacaaaacctaaaagctcaactttctgcatggtatgcatgattcaatgagctctttctgctttggagtctgttggcttggagactcggatatgatagggcttcagttcctcaggagggacagaatctggggtattgctcatgaggtcatgtccccggaaggactttgggaaggctatgacatctctgatgcttggagatccag

SEQ ID NO: 159718 - DNA, 1000 bp, Homo Sapiens
tttttttttttttttttttttttttttttttgcaaactcaatctttattgcagctgaaatactattttcgttaagtctcggacacttagacccactgatcctgttactctgcttgtctctggtgtgcagggaatcactttgctggattagaggaaaggtgccgccgtctgtttccatgacttctttaaaaactgccttgaaatgaaattagttcatctgcttgcttccgtgtggcagcctcctggcccgcggctgtgccaggcaccagtcctaagaggcatctatagactagtgcttatgtgggagcccaagcctcggcacagctccataccacctatcctgagctgcctcctgggggaccgtgctcttcagcttctaccagcaaggagggcagatacgggtgcgtgcgtggggcagaagacacacagccttctgagttcagggtctcccagatcttcactgggctctgaccttcttggcctgtggctcctctgtgtgggcccgcttctgctgaggctccccatcctccaggccgcctgccagctccctggacaggagggccgcccgcacctgccgcagctcccgcttctccctgcgctcctccatctcctcgatgtcgccagcaaacagggctttcagtgggggaatcagcttgggcattgttggaaagtctccaaagcagaccttcatgtggtcaaaggcaactcccactttctcgctgaagttggggctgaagagggggaccttggcatagcgctggctgaagtggttcagcataatgaactccgcgttcatccgcatccccacgctgatggcttgggacgttgtgctgtgtgtcttttccactgcttcctcttccaaaccatcttccagggtggcttcatgtatcaggagggtggcatctttccccatccggaccagagcctcgcagggcatggtgtccccggaatagaccactttccagccagaggtgtgcaccagcgcacagccaaacgcatgc

SEQ ID NO: 159719 - DNA, 1000 bp, Homo Sapiens
tttttttttttttttgtacacaaatgttcataacagctttatttataacagccccaaactggaaacaacccaggtgtccatcgataggtcaatgaacaaatctattcaatgaagcagtactcagcaatgaaaaacataaaaacaaaaactcgtgacacatgctaccacatggatgaatctcaaaataactatactgagtaaaatatgcctgaccaaaaaagggatacatattgtatgattcaatttacatagaattctaggacatgcaaactaataacagggcacaagggcacttgggaatgatgggtccgttcctcacttcagttgtggtgatagttttacgcagggtatacatacgccaacacattgtacacttttgatacgtgcagtttattgggtgtcaagtacacctcctaaaataaaaatattgatgggctctacattctggagacacgggcagtagaactattattttcagcttgaaatattagctacactttggtaaaaatacttttgaactttatcttcacagtcgcggcaaggaaaacaaaaggtataaacattcattggttgaaaaacaatgtcataaagttgtccccgtatctgtggggggttggttccaggactcctgaggatactaaaatcctcagatgctcaagcccctgataaaaaatggtgcagtatttgcatataacctacccacatcctcctgcacagtttaaatcatcactagattacttatattacccaatacaatgtaaatgctgtggaaatagttgtcatactgtattatttagagaataataacaagaaaaaagtctgtacatgtttggtacagatgcgattttttcttcaatatttttgatctgcagttggttgaatccacagatgtggaacacacaaatacagtgggctgactatatactaagaaaaattacaaagtgaaaatgaagaattctcattcggtaaatgaaacccaatctaccatatttctcaacaa

SEQ ID NO: 159720 - DNA, 1000 bp, Homo Sapiens
agaattagaaaactatcatttattgatagatttaaggtgtaatacaggtttccaaaaatgtggcagtgagaataccagcataaaaaagagaaacttgtgctaaaaacaacctgaattcatcattggcaatattacataacaatcaaggccctcacatactaatgatttccactttgtctatattgccaacctcccatgcatcaaaaaaaaaaaaaaacccacaagattatcaaacttgggaagcaataaagtactctatgaattttaagatcataatattaggaaagtttggtcgatttgcaaaatatatcctcatccatgtgtacaatctcatttctaatcatttttgcagtgatcattagtgaataaagaacagatttacaactttatatagcagggcatctgggttcaacacaaaactgttacaaacgttaggtaaatacatgtttcataagacactgctaacacttaaaggaattaaataaaattccaaatcttggaaagcaaataaagacaagacaactaagaagcattttccaccatttactcttgttatcaaaaatagttcaactcttcttgcaaaacaaaaacaaaatagtacatactggacacatacatcacatttttcttcctatggctttagcccacccccaccccaccaaaagagaccaaaaaaaaaaaaagaaaaaaaagcccaacaacaacaacaaaaacaactctacctgaccacattcacagaaaatgacaccaggatacactacaaaacagaaggaggtgtcatctgctctgtgtccaaaggtttcttctccatgtcttgtactaggcgagtaaccatcattgaacatgctgtgtgccaaatcaaaacataacttcagcatatgtcagatcttactagagatggtgaacgtagtagaaattggaaattttccagcagtatttttctttaaataagcactgtcaaagctgcagctcttcttttaaatcacaggttatttcatta

SEQ ID NO: 159721 - DNA, 1000 bp, Homo Sapiens
agtttttatactctaatactttaatatgcaatgaataaaagggcagaaaattcagaattacaataaatgttaggctatttcagaacaccagtttttcacacctattttcttagcatacagaagctcgaaaatcatacattaagcatagtttgaattgtcctgaagttatattctgaaggggctgtaacacttaagaactaataatattaaaaaggcaaaagcattataactcacagcacacaagactttttacctcatctataaaacgtgagaatgtcaatgttttattggctacaaggataaggaaggaaacatcagagaaataaatttgataacaagattcacacttcattacaagtgattttcctaaattcacaactttcacatttggctgagtgaaagagaaaaacaaaacaaaacaaaacaaaactgaaaagggaactttcactacttgtaagtaggccaactcacatgatccctccaaatgagagagtttaaatgagaatgagtatacttttctagctgggaaaatattttccttaattaagtgagtttaaataatttacccatggtgatgaataagcccttgggctaggctcagaaacctcctctaccagcctgtttcataagaattacacaaatatttttatgggacatacaagaaatattttttggttataatagtagagacaagaatttttaaaaatccatactatttctttcaggtctctctcttaaatgcaccttctgagtttcttaggtatgctgtacaattacaaagtccattttacttaacggattaatgtgttcatcaactttagcaccctatgatgtatgtggtcagagtaatgagaacagggctatttaaactgcttcctcatatccttccccttaattaccagtagtgaagtttacctagaaaacaatgaggaagaagtaccatagcctacaggcacctagggagggggaattaattcggactgagaaaatatggctctgg

SEQ ID NO: 159722 - DNA, 1000 bp, Homo Sapiens
gtcaatgttttacaaagtgttcatagttttattacttatcacctctatgtattttaacaacttcaaaagtgcagttggattatatgggaaaagatttttcttttgcaaacggcagatggcatcttgtagttcctggaagcattttactattctgtaaaatattcccacttcagagacgacatcatttggggctacttcacaatcaaaggagaaggcagtatcaaattctttcagaaccagaggccttgatggaggctcaaggctaaattcttttttatccctgcttgtcccagctgcatcctgaatctccttagttgcttgctggtgtaaagatgtctgtttactgttagctaaacactgctctgtggattccacgtcagaatcgtcagagctgtcgtaatctaccagactttgagaggcccggggggaagacagactagaagcacacatggtgtgagcccccttggacatcacagctttcagtggttcagagggagcatcggaagcccaggagtgccgagcacacacatctctgtgactatgaggagcagtcaaacgatggggtattgtttggttggagctttggtcttggacaagtgaggggacacagccacaaatacttatgtcatatttagattcagttgcatcaaagttattgcaaatggtgaaaaaattatcccagtccttttgcagtaattttaaatatctaacaaaatattcaagaaaacaggtttctgatgaaatcaaaaagtcaagaagaactgtggaatcaaatcctatatttttcaagaagaacaagaaaatacagtgaggattatagccattttcatgtgtgtgatggtcccacatttcttttccctgagtcaagctttcagtggcttcacatcctctggtcagtgttaagtagatgcccagtgatgccttggcagcctccagcatgtcatcgtcttgttctatgaaaacccgagacagccatttgcacggattgtgtaattgcaga

SEQ ID NO: 159723 - DNA, 1000 bp, Homo Sapiens
tttttttttttttttcaactgtttatactggtttaatccatgtcaaatgtagtttacaaagggaaaggacaagtacctttgtatagaatatacagacacagcatcacaccacagggcccacgggagggtcggggagacgacactttttccctgggaaaggcagctctaatcccaggaatggttctcagcagaggctgggtggccaggagcactgtcctctagccccctaactcagcctctgcttcagctcggttcccatttcctgcctctaccccccaactccttataaagagccccatgagctaagactaaggagaggatcatgtcccttggggcgtgtgccccatgtctgggagaagaaatatacaccactgaacaccgagcacatgggagagggaagggacaccacaggagagagagaggcaggtaccccaagaggtggatgggccgagctcccagccaaccctgaaggaggcgctgcttccaggggttcttaaaaaagaagaaaatcatacaaccaaagggggaggggacaggtagagggcgaggagttgtcccatttatacacaacattgtaaacatacacggtctatattacatgtgcttcagtctggtgtttgcatgtctgtctgtccgtctgtcagtatgggggctggatcttaggagccgtgccccactactcccccaacccccacctccctgccccaccctgggaacagagctggaacaggtatggcccccaaaccataggtgggagccagcaggtagtgcctgggccacagcctctactctggctccagagtcctgcgtgtgtaaatgtgtgtgtgtgtacgcatgtttgagtatgtgcatgtatgtacatggggaacctgtgtgcaagtatgtacaaagggagacggtcactgtcacagaggctgggggcaggtggggctgctggaggcgaggcctgcctggggcagatagctcacaagtagatcctccgcaggtctccgggcgctgt

SEQ ID NO: 159724 - DNA, 1000 bp, Homo Sapiens
ttttttttttttttttcattctaaatgaagtgcttttaattttcagaccaaacatttttaatataaaaacattttgataatatacaaacagcaatcacaacagcatccacatggcagcaaggggaccagggcacagagagggggagcgggctggggagggacagttttcagggtcccagttgcttccctggcttgaaatcaccctggtcctagcagaggacaggttaaggctgccagaggcagagggtccctgaccctggcccggagacagactgcccaggcaggccctctgataccatcttccaaccatggcagcctccaggaaaagccagatccatttaggagataacaggaaggtggctgtgattgacaggaaaggcaacatggttcctcagcatcctgctgatcacacctctgggaggggctgctggattgaagaggacctaagaatcttcctgggagcaggacagaaatgggatctaagtctacctactaactaacattcccgcctgtgacaccagaaagctggagtgggtctgctcagatgtacaggaagagaaaggaatgacaaagcctttggctcagcaggactggagccttgacaggcactgaccaagaaagcctctaggtgggccagggaggtctgtgggaaagctttggatcaatggtactcaagggtgcacagtggcacagtggccttagttagaatttatgaagacgaaaagaacacaagtcagaatttagaactgaagtacctgcttcttataggcctgtagaggaaaagcgagatcatccttctggccaggactaggggagacccaaggcctgttctttcctaggggctgagtttgacagacctggattgcagctgatggcccccaaagtcctctagatgggccctgcaggactcgctgggaggcctggttgcccctcccggcgtgctgggacactctgggttcctgcagttagatgcagtccatggagttctcagggaggaggc

SEQ ID NO: 159725 - DNA, 1000 bp, Homo Sapiens
tttttttttttttttgggaagtccacaaggcattttattccacaggaagaaaaatgatgactctgatatgagaaccagactcaagagtcttcacacactggtgactgtaatagtgtttacataatagagaaccagatatttttagaattttatcaagcagctactatggtattttgaggcccagatcatacttacaaacaaagtggccctggagccttcagaacattgcgatgagcacccaccaagcagcaagacactcttgggatttggggaaggggccgcttgtctgttttccactgtgtagtgaccaggcccaggggctggggaagcactggcctggctcacccttcagtgagcacagagaagcagcgacagccagggagtgacacgggtcggccaactgtgctgggtcaagggactgggtagctttggatatctccttacccaatttactcttattccatttattttactttcctcagagacgaactgtgtgtttgaagcagaaagaaaagcagtagaaatgatcttaacaaagtcttaggcattgctggctgaatatcagtttacaaagagacggggcatttaaggagccaggggcagggcctgtttcctccaaagctttggatgttttcctggtgagaaccaggaggggatgtcaaatgcccctgaaaccttctggccttgtctggcccagggctgcagggcaggggagagctgagaagtggagcagctcgcagttggccctcccatctcccacccagccccgccctaggtggtctttggattccattttaacatctgcctctcctaaggtgcaaatgtcaaagtgcttggttgtgcaatcacaggagatgggcagctatttaaagagctgattaaaattagaaaggagcccaaggggggcatctgaacacttctctggattcctcctgaagcaccagcccacagggcagcccgcagctaacttcctcagtcaggtctgagaacacccagcact

SEQ ID NO: 159726 - DNA, 1000 bp, Homo Sapiens
gccttcttattttaataggatcatgtctctcactttacaaattctcaaaacatatggttccctttttacatacatatataaacacttttaaacataaatatcaaatgcatgagaatcatgtgggcagataaatttaggaagccaagaacacagaacgaaaagccagtcaccagatcttacaaataatcatctaaacttctctggccattcaatttgatacattatcccaaatattccatgtcacatggtccacaaggttttcttttgggattctgaagcaatcaatagccatacttgtcattaagatgggttctgccatctccactttgaccttcaggtgggacccacacacagtagtctgggtcatcttcaggatatttggaagaaagtgttggtggaagtttgcctggaccaggtgttttctttttcttcaattcacctctgcttttctcatattcattctttgatgctgagggtcctgcgcacaatgaagtggttttgctacagtcttgataatctttattctgttcttcctcgctaagttgagacatgttttcatgggtttgggtttctttaaaatgtgtgagatctgtgggaggcctcatttcctgcactgctgcttctggctctatctctggctgtggcctactgaggcttccatcctccagttttttcttttcatgctcctccttttctttctcttcttcctcttcctcttcctcctcctcttctacttcaggctcatctttcattctcattagagttggagggagttctggacgcttggggggtaacttccctactgttccagtttttaatttgaatttgcttcctcctttcatggcaccaaatagaggcaatgtaagctttttagctttgttttctgcacctgtagtctgagtttcagtcttttttagttctggaatctctgctggctttacaatttttattaaccctttaagtctctgttgttctttcctcagttcaaaagttctcaggt

SEQ ID NO: 159727 - DNA, 1000 bp, Homo Sapiens
ttttttttttttttttttacttttttcaatttttattatggaaaatttcaaacatatacaaaagtatagagaatagtataatgaactctcaaacatccatcacacagcttcagcaattaccaatttatggccaatcttgtttcatctatgtactcaattaccccacactcagatgattttgaagcgaataccagtaacatatcatttcacctgtacatttttcagtatacttctctaaaagataatcattttttaaaacaacataaccacagtaccatatcacatcttaaaaaacaataaatcaagaagttatatttttatttcaaattatgtaacaactggggacacaatcaatacatttcactggtatcatgaggaagagtgtcacactaaaatggagtccaagcttttatcgatgcaattgctttataatataaaagaaaaaatcaaacaaactagcatattagaaccacttttggtaatttgtaaggagctgaagactgctgatatcacacatcccatggcaaactccgtaagatttcttctaaacatctttgttattttcttaaaattgttctggaggcagctgatgcaagtcctcttttttaaaaaaaccttcactttgtgttcccctctaatagcagcctctttcctaaatgccttttctaaatgacaacaattttgccctctctcagccctctgcattctcatatgcagaaaccaggtaggatgaggagctagctgtgtgtactggaaaagggatgaaaactacagccaaatggatcagtgagagaggcaaaagaaatctagacaaactaaatggcataattaagtttggaaactgcctatgatatagcctgttggctctggcatcaaataatacagtatgttaaatctgtaaaatgaggaaacagtgtttcctcaaagagatgttaagatgacatgtaagaagtggttagggcaggcattgcaaaaaaatgtcttatatatcattttaaaa

SEQ ID NO: 159728 - DNA, 1000 bp, Homo Sapiens
ttttttttttttttttttcaaaaagaacataaaactttattaagaacatcttatactgtcatcagatacagccaaagaagaacgggtaaacaaacagggaaagttcatcttcccatgtgctattgccacctcagaacagactcctgtgtggatggctggaacaacagttggcaacaaatgctctgtataaataattcattaagtaacacaatgtttcctttctatacagagaagaactgggcttacattttaagttttgatatagtgcaacaactatgaaacaagactacatccttaggagctatttcttaatagaatacaaagcagtttagtagctttatgttatttcagataatgtaatttttttaatgaaaaattcagaaaggacattctaactttcccaattagttaatttgtactgttgagttttttctctctaaagatttctcagaatcagttcagtaactatactttaaaaagatgagttgctcatctacagtgataactgacaacttagttttgtgattttgcaaatcaagatgcctgggtcatccccacttttgctgattctgaaagatttcttatagaaaaaccctgattcagagtgcatgtgataggagataccaaaatagctgcatctggacagggaggttggctattgagcacagctgattctcagattcctggttcccctctatggtccttttacttactgtagtgatggaaggagagaaggagcgcccgagaatctgttcagattgtgactccagacagctctctgcactgtatgtggagaaaagagtgatggcatccattcaaaccatagcagccctacggcaccatgcttttctcttgaggggtcagaccaaactgcactcaaagatgcatgatctgcctcaggtgcacagtggagaaaacgctcatgatttacaatttggtattataatacccccaactaatcccatttcttgagaaaatgaagtcttccttttaggaagaa

SEQ ID NO: 159729 - DNA, 1000 bp, Homo Sapiens
ttgccaagtgtagtcacagtttatttctgatgtggctgaatctagggacaggcgggctgggctgagtggggggcgtgtcggcgatggggctagaactccaccttgcaggccgggaaggcgtcatcctgcatggacaccatgctgttgctgcccaacaccgtgatgcccagcgcctggtgccgggcgtgcgtctctgcgtaccacgtatgcatggccaccgagtcgaaagtggggatcagggtcacctgcaggtcacggtcccaatgctgcttgctggccagtagcgcgtccaggacggcccgcatgccttcctccttgcgctggtcctggccactgatgacgtagcagagcgcgcgcacgcgctggaagaactcctcatccaccaggtgggcgctgctcccgctgggcaggtaggccaggtccaggtagaccggggacttgggtggggtggctgacaccccgggccggctgctggctgaccccgacgggcctcgagtggcagtcttgggggttgaggactttctggacaggggtgcccggcctcccttctcactgggctcactccgggcactgagtggtcggctggcacggtccccaccagcaagccccttggttttggcagcagccactggagtggctttgggggcggcagcgcgtgagttggggcgggccaggggcttccgggtgcggctgacgttctccgtttgccgtgctgtcttggggggcagcatctcggggtccaccatgcagatgctggatgggtcaggcagtggtggggggaccttgagggggtcaggcaaagggtcgtggcgagggactccaaagccctctgtgtcttcgtctgagtctgccgcaccgggggccaggggcacgggatccgagtcagacagggtgggcagggactcgctgaccgatgtgggtggcgtctcctcggcccccagcccacctgcccgttcctgtgaccgggcactgctgtcattcgagctgccgggggacgcag

SEQ ID NO: 159730 - DNA, 1000 bp, Homo Sapiens
gagctgataattgatctttattatacagaaatgtgaaggccataagcattaaatgagaaggagtttggcagtgaacattatgcagattcaaactgaaggtatcctcgtcttactgagatataaaaataaacactaagagttgcaagaaagaactcaattcaacttctatctcccaatcaagctataactttccacaggaaaacctggtttcaattcatgccgaattgttcaaagaaaagaaaaagctaaatcagttagagacaacacatggactggcttttgtcctattagagagccagactgaagctgtattcagcctcacatttagagactgtttcctattacaatttatatctctatttgcctaagagatacctaaagtgaaaaacaaaaaaatgttaactgagctggggcatttttgtggggctaagtagatttggcagaggagagaaatgaataaataattcatttaattatttctaatcaagaggatttaatgtcaggtctgggtcatctgtattaaccctttgacagtttgttgttctataatggtcaagaagcactatcccattaaagtataataaatgctgaacatcagcacagctcagtgcacatcctctttatatcctcaaatactggactttatatcagcatgctttcaataccaaattagccctttaaataggatctttcttaataaagcttctcattgccctcactactgaagtaaaaaacgtgttagagatttggccagaaagatggttttactgaaataagactgatgactaggagcacatctatggattaaatatagacaaaactactcccagaaaccttaaatatagacagactttattaatttatgtaggaagccaaaaataggaaataaaaagatccggagttcagatatactgatatattcagcaactgaaacttacaattccttcaattcagtcagagcagagacatttaaagtagtctggaggggtgggtgcagtgg

SEQ ID NO: 159731 - DNA, 1000 bp, Homo Sapiens
actgaaaaactcagactttattcagattaagttcctctacaaaaagtagggttctgtcccatgtgtctctgacacatttacaaaataccagttttttaaaattttggtcaaattatgagtggttgatttaaaaacttttccaagaagaagaaaagcatggagtagtaatttaaagaactcaataaaaacttctattttttattttaaaataatatacacagtgttattttcttcaagaccgtcctgtggatgtgaaatccgtcttcgcgtcatgtatctcccatatccagcagttcagccatccagctacctttgggaccctgctgcaccttgtgtttgctggggagtcactggagagtgcatctctgttcagtttcagggcacgtctcacacatttgctgttccttattcattgttgacacaggggataggtgatccactacttgctgtagaatgtccttactttcactaggaggcagattactgaaatagtattgtggtaccagctgcataaatagttcaggagagatttctgaggtaatcctgatgtagttgttctcagaaatgctgaatttatggaagaggacccactctggcatcttcttggtgattgagtaaccagacaggggatgcagctgagcaacctgcttatgtgtcagcattaagtagttacctgatccatcaacatcccgagcaatctgcataaagtaaccggacagaagagctttctttatgtttagagtgttttccttggagccaaaagcaggttctgcatagggaagctcgattcgcttgataatttctaagagttcagctcgaataacatctgccattctgagtgctgaacagttgaggaagtaatcacgacaccacttttccacacagtactcactgctagaattcagagttgtgtcttggtaagccttgtaaatgctgatgagggtaaagtgatctccttcgggatgtaaaaatgtcttccaacaagtcaaggcagcctctt

SEQ ID NO: 159732 - DNA, 1000 bp, Homo Sapiens
tttttttttttttttttttttttttctgtggatattttaaaagtttatttctattttaactagcccacagaccccattctttgagggctgatctgatttctgacaaatggtctatagaccctcctctcggaaacttccaaaaaagtctgcaccttccatcatgatgcacattttaagttaaaattgccaatacaacccttaaaatgcaagtttattgaataaagctgagaagagcagtaaacagacaaaaaatgcatccacctaaataaaaaaattcacatatttacatagttcagtaactgttaaaagttttcacatgcagaggttaatgcacaggaaaatgttggtaatagcgtctggatgtcttgaaatgcggaaagcaatgtatagacacacaaacacattaaggtttagctataggtcaattaacaaacctatgcagtccccacagagtcacacattctagttccaattcctccttttaggcacaagcaagttgccacattctttgtaatggttcacactgaccattaatggtgttgaacaacagtagcaagtttaaatatcccttcatttacagaaccatccatcccaccagggtagtatgcaacatgcttcaaagaataagaagagaaatttaaaagcccagattctactcataaaaatatgaatggagaaaagcaagtagtgtctgtgcaacacagtgcagtatattgtacagaatatttttaaggccatggcagtctataaattaaaactgatattcattaaaagaacttactgttgactacactctgagtgctcaacacatttggaaatgcagtctacataagtgctgcttaacaaaagaaacaaaatcacacacagtgtgaggcaacacataagcaggtgtaccatagagttttatctactacagtggtctatatgaataataatttacaaatgaaccagtattaatatgtccctttatgtatacggaagtcgctaaactacaaaacat

SEQ ID NO: 159733 - DNA, 1000 bp, Homo Sapiens
aatgtttaaagagaatttattctatagagtgcattcttgcactctataggtgacagaaaaacaaactgtgctttaaataccaaacaagtaaatcagaaagcttattttctatttaaaatatatctaagacacacttatataaaaagaaaacagaccctcctaacatgtaacattaccgttcgtggcaattgttctcaacctttcactctccttttgaccttagcattaagctcctttgctcacttctgagctctcagttacagttcttgaggtggcatcctaaccaatttgcactatctttcaggtgaagcgctggatatttaccagataattgaactcaccaaaggctccttggaaaaacgaagccagcctggaccatagcactgcctggaggctctgtatttgctcccgtggagcttcatcggggtgggtgcaggctcccaaactcaggctttcagctgtgctttttgcaaaagggcttgcctaaggccagccatttttcagtagcaggacctgccaagaagattccttctaactgaaggtgcagttgaattcagtgggttcagaaccaagatgccaacatcggtgtggactacaggacaaggggcattgttgcttgttgggtaaaaatgaagcagaagccccaaagttcacattaactcaggcatttcatttattttttccttttcttcttggctggttctttgttctgtcccccatgctctgatgcagtgccctcttcattttcatcttcgccatcctctcgaagaaccatgtctaggatgtttcctttgatcttgaagtctcgtgaggtgctgagcttcatgtgctgcatcaggttcaccttggacttcttagaaaggtggatgagaaatttttcatactgttctatggcaaagatgaggttagggattggcttggtttcccgaagaactctggccatggctgtggcaacggcagcaggtttctcctttttctctcccgtatagttcaggctctt

SEQ ID NO: 159734 - DNA, 1000 bp, Homo Sapiens
aaatttgactcattcaaatcttggcaattagcatgtatagtatgttatgagagagagagagagaaaattagcagaaatggaggaaaacatattacatcctaaataccaccaaattgccaaaatacacatttgggtagtaatctccagagaactctctggaggcacagcatctatcatgctgatttccctgaacaatattacagaatagccctgtgtactttctcttgggggggggaggtgtaaagaattatcatatggaacctcacaagtctctaaaacctttctgcaattatccctcataggattaccacactgatgagtttgttcaacaggcgctgttgtgacttcctaatttaactcctatagagatgatttgtgtggaagataaaacactatatttgaactcaattcccaccttatccctgagcttatgctaccaagcaattcttacaatgtttggagttctattagactacagagaagaatctagggtttcagctaaaccctttaatccacaggcctaggtaaaggactgtctcaaggtagtcgctagcccatgggttctcaaagtatggtctgaagacccctggaggagtccctgagacccttttcgtgggtctgcagattaaaaattattttgtataataacaccaagatgagttacattcaattaggcatttttcttttgaaattaagcagacttttggaaactaagatgtgcatagccctgtagtaggctaagtggaagttacaaaggcagtagtagctttttttccccctctcgttatctcatgaggatacagaggacttttccagaggctacatgacatatggttatgtcatctctctcatagctgagggatgtgtgcttctgtgttcttcttgagctttaaatatttctcagtcttaatacctaaaataattagtatcaatagatagaacccacacccaagaactccttggggccttcaataacttttaagagtgttaaggtgtccta

SEQ ID NO: 159735 - DNA, 1000 bp, Homo Sapiens
gttgcttacaagtagttttattattaattttagagtaaacatcaccaacttgggcacaattccaaaatagagctcttgttggattctggtcataaaattcttttttaagcttgttaagatcttataaaataagaaagttttcccaatactttagaaaaattactaatcattaataagtcgattttatactcaaagtaatggcctaacattttgaaagatgaaacaacgctcctcttttgaacatctaatgtattaagtaagctcagtgtcccaggcttcagaggagacagagaagtcctcatattgcaacctgaccagatgactctgggagtgaattaaatgcttaaaagaggtcagtcttgcaaattcgatgaagcacagaatacaggggaactgatactgattctgataaaagataacattactctcagaaaggggtgaagctaaaaatcttgcagttctggggcaggaggagtgcaacaagcaggcaacaaacagcatgaaaggaaaagctgagtgaatttcaaagttctattgggagatggagtttgtggttctttctgccccacccaggtcaaaggctcatgtccagaaaaggatttctcccagtgatagggtggaagtgtgtggcaggaagttgctgtttggtcctggaagtgtaaaggaaagccttttcaagtacgtgaagtagactgaagtgacccagatgggatggatcccaaccacatgagttacgggagagcatgaagccaaggaaatgataattatgaagttgaattgggaaaataaatttgactccttgttcacttctccagcctttggaagaactttttctcccctcctaacaggaccgatatactggacagcccctgttagagataaaccgaggcactagacaaggaagaaatgcattaaaaacattttttttaagtcttgacaagtcacttctgggagaattcttcatttttcctctgcacagggacagcagaagagggagagt

SEQ ID NO: 159736 - DNA, 1000 bp, Homo Sapiens
tttttttttttttttcaacgtagaaaagttttaatgagacaaatgtcaaacaagcacatcaacttcttaaaaaacaaagaaaatctgaaagtttaattacaaaaacacttatacagaaaacttggcatttcaacagttccaaacacatgtacacaagttttttctaaaatcagtcagaaataaaataccttgtctccctttcctcagctgcttcttgtattttaattaaaaagaaacaaagaaatctgtaacactgaataggcaacaacttatttcttgagaacataaaagtacagtaatatctacaggtgtactgggaaacatgaattaggtattgtgctagcctgtaacttcatttactgcctcctcactgagcacagaggagagaggaggtggcacagacctggtctatagatactgacagttttgtggcatctgaatcccagccaccagaggcaggtgagtagctactgggaaagacagcatttcagaagcaagctgcttattttgtgaaaatgatttcatactgtaggctctcttgaaatctcatgcattcctgaatatgcaaatgtttcaagtcactgtcaagtgtcccatctagagtcagaagaatgatgatcctggaccatgttatggccttttctggtcacaaaagcagtgctagcaatgctgcacaaaactgaacacaaatgagaaacagaaatatgaggaggaaggaagacaggacacaaagcatctggcagaaggaaaaaacaaaactccagaatgggctctggatgtccttctgccatagacagtgagttctagcttgggctttgcagacaaggagtctaagagaagtggcagaaatagcagatgatggcagggaaataggaaaatacagaagagcaagagaactggctaggtttatagcaatagataataatggggtcttattctaaaaaattgccaagtgatggtatgtgggtttcagcgcatggatatttgatatatgttcata

SEQ ID NO: 159737 - DNA, 1000 bp, Homo Sapiens
tttttttttttttttttttttttttttttttttttttttttttttttacttgaaatccaagaatggttttaatgtgttggccgagaaaaataaactgtaaagttctgtgaggtcttctaaaaatttacaagaaaaactgatgggcagttctaatcagacttggatgttatcttttcccccctttttaaaaatgacaacagatacagttccacaaaatacaatagaaactgtttttttatcttgactgccagagacgctcctttgcaatgccttccggtaaccaaatttttgggcacaacacacagctggccttcatttcttcaggggctggtaaacagaggcattggggtcaagtccagaggggctggtctccacaaatttggaagagtagtggggggaaacagggctcagggggctggtggcggcactgtatgttatgctgggcatgacggccatgacttcggctatcttctgttttaggtccttgatttcctgatctttctgaaggatttgtccttgggcaatctcgagctgccgctttgcatcgcccagtgcggagaacaggtccagcttgattctcgtctctgcacttaagctgttctccaggtgctgtgttttgtcttgcatggctgagagggctgacattaacacctcagtgtccttctcattttccttatatttccgaagctcctggacttttagttctagttctctgatttggtcttctttcaccttcatgtccatcgtgagcttcttgccctctgcttctagttctctgatccgattccgtaaggtttcggtgcattctcccctagatgcagcagcaaacgcaacagcccgggcagcagtggcttcttctaacttcttcctctttttctcttccattaactgtttctctacaaaacttcgggcttcctgctcagcttttagctttttctccaactggctgatattctgcttgtctttttgcttcatttgcacagcattatgtaacttgttc

SEQ ID NO: 159738 - DNA, 1000 bp, Homo Sapiens
aggaatatagattttaatcattgtgctgctgctattaaccagagtgcaattaatccatcttttgtggattttgatgccacagtgtaaatgagagggtttcacacagaaacactctgggggccttcggtgacaaaagggctaggcctctggtggggagggggtggcaaaaggtgaagtggaattaggagagatgtggggagcagacccagggctgggagactgctccttccccatcacacatgcccatcaaggaccccaagaggaagggattcttcctgccatggcctgggctgtccaagtgagcctgacttcccttccaaggcagctgcctctagcttcatgtccaattctcgctgagtagatgaggtccagggtaggcccacagttgaccaccaaatggtgaagagatataagccaagggagaagaaagtggtttggaacccccaatcattctccatttttcatcctaagctaccttaaaactagttcagagctggggaaagacagcaacagcagtctatcctctcggtcagaactgctctacctgcctcctggagatgggggtggggggaggtgggactcacaggagggagaggtaggaaatattcctgtgcctttctttgcctgtgcagtaagtgaagactctcttcagagtcagctctgcagctggtggagtcatctgtgcctcttacagttttctgagattggtaggatttggagctatagagaggtcaacttagagccccaaggccagactccactggttgctaacaggagctgacattcttggaagtagccccgactgcttggacaagatcattcctcatgttaagagtgaagtgatatggtccagggcaaaggtactgagcccagagacagctaggagtcagagacacacagggcctccactgcgtcactcagaccctggttgacacctcccacggcgaggaggcagttcttgacgactatgctggagcaggcacagcggggtgtgggcatg

SEQ ID NO: 159739 - DNA, 1000 bp, Homo Sapiens
gatagccaaaagcaatttattatagtttagcctcaaaaaaataaaaataaaaaaattatccagtggttatgaggagtctaggaaaacctgtcccagtaatgccaacttggaggtgaagggctgactggggcagctgagaagtgggaccttctgtttggcaggcttcctctcccttgcctggtcatggttttctggtgagaagagtgttcctggccttgctggaggttcccatggccccgaactaacagtgtttttctgaaatttcgacctgcaccgtttgagagagtagaattccctcatcaagtcctccacctcccactgctcttccttcagcctctggcagcagtgcagggcggcagggtcgatggggtgagcttctgtgttgaagatgtaccccccagcccccaggatgcactccccatagggggtgatcaccgtgtcgaaggtggacccattgttgtggatgaagttggttgggtcaaacaggaggtagaggtatttcacagtctcggccaggaagaacgactccatgcggttgtccagcttgtggtctcgcagatctttgattgttgcaaatccgcactccaccttgctgattttttcaatggattccacagcatctcttccgagttctaggagggtgggatcccccgtggcacggtagaggtacattgcgctttcaataagttctggccgaagtgggtagccctctcgcttctccactgtgtatccctgaggaatgttgtagaattccgggagccccccaaactgcttccatacagtgtagtagttgaggaaggtcctcatggcattgtcaatgtctccaatgaggctctgaagaccaggccagtaggcctccaaggactggaagactggcatggacacagtccccttgtacatctgaacccacaggtaccagtcatcgaagcgggtgtagttccggatggctttgttatactctaggaacatggccatgagcttcttatcctgaagcaggatg

SEQ ID NO: 159740 - DNA, 1000 bp, Homo Sapiens
ttttttattttaaaatgtgaaaggagttctttttaatacccagggtaatacaatatccaagatataacattaagtaagtgataaaaaacaaagtgtatgacagtatagatgacatcctacttatattttttgaagcccgcagattttatatgtatgtttgtgctttacatgcctagagtatctctggcagtgtgtgtaagaaatggatcaaaacagttgcctccagggagaggtaatgggtgccggagagagagggaggcttaggttttccactagatacctatttgcgctttttaaattttgcaccatgtatgtattaagcattaaaaataactgagtttaaattaacagaaaagaaaagaaaacccagtgagcctatgaagtgttgattctcattttggtttcttttttcttttttttaaagatgaagattaagtttgttttatttattcttgattcctcttttgcctttcaaagtcatggtcatatattaagtaggagattccagattctaaagtaaaatatcgaactgagatgacagcattagaaaaccaggcccaggacctgggattctgggctgagacaaagaactcaatcccaaaacacaattttctgataaattagaactgttatttaaaaactttcctagtgttccaatgtattttcatactgtatatatgtaaaatacaaaaggagcactcttagtaaggatacttgtacatttgtaacttgaatataagaaaaagagaccaaaaaagagacaaaattcataaagcaaagcatgtttaaatgaatgcattcctcttacttcatcctgcttcagtattgctcaagaaaatgaagcaattatttatcttgatttgctaccaggaatttttttaaaagcaaaagaaatattacactatttagtgtttcctaataaaaaataaaatttcactaattatgtaaaaaagaattgtattcttttacatagatcaacacaaaacagtacattgccttt

SEQ ID NO: 159741 - DNA, 1000 bp, Homo Sapiens
gaggagcaaacgcggctcatttattagaatatgcaaaagagaggactttcctccacaaatacagattgctgcttctcagtttctatcaagagcaagacaacagttgaaaactgtattcctgagaagaagcaaaaaagttatcagtttacaaacaaggataacaggtgatttcaacaaaagataagaaacttttttttccaagaatcaaaatttcaagtattattccagatgacatggcaaagctagcacaggcggaagccaaggtgcccctcaggctctgtagggtcttggaggaagggcccgggcagcatgagggagcggcgcgtcctgggacctgcctccagccctgggcttggggccgtggtcactcacacaagggagcagcacgtcctgggacctgcgtccagccccaggctcggggccgcggtcactcacacaagggagcagcatgtcctgggacctgcgtccagccccaggctcggggccgcggtcactcaccggttagcaaggagcgactaacttggcggccacgtcgagggttagcagttttggacattggaaggtttctttttttaataaacagaagcatatgcttattctttcaaataccatactatacccaattttagtcaatttgtaaattataaattatattatttgtgctacagtttgtgacatttaaatcttattagaagataagcaccaaacctattaaaataaaaaatagataaaatgctgtggttttcccagcagcaggatattgtgtacgtcctgtaggctgtaaacttatgctcccttctcctgaaacaatgtttttgataaacttgcccttctcccttgaaacttttcctgaaaacagacttccgctttaactgtagtttcggaaaatgtacaaaagagcaaaactgcccctctcggcaggacggccgcatgttacagaaaggcttcgtctctgctgctgatgccaccacgagccctgcccagcgctcaccaggagggc

SEQ ID NO: 159742 - DNA, 1000 bp, Homo Sapiens
agttttctatcaaccgagaatgtttttattaccccatcaatcctgaaggatcatttcaccaaataggaatttggagttgacagagttttgttttgaggcagtcttgctctgttgcccaggctggagtgcagtggcaggatcttggctcactgcaacctccacctcccgggttcaagtaattctcgtgcctcagcctcccaagtagctgagattacaggcatgtgccaccatgcctggctaatttttgtatttttagtagagacagggttttgccatgttggtcaggctggtctcaaactcctgacttcaagtgatctgcccaccttggtctcccaaagtgctgggattacaggtgtgagccaccgtgcccagccacaagttgatagttcttctggcactaaaagaacttgtctcacttccttctggcctccatggtttccagagagaaatccactgtcatctgagttacttttccctctagttaagatttcacttctttcttgatgctttcaagcttttttctgtctttagttttcagaagtctgtcctatcatggacttctttgggtttcactcagcttcttaaatacaggcataactcagaaatacgcatcactttcagttccagaccactgcaataaaccaaatacaagcaagtaagtcacatgaattttttgcctttccactgcatataacatggttcatactgtagtttttttaaatgagcagcagtgttatgcctaaaaataatgtacatacattaatttaaaagtacttttaaatgcgagaggagggtaggaaaagataagttgctgaagcctgcagtgactgtggcagtttcttaaagtaagacaacagtgaagtttgctgcatttattaactctttcatgagagattcctctgtggcatgcaatgctgtttgacagcatttacccacagtagaacttcaaaattaggagtcaatcctctcaaaccctggccacagctaagtttatggaata

SEQ ID NO: 159743 - DNA, 1000 bp, Homo Sapiens
ttttttttttttttttttttgcatttcttaatttatttttaataagtaaaaaatactcattgaaactgtacaaaaatcaaatcattaatttttgcacctggtatttcagtcatcaacagcaatctcatggtacagaaataaaataatgggaattatcattaacttcaccctggctttctagcttagtagaaccaaacagaagaaatcatggcaataaccattaactatagaaaaaaagtaatggaaaaatggttgcaggtttaatcacaaaatgaacttaatttttgttgattttgttttatctgctaaaacactaatatctataaatatgaactgacagcatcgttctaaatttacttctgaagagctgtcgagacttcaataaaatataagcaagttactggatcatatttatggactgctgaattaactacccgaaaagtatcagttactttcaaagaacacaaaacaaagtgaacgtggaaaaaagccttctttgcaaaagtccttttattagtcctatcctctaaaattccaagccacagagccttgatattcctggattctgttttaagtaaccttagttttaaatatgacacttgggatatgcacaatgggaaagggtaggatatgtgaacaaaatttaatttcttttttccaaaggtagtcattttctttaaattcatcctattcacttttgcccacttccccatgtacagattatcctttagtcatacaaattcactctccacttccacatacattttccccacttgatggtacttttacaagagggaaacaatacagctggttgataaagtaatttaaactatttgtaaatgaaataaaaagaaagtaggtataatacatagtgtaaaagataccaaattggagtaatattgatgttaatctagttttttatttaacaaagtacctactaatggtctgagcaggagagtagaagggaaggagctagagggaaatgacttcctatggttaa

SEQ ID NO: 159744 - DNA, 1000 bp, Homo Sapiens
ttttttttttttttttttttcaaattgagtattaatctttaatgcatttttttttctcatttgtaaaaagacatgaatgaagttttgaggttcgtgagatttcatcttttcttgaatggtcacttaaagtccaacttgacaatgaactgctctgaaaacataatatgatatataattgcagaagcaggtagagtataaagatgatgactagatggtttctgaagaaatcaagagaatggtaagaaagtgagagtgacagctttaaggagatatatactacatgtgactaaaataagcttaaatgatactctctactcacagagtgccttttgaatttttaccagaattcattcattaattttaacttaataagacacagcaagagcagtattaggtctaaattacctttaaaaatttggctgcagacattaaatgattacaaaacactatgatcatcttctgaaggtattctacacatcttaatatggctactgacatcctaagcaaaatgtcaaagtggcagattaacaagcttacttaaaaactaactctagaacagagattacacaccttaagtagaattatgcagattatttattagtcaataggatagttctgattaagaagaacagcttactatttaaacacttttcctttgtctctgttggctgttttttgaagagatgtagttgtctctaacatggtctctggtattctgtaacaacaccttatactaggagcttagtacttagatttggaagagaaaatagtttttatcttgcacattatctacaacccactgggagtggctgcctgaatctctgaactaaaaaggagcctgaccctttatccaaggctcagtacagaaaagggctgtaattgattagcaatgtctgccacagaaacactaggaaacaagtgtggcagggtgacccaggaccagtctaaaatgagcccaagtgaatcattacttttctatgttctgaattatactggcata

SEQ ID NO: 159745 - DNA, 1000 bp, Homo Sapiens
tttttttttttttttcattgttaacgtaattctattccatcgaatttatgtgcttacatctatacagaaacaaggaatacagctgaggttgaaccccatctcagctgtaaatcacattcatgtattcttggataaatgaactaattaggataaagaacattctaataaaaaaacttttaatcatccaagaattaataccgttttcattatataccaataattaattacgataatattggttctggactgagataacaaacaaacacttaaagcaagagctaaaaaaaaaatttccatttatattttttgttgacaagaagtaatggggtgaatgattaaaagatgtcgggcataatagattacattatgataggattcttggctgaaaagtggtatggaaatacagaaggagaaaagccaatttgaaatgtttaactactaaagaactagctcatttatttttataaatgaatgaagggtgtcaaattgttgtgatatttaaattgtactggatatgtttaaaatagtgatgtaacagtttttattttaaaataccaatatttacacgacaccagcaaatacatactttgtcaactatttaacttcccatgaaaaattttagataccaacttagataaaattttagatatcaacttagatgggtgagggtatacatgatttttcaaaatacttttgggggcacatgagcagaatactttgtggactactgctttaaaacacgatttctccaagtacagttgagggacaacttacagaatcacctgggaagggcagatgactttttaaaaatgcatattcctgggccccatccccaaatttgggttattaggtttggggtagaccccaaataagttttcaacatgtaccccaggtggctctcatgcaaaccatttaggaagcactacttaaaaaaataaataaaaactagcattttccggtattgtagccgtggctgaagagggaaacaacctcacatatg

SEQ ID NO: 159746 - DNA, 1000 bp, Homo Sapiens
ttttttttttttttttttgatgaaaccaatgcattctttattgcagactgaagcttaggggctcactcactgtgagctctgatttgggggcatctgtggctgcccacactttccaagacagacaagggcaaactctccaagcagaggagaaaacaacttccagaagctgccccttcaaaggcctgaggtgaggacctggggcagcaggcagcttggcatgcaggggttaaccagaaaggccgggtctggagggctgggcacacctaaccctcatctcctggtgactgcaggtcacactcccttcttcaggagtgccatgcagactctggaacaatctaacaggccaagtgtctcccagggtgggttagggaggaggctgagcacaggctcagatccctggaagtggcagggagagaactgagagaaacttcaccctctgctcggaggacatccccagcctaggtccttgcttctcaaactctaaagtgcttataggaatcagctgggggtcttgctaaaatgcagggtctgagtcgggaggtatagggtgaggcctagactctgcattcctaacaagctcccaggtgtcactgccgctgctggtccacagaccacactttgagttgcaaggctctggtcatacattgtgtttgtgcacatcagagaaggatgcctcttcttcaacaaggagaaaccccactccagggcacaaggcaggtggggccagcgcagcctgcacaggacttcagcccccacttgcccccaacacccacagatgaactcggtagctctggagatcctgtcttgacctcctcatcctgaaaaccctttgcccagagtttgaccaaccaggccttgggatacgagcagaatgaacagagtctcttgagatactgagcgctcagtgatggcccaacaatggcccgacctatcagttccttcccaagagacaagagacctgggcagggacgagggaactgggagcattctgagcagggat

SEQ ID NO: 159747 - DNA, 1000 bp, Homo Sapiens
ctctatttaatgttttattttggaagaaagaattgcatgttcagggcatccatgtagaccagttggtcctcggtatgtcggaacaacacagagaaggctggaggttttatcaaaagaaatgtcagtattgctctttgagaaagtttattggcaccaggaagggtgttgggagctggcaagctacaactggtgagcaaccgggcaggcaaaattattcctagagcttcagcaagttctctcagcagttatggacaaagctggtcccagcttacagcacgcagtttcaccagctggatgtgcagagaattacattactagattaatgttatgtgcctgaggtgcttttatccctggcttcttgacttttgattgggtgtgataagaatgacttaatttggtgtaatccactttcacagcactgagcatacttagtatgtactgagggttgctgaattaacggtgtgtaccgcaccccaggaaggcttaatgaagtaggattactgcttaagctaagacctttattaaaattttgtcctctggccagtcgtggtggctcatgcctataatcccaacactttgggagggcaaggtggaaggattgcttgatcccaggaattcaagaccagcctgggaaacaaagggtagaccctggtataaaaaattagctaggcgtggtggcacacgcctgtggtctcagctactcaggaggctgaggtgggaggatcacttgagcccaggaggttgaggctgcagtacgtcacgcacacacccctaccaggaattatcagtctttgtttggatttccacagctcgaaagatttcccaactgtttttcagtgtccacagtgcctagatctagacctcaaatgaagattaacaaatgccagctgggcatggtggcatacccctgtagtctcagctactctggtggctgacacaggaggattgcttgaagcccaagagttcgaggctgcagtgagctatgatcgcaccaccgcac

SEQ ID NO: 159748 - DNA, 1000 bp, Homo Sapiens
ttttttttttttttttttttttttttttaatgtttgggtaaaaatatattttcccccgctttatgtcttggcactagtgatatatgcatagattatctgttcaccactctcctaccttaacagatgccaaattaccaagcatgttgctaagtgatcactttcatatttgaaaaaatgatatgcttcacatcaatacaattactttagtttaaaaaagacaaatgtctaacatgcagcttacatatatgacaattctgcattaacaatgaaagtagattacacgacagttttagaaaacacattggttattttcaaacagcaaaatgacaaggatctacaactacagtttaaggcatatcagcatattttaaaattaagaaatagacaaagttctaatgctgttcacagcttttcaatttatttaaaaaattcccttcatacctacatacaaactagactttgtaggtcttaattcccactaaagaatgtgtcctgtcagtggaaccaggacttttcgaagctgagacctgacaattccagactcttgcaaatggcaaagcaaaggggtgggaatggacagtttttgtaggaccacacagagacagcaggacgtgggtcggtaacagctgaaaaacctcacccaatagtttgtatgtgaaacagtcatggaaatgtcaagaaagcaaggaaaccaagtctgttcatttgaggtgcacaagatgtggattgtgtgtgttactgctggtgagtcacaaagcagagaaggaagataagtaatctgtgcccactgttacattaaataattcccattgttgaaatgccctttttggagaaaaccttaaccaattaataaagagcctaagttgggaaaacacaatctgaactgccaataaattctcatcaatgcttttccatcacattctacagtacatgtgttatggagatctaaagttcagaagaagcaaaaagatggtattatgtttgaacaaaagatatgggg

SEQ ID NO: 159749 - DNA, 1000 bp, Homo Sapiens
ctttatacagttcacttttaatcattcatccaaaaaacagtttcttcccatttaaaatgcctattcatacatttgagttattccctttggattatcggaagccagattacaaaatttaggaaatgctaccaagtcctctttgaagcaacaggcacataaataatttaaaactctggaaacaatttttagaaccttaatgtgaaaaatagacttttttttaatgcatactcatttctgtcaaaggctaggctaaaagctttttgagggtcacactgcgtataccccttcctcatatgatgggtagttttgtggacacagtaaagagttaacccagcttcctcggggacaccaggtcactctttctggacacctgccatcagttgccatgcctaacaaacccttccctggaagcagttagaacataccttgagagttagatccatcttgggagtccagactcatactacctttttgtccttggaagtcaccaaatgaaagtaattgtgcccgatgattgagcagatattcatattgtcacactcgttccttttgtattaacttttatttacctgttaatgaaatcatcaaaatacaatgagtaggcaccttctatgtacatctgtcctagtgcttttgagtgttaatctaaactcatacatcaacaaacattctagccggacaagtaggtggctactcagtccattaagaaacttaattactagtttctagtagccttaaagtctcatttaacatttaacaaatcaaagagcatgtcagaggctggacatcaatggcagatgatgccaaagtcatagggttttgccattgtgtacagtgcataggctccaaagcatgacctgcacgtcttgatactcaggaatttttggaaaaagaaaatcacactcttttgtccacttttaaaaagtgaaaagtagagccttcattaccctagtagagcttaacctaatacaatacaatgaaccaaacaggaagaaaggca

SEQ ID NO: 159750 - DNA, 1000 bp, Homo Sapiens
ccattacagtgcacatttattgactctgtgtatcttcacagtgtgatcttcaccacagcttgcaaagtgtaaccactcagcaccttctgcttccttctgttcagtttttccactgcaattcttccagcataattttctgatagccagtgtatgactttggctttgacttgtttctacacagtgggtccagtcatttatttctggaacttgatcagtctttttccaggtatataagcaaatctttccacactccaatcctactgcaaccacgtatcgttgagaagggtggagcactgggcagacgctgacagctgtcacagccccacccacgtccaggactgaggagcaggggccaatgttgtgctcaatacagtcatcagtggagtcgcactcaccccagacaaccacctttttgtctcgactcccagtgaagaaatacttgctgtcaggactccaatcacaagaccaaataattctactgtgcacagaagtaattttgttggtgaaggcaaaaagactaaaaactggctcgaactcaggtgagattgtatcctgctttttccacaatgaccaggttcgatctctggaaacagctagtaagaacttctcattaggtgagaaggccatctgcgtgactgtcaaactgtggaaaactaaattctgcacctgtttccaagatgtagtgttccaaagaatgatagctgcatgctctttcttagctgccttacaagctgaggcaagcagagtctttgaactgttacaagtaacacaaaatatttcataaccgtgcccatatagtttttgaacttcaggccacaaagtattctgcagaagatgatcctcagtgggaggctcagtaagtatggagggctgaaaggccacctgctgatactcaaaaccagtactagttaacagctcctcttcatcagaaggctgagaagctatatctccctgaaagacagctttatttgataatcccaatgcagggacagtggctcct

SEQ ID NO: 159751 - DNA, 1000 bp, Homo Sapiens
ttttttttttttttttttttttttttttttttttttttttagagcatgagtaaagagaaagagagaaggaagaagtgcactaaggagagcgccgtcccttcttcagcattaagtgacactggatggtctggattcggttcttggctgggacaaactcgggctgaagcttcaatgtggattcataccacaccagtgctttttcaaattcttccattgccacgtagacattgcccagagtgaagtggttcacagcaaagtgtggtgcgatctctactgccatggtggctactatgacggcgtcattccagagcttggcattgtgcaagatgttggccaggctaatcaggggcacatccttcatctggtgtggcgcatagtgcagagcctggcggaggcagtcgattgccttctttccttggcctttcaccctccagtagagggctgccatgctggagaggacccaggacgtctggttcttttccaaaactttggcaattcgggtgccaatctgttcaagcgactgttgtggatattggtctttgccgagattttgtaatacctctgttaactgactctcccctgtgtagtgcaggctggctcggttggaaaccccatgcaagtggtccagggtatgcatactcgtggggagattgccattgcaaagaggctccattgctggctgctgtataggggtggcaaaatctatgtgttctgtgatgtcaatgttttttgaagaaactgcaagccaggtactcacgatggcagtcagctctacccagcggagtttgaggcattcgtccgggctgggccatcccagacgctggtagtcacgtttttttccttgtggcccaggagatgccaccttggggccagtgatctctaggtttgcttggtaacgatgtccattttctatctgacctgtttctacttttttcccaggagttttcttatgatctcctttgggtttctttacacgtttgacctggaatgtaatccattc

SEQ ID NO: 159752 - DNA, 1000 bp, Homo Sapiens
ttttttttttttttttacaaaagattattttattaattcaatttttgcataaaagactgttaaaagaacttgctaacttgaaaacaattttgagtatttatgatctttccaacttgaaaacacctgaaccttatagaacagattgtgtaaagcagccagggccacaggagtgaaagaagatggagacccgccgtctggtcatgatatgagaggcctggacagtgacctcacgaacaaaaagaaatgatcctcttcagtccaaagtgtgtttgtgagactaatgactccatgccctcacatggccactcctcttacagcagacagcttcactccgctccagccccggtactgcggtctgtggtaatttacatgggaatgggatgagatctagtagttttagatccaacgcaattctgggaagggttggtaataaaccaaaactcaatctatgcagtatttaaaaaataattgagagttgtgacaacttcgattcttttcaggaggtgctgtcttaagatagaagaaagggatcaagctcttatcttagaaagcacagacacgtttagctcagggtagtgcaattcaatgctaagtggctgctccatgaaatctaagggccgggtaaggggaagaggcccagggacttcttccttgtctgacactctcgggactagcattctggcaggtcttacaagttataatacaaaaccatcagataaattctaatcacgactgtgtagttcctccccaaaataattttcctcttagaagtaaaatcaggaaaggggctgagttctgaaaagaaacatcggggctgtggcccaggccctctgagtgtggacgctgtcccccgtgtctccatgtttactgccttatcgtctcctttgtatgaaagtataatttacgtaattcgtccttggagaatcacagtggtgttcaagaaccttttgaggccatccaagtttttgtccttcagtaccttgaaatcagataatctcaa

SEQ ID NO: 159753 - DNA, 1000 bp, Homo Sapiens
cagccaatcacaaaaaacagactttattgaagtatttagcactaaaccccacacaattccagctctgtagctgaggacacagccacttggcaatggcaccaggtgttatacaagaccaataagttaatgtaaaggacgcttaggtgtggagggccagtgctcagccgtctcctggctcagaacaaggcactctgggctccagttaggacactgagaggccagggaaaccaacatgccctggagaaaggggcttagagacaaaccggaaaagcacagcatccaagcagggtattcacgcatggggggcagagtaggcccaaaagttgggggttgctgatgcggtaagagcacagtgagagaaatgccaggtgcatcccttcagcctcctgcatcctcccccaggttcctttgatgggccatcctgggtcttcccttggcacccttgtgcaatcggctacatcgttttctttccagtagagagaactgtgcctcttctaggtcagacaccagagttcttggaaccttctgctatattcacagtctgttccagtccaggtaacatgggggcagagagttctgcacaggtgaagtcagaactcagctctccctacctctcctagcctcaattcagttgctttctcattgaagcaggtcccctgacctggaagcaaagaaggccctaggatgagaacccagggacagctgggtggtcttagcacaggcagcttccagacttgctccagtcgctgcagctgggacaattaatgaatgcccccaaagaaaattcagcatctcatcagcccttgggagtgagtatgtccatgtttgtataaataaccaccttctcagagcagaagcatagctggtggggggagtaggaactgtgactccctctcccaaccagaacatgccacaaaagtggtgcctttcaaaaaccacttgtaaagtattggtttttgggactatgatgaaaaaacgttagaagggccaggtgcggtgg

SEQ ID NO: 159754 - DNA, 1000 bp, Homo Sapiens
cagattcacaagctttaatcattactttttctgttatacattgaattgtggatgtcctttaattagtaaaacagccactaaaattgtttttatggtttgctatcacaaaagtcgaaggattgctagaatgctgtttacctgtttcaacagctcccatcaactaccgctactcactttacatagaaataaaaacagctactattcattgagcctatttctatatgggaatcttagtgtcctcacacacattaattcactcaattctccccaaactctatgaggtaaactattatgcccattttagactcaaatgtcaaaaccatatatgcattttgttccactgaccccaagtggtaactgtgagtagtagttctaacaatgaggcattttttaaaaagtcctattaatgtttacctataatttaacctataaggataaacccatacccccattgaacatggtacttttttccatttattgtctaatatgtggcacacagtaaatgaacaatctcaatccttaaaacaggtgttatgacttttacatatgacaaaaccacagagtaaatagcagaacatctcgaacctgcccaataatttgcctcctaacagaggtgtgtacggcctgacctttgtacacctcaaaaatggcaacatgggagaagtaattccatcattcatccacacacagcagagaggtacaagtactaacagaagctgatctctcatattaacgtatgtatttgttccttgtcccgtcttcaggaaccaataaaaataaagtgagctccgagagagtggaaatctggttggcctcattcacagctctactcctatcactttgtacagagcctggcatagacagctgttcaataaatactggggacaaaataaagtccatgtgggaaaatgggccagccgctaccaaggatgaagacatacaatatatacatatatttttggggaagacttcaattccgactcacaggaaagatgaatcc

SEQ ID NO: 159755 - DNA, 1000 bp, Homo Sapiens
cagtagatcagcacttattttaattactgagatagagtcacacttgacagaagcaagccctgcggtatatggcatcatcacaccaccggtgggtattttaatcctaaaactgagacagagtttacttaaacatttaaggcttgagtttcctctgtacagtgtggaggtgattaagaaaattaatcctaacatgaagatttttcatccagttaaaaaaagaaatactttaaaaacgacctgcccttccaaaacatgaagttaacttggagtttttctgtgatatgacaaactaggcataatcctatctcggaattgttgagtagaaaatttatgtactaatactcctgttaaaattcaacagctttattgtgaaagaatccagagatctcacactgaaaaaaatactaacacagctcatatataaattacttatctataagaacaattatagaaggaatctaaatggggcaattttaacaaaccaggcaaaatatcacatatacctgaatataaggtaactccaagccatgagtataagattaaggcagttactttattttgaacaaggaagtggcataagcaactcagtgtgtgccccttagggtgggagctcttcccactaccactccccaccccaaggcatcattttggagaaaaaagtgtcttctatctggctagctgtgttatctaggattgcaccttcttacacggcaggcgcggcatcacgtccagatgggcatctaaggaactgcatttcgggagatgaaactttcatttgggactcaactgaatgcatgaactaacacagggccatggacccaccagtcttgattgagttacagaaaatgaaggtgactctttacacttccaagttgctttctagatcctttcattacaaaatattctgatcaaataatcttacaaaggaaagataatctagcctcaaggctatcctctaaaagcaaagagaaagtgattgattttctgctcagtcattaca

SEQ ID NO: 159756 - DNA, 1000 bp, Homo Sapiens
tttttttttttttttttttttttttttttttttttttttttcactgaacaagcattttattccagggattcccaacatgtgagcagggtggaagcctctgacaaggtgggccagaacctttggatttggtttgggggccaaaatcaactaaggctcagagaacatacaaagcctgcgtgaaggtggtgagctgctcccaccttcacaggtctgggggtcctaaacccctggagccatggtcagtcctgtgcccaagcctcttcttttgcaggccctgaaactttcactacagctcagacactgctgcacgggccggggagggagggggtgcttccggcaactgttcacagcccctcactcagcctccctggtgaccaggcacagactagccagggaacggagcaaagccagctggctccagatccagctgagcagcctcccggaaacctcctaacctacgcttaatggggagggtgcacaaggcagctcagaaggtgcatcttcctgggatctgaagcctaaagaaagccacctccagccaggctactgggaggtgttgagggcatgactcctccactgtcggctaaggtcctcaatggtgtcccgaagcatcagcatccagttgtcacctctccgcatcagggtgcagcgtgtctccttgtgctccagggctacgatctccgcgggagtctcaggggtcaggccagcagccaggacagcttccgggaacttggctgcagaggcaggggcgaggcagcaccggggagtgctggcaaactgctcctcctggttggaggccagctcagccaccacctctgaccatggctgtccctgggatatctgtcacgctccctcttctgggcccacagtttccaaggcacagttccacacagcacccatcacactccattacagccattttttcgtagtcctgtctctcccacttgctgtgcagttccttgggcagattcacactttgggtcctttcaaactgctccat
